United States Patent Application Publication US 2011/0183924 A1 - sequence listing, part 183

SEQ ID NO: 446831 - DNA, 7219 bp, Homo sapiens
acagcggcgacctagggatcgatctggagggacttggggagcgtgcagagacctctagctcgagcgcgagggacctcccgccgggatgcctggggagcagatggaccctactggaagtcagttggattcagatttctctcagcaagatactccttgcctgataattgaagattctcagcctgaaagccaggttctagaggatgattctggttctcacttcagtatgctatctcgacaccttcctaatctccagacgcacaaagaaaatcctgtgttggatgttgtgtccaatcctgaacaaacagctggagaagaacgaggagacggtaatagtgggttcaatgaacatttgaaagaaaacaaggttgcagaccctgtggattcttctaacttggacacatgtggttccatcagtcaggtcattgagcagttacctcagccaaacaggacaagcagtgttctgggaatgtcagtggaatctgctcctgctgtggaggaagagaagggagaagagttggaacagaaggagaaagagaaggaagaagatacttcaggcaatactacacattcccttggtgctgaagatactgcctcatcacagttgggttttggggttctggaactctcccagagccaggatgttgaggaaaatactgtgccatatgaagtggacaaagagcagctacaatcagtaaccaccaactctggttataccaggctgtctgatgtggatgctaatactgcaattaagcatgaagaacagtccaacgaagatatccccatagcagaacagtccagcaaggacatccctgtgacagcacagcccagtaaggatgtacatgttgtaaaagagcaaaatccaccacctgcaaggtcagaggacatgccttttagccccaaagcatctgttgctgctatggaagcaaaagaacagttgtctgcacaagaacttatggaaagtggactgcagattcagaagtcaccagagcctgaggttttgtcaactcaggaagacttgtttgaccagagcaataaaacagtatcttctgatggttgctctactccttcaagggaggaaggtgggtgttctttggcttccactcctgccaccactctgcatctcctgcagctctctggtcagaggtcccttgttcaggacagtctttccacgaattcttcagatcttgttgctccttctcctgatgctttccgatctactccttttatcgttcctagcagtcccacagagcaagaagggagacaagataagccaatggacacgtcagtgttatctgaagaaggaggagagccttttcagaagaaacttcaaagtggtgaaccagtggagttagaaaacccccctctcctgcctgagtccactgtatcaccacaagcctcaacaccaatatctcagagcacaccagtcttccctcctgggtcacttcctatcccatcccagcctcagttttctcatgacatttttattccttccccaagtctggaagaacaatcaaatgatgggaagaaagatggagatatgcatagttcatctttgacagttgagtgttctaaaacttcagagattgaaccaaagaattcccctgaggatcttgggctatctttgacaggggattcttgcaagttgatgctttctacaagtgaatatagtcagtccccaaagatggagagcttgagttctcacagaattgatgaagatggagaaaacacacagattgaggatacggaacccatgtctccagttctcaattctaaatttgttcctgctgaaaatgatagtatcctgatgaatccagcacaggatggtgaagtacaactgagtcagaatgatgacaaaacaaagggagatgatacagacaccagggatgacattagtattttagccactggttgcaagggcagagaagaaacggtagcagaagatgtttgtattgatctcacttgtgattcggggagtcaggcagttccgtcaccagctactcgatctgaggcactttctagtgtgttagatcaggaggaagctatggaaattaaagaacaccatccagaggaggggtcttcagggtctgaggtggaagaaatccctgagacaccttgtgaaagtcaaggagaggaactcaaagaagaaaatatggagagtgttccgttgcacctttctctgactgaaactcagtcccaagggttgtgtcttcaaaaggaaatgccaaaaaaagaatgctcagaagctatggaagttgaaaccagtgtgattagtattgattcccctcaaaagttggcaatacttgaccaagaattggaacataaggaacaggaagcttgggaagaagctacttcagaggactccagtgttgtcattgtagatgtgaaagagccatctcccagagttgatgtttcttgtgaacctttggagggagtggagaagtgctcagattcccagtcatgggaggatattgctccagaaatagaaccatgtgctgagaatagattagacaccaaggaagaaaagagtgtagaatatgaaggagatctgaaatcagggactgcagaaacagaacctgtagagcaagattcttcacagccttccttacctttagtgagagcagatgatcctttaagacttgaccaggagttgcagcagccccaaactcaggagaaaacaagtaattcattaacagaagactcaaaaatggctaatgcaaagcagctaagctcagatgcagaggcccagaagctggggaagccctctgcccatgcctcacaaagcttctgtgaaagttctagtgaaaccccatttcatttcactttgcctaaagaaggtgatatcatcccaccattgactggtgcaaccccacctcttattgggcacctaaaattggagcccaagagacacagtactcctattggtattagcaactatccagaaagcaccatagcaaccagtgatgtcatgtctgaaagcatggtggagacccatgatcccatacttgggagtggaaaaggggattctggggctgccccagacgtggatgataaattatgtctaagaatgaaactggttagtcctgagactgaggcgagtgaagagtctttgcagttcaacctggaaaagcctgcaactggtgaaagaaaaaatggatctactgctgttgctgagtctgttgccagtccccagaagaccatgtctgtgttgagctgtatctgtgaagccaggcaagagaatgaggctcgaagtgaggatccccccaccacacccatcagggggaacttgctccactttccaagttctcaaggagaagaggagaaagaaaaattggagggtgaccatacaatcaggcagagtcaacagcctatgaagcccattagtcctgtcaaggaccctgtttctcctgcttcccagaagatggtcatacaagggccatccagtcctcaaggagaggcaatggtgacagatgtgctagaagaccagaaagaaggacggagtactaataaggaaaatcctagtaaggccttgattgaaaggcccagccaaaataacataggaatccaaaccatggagtgttccttgagggtcccagaaactgtttcagcagcaacccagactataaagaatgtgtgtgagcaggggaccagtacagtggaccagaactttggaaagcaagatgccacagttcagactgagagggggagtggtgagaaaccagtcagtgctcctggggatgatacagagtcgctccatagccagggagaagaagagtttgatatgcctcagcctccacatggccatgtcttacatcgtcacatgagaacaatccgggaagtacgcacacttgtcactcgtgtcattacagatgtgtattatgtggatggaacagaagtagaaagaaaagtaactgaggagactgaagagccaattgtagagtgtcaggagtgtgaaactgaagtttccccttcacagactgggggctcctcaggtgacctgggggatatcagctccttctcctccaaggcatccagcttacaccgcacatcaagtgggacaagtctctcagctatgcacagcagtggaagctcagggaaaggagccggaccactcagagggaaaaccagcgggacagaacccgcagattttgccttacccagctcccgaggaggcccaggaaaactgagtcctagaaaaggggtcagtcagacagggacgccagtgtgtgaggaggatggtgatgcaggccttggcatcagacagggagggaaggctccagtcacgcctcgtgggcgtgggcgaaggggccgcccaccttctcggaccactggaaccagagaaacagctgtgcctggccccttgggcatagaggacatttcacctaacttgtcaccagatgataaatccttcagccgtgtcgtgccccgagtgccagactccaccagacgaacagatgtgggtgctggtgctttgcgtcgtagtgactctccagaaattcctttccaggctgctgctggcccttctgatggcttagatgcctcctctccaggaaatagctttgtagggctccgtgttgtagccaagtggtcatccaatggctacttttactctgggaaaatcacacgagatgtcggagctgggaagtataaattgctctttgatgatgggtacgaatgtgatgtgttgggcaaagacattctgttatgtgaccccatcccgctggacactgaagtgacggccctctcggaggatgagtatttcagtgcaggagtggtgaaaggacataggaaggagtctggggaactgtactacagcattgaaaaagaaggccaaagaaagtggtataagcgaatggctgtcatcctgtccttggagcaaggaaacagactgagagagcagtatgggcttggcccctatgaagcagtaacacctcttacaaaggcagcagatatcagcttagacaatttggtggaagggaagcggaaacggcgcagtaacgtcagctccccagccacccctactgcctccagtagcagcagcacaacccctacccgaaagatcacagaaagtcctcgtgcctccatgggagttctctcaggcaaaagaaaacttatcacttctgaagaggaacggtcccctgccaagcgaggtcgcaagtctgccacagtaaaacctggtgcagtaggggcaggagagtttgtgagcccctgtgagagtggagacaacaccggtgaaccctctgccctggaagagcagagagggcctttgcctctcaacaagaccttgtttctgggctacgcatttctccttaccatggccacaaccagtgacaagttggccagccgctccaaactgccagatggtcctacaggaagcagtgaagaagaggaggaatttttggaaattcctcctttcaacaagcagtatacagaatcccagcttcgagcaggagctggctatatccttgaagatttcaatgaagcccaggtgaggagtttctttgtgtaacctaatatagtggcaatgataagagccaacttgctgtgttgagaagaggcctgggaggggttggggaacctggataaagtagccagagatttcaggaactgagaaactgccaaaatgtttttgcatgaaatagaatttttgttgtgtatagggaagagaaggtaggaccttgggttagttaatggctatggttctgttgctgggacaaaagaagattgatgtttatgtttagtagtagaaacccctattagggttgctgatttttagcctgaaaggctgagttcataggttttggttgtccgttgaggatttaggtcctcagtatgctgcaggtgaggcagagagaacatctatggaaattacttgggccttccagtgagaagagtggccttgggcaggatagactaaatcacattttgggtagtagttgggagtcttcagatctgctcttcatggctcattatggctgctgcttaggagctttccacagaagtcaccaaacccattggctctgcttcttttcttgcagtgtaacacagcttaccagtgtcttctaattgcggatcagcattgtcgaacccggaagtacttcctgtgccttgccagtgggattccttgtgtgtctcatgtctgggtccatgatagttgccatgccaaccagctccagaactaccgtaattatctgttgccagctgggtacagccttgaggagcaaagaattctggactggtaagtatttgaagcccatccagaattgtataggcaggaggacagcaagctttggagggaagagaatctaggtgagagagtaaagctttctagaaattggaatgtctgtgggataaatttgagtgggtttgaaatgacttcaggagtttatctagtttatttccctaggttacattggctaggaaccttttgcaaatgtgtgaagatttgtatataggttcaatattctcaacctgtaaagtcagagaactaagttttaagcaagcattaaaaatatataggctcaggagcatgatttggattattctcagccccagaacaaacatggaaattagaaagccaggaatgcaaggaatacagatcattcatagaaagaaggaagagaagggggaccctaatatagggcttagttttttaagatgaagtcttgctctgtcacctaggctggagtacagtggcgcagtgacgacttactgcagcctcaacctcccaggctgaagtgatccccctacctcagcctcccaagctgctgggactacaggcactcgccaccacacccagctaatttttttgttgtcttttgtagagatggggtctcaccacattgcccaggctggtctcgaactcccaggcccaagagatccaaccacgacagcctcccaaagtgctgggattacaggcttgagacactatgtctgatggggcatttatttttgaaagcattcagatgtacatgagtccctttgcagaaaggcagtttgttggatattacttgtcatgctaaggtcctttcctgtctccttcataggcaaccccgtgaaaatcctttccagaatctgaaggtactcttggtatcagaccaacagcagaacttcctggagctctggtctgagatcctcatgactggtggtagcatggcctctcggagcagttcgttgggttctgactgattactgcacgcagaggtatgttctcagggaccct

SEQ ID NO: 446832 - DNA, 2326 bp, Homo sapiens
gctttttgttattctttgcaggtgtccagagcctaaagtagaggagaaggcatagcagaaattgggtgtgctgtttttgcagcagcagtaggaagctttgtcagagggaatagacttacatgaaggagaatgtcctttacttgttatcccacgctccccactccctgcatgagattttggtggtgggtgtgtgaaccagcttcctgctgccccaaaggctcagcacatgtaggcctgtcatgtagtctgagggccaaggggagactttgtgaagaaaagattcagtagcaggtgctatcagactaacttgtcttcattctctagtcctagaaaaggggtcagtcagacagggacgccagtgtgtgaggaggatggtgatgcaggccttggcatcagacagggagggaaggctccagtcacgcctcgtgggcgtgggcgaaggggccgcccaccttctcggaccactggaaccagagaaacagctgtgcctggccccttgggcatagaggacatttcacctaacttgtcaccagatgataaatccttcagccgtgtcgtgccccgagtgccagactccaccagacgaacagatgtgggtgctggtgctttgcgtcgtagtgactctccagaaattcctttccaggctgctgctggcccttctgatggcttagatgcctcctctccaggaaatagctttgtagggctccgtgttgtagccaagtggtcatccaatggctacttttactctgggaaaatcacacgagatgtcggagctgggaagtataaattgctctttgatgatgggtacgaatgtgatgtgttgggcaaagacattctgttatgtgaccccatcccgctggacactgaagtgacggccctctcggaggatgagtatttcagtgcaggagtggtgaaaggacataggaaggagtctggggaactgtactacagcattgaaaaagaaggccaaagaaagtggtataagcgaatggctgtcatcctgtccttggagcaaggaaacagactgagagagcagtatgggcttggcccctatgaagcagtaacacctcttacaaaggcagcagatatcagcttagacaatttggtggaagggaagcggaaacggcgcagtaacgtcagctccccagccacccctactgcctccagtagcagcagcacaacccctacccgaaagatcacagaaagtcctcgtgcctccatgggagttctctcaggcaaaagaaaacttatcacttctgaagaggaacggtcccctgccaagcgaggtcgcaagtctgccacagtaaaacctggtgcagtaggggcaggagagtttgtgagcccctgtgagagtggagacaacaccggtgaaccctctgccctggaagagcagagagggcctttgcctctcaacaagaccttgtttctgggctacgcatttctccttaccatggccacaaccagtgacaagttggccagccgctccaaactgccagatggtcctacaggaagcagtgaagaagaggaggaatttttggaaattcctcctttcaacaagcagtatacagaatcccagcttcgagcaggagctggctatatccttgaagatttcaatgaagcccagtgtaacacagcttaccagtgtcttctaattgcggatcagcattgtcgaacccggaagtacttcctgtgccttgccagtgggattccttgtgtgtctcatgtctgggtccatgatagttgccatgccaaccagctccagaactaccgtaattatctgttgccagctgggtacagccttgaggagcaaagaattctggactggcaaccccgtgaaaatcctttccagaatctgaaggtactcttggtatcagaccaacagcagaacttcctggagctctggtctgagatcctcatgactggtggtgcagcctctgtgaagcagcaccattcaagtgcccataacaaagatattgctttaggggtatttgatgtggtggtgacggacccctcatgcccagcctcggtgctgaagtgtgctgaagcattgcagctgcctgtggtgtcacaagagtgggtgatccagtgcctcattgttggggagagaattggattcaagcagcatccaaaatataaacacgattatgtttctcactaaagatacttggtcttactggttttattccctgctatcgtggagattgtgttttaaccaggttttaaatgtgtcttgtgtgtaactggattccttgcatggatcttgtatatagttttatttgctgaacttttatgataaaataaatgttgaatctctttggttgtagta

SEQ ID NO: 446833 - DNA, 5504 bp, Homo sapiens
acagcggcgacctagggatcgatctggagggacttggggagcgtgcagagacctctagctcgagcgcgagggacctcccgccgggatgcctggggagcagatggaccctactggaagtcagttggattcagatttctctcagcaagatactccttgcctgataattgaagattctcagcctgaaagccaggttctagaggatgattctggttctcacttcagtatgctatctcgacaccttcctaatctccagacgcacaaagaaaatcctgtgttggatgttgtgtccaatcctgaacaaacagctggagaagaacgaggagacggtaatagtgggttcaatgaacatttgaaagaaaacaaggttgcagaccctgtggattcttctaacttggacacatgtggttccatcagtcaggtcattgagcagttacctcagccaaacaggacaagcagtgttctgggaatgtcagtggaatctgctcctgctgtggaggaagagaagggagaagagttggaacagaaggagaaagagaaggaagaagatacttcaggcaatactacacattcccttggtgctgaagatactgcctcatcacagttgggttttggggttctggaactctcccagagccaggatgttgaggaaaatactgtgccatatgaagtggacaaagagcagctacaatcagtaaccaccaactctggttataccaggctgtctgatgtggatgctaatactgcaattaagcatgaagaacagtccaacgaagatatccccatagcagaacagtccagcaaggacatccctgtgacagcacagcccagtaaggatgtacatgttgtaaaagagcaaaatccaccacctgcaaggtcagaggacatgccttttagccccaaagcatctgttgctgctatggaagcaaaagaacagttgtctgcacaagaacttatggaaagtggactgcagattcagaagtcaccagagcctgaggttttgtcaactcaggaagacttgtttgaccagagcaataaaacagtatcttctgatggttgctctactccttcaagggaggaaggtgggtgttctttggcttccactcctgccaccactctgcatctcctgcagctctctggtcagaggtcccttgttcaggacagtctttccacgaattcttcagatcttgttgctccttctcctgatgctttccgatctactccttttatcgttcctagcagtcccacagagcaagaagggagacaagataagccaatggacacgtcagtgttatctgaagaaggaggagagccttttcagaagaaacttcaaagtggtgaaccagtggagttagaaaacccccctctcctgcctgagtccactgtatcaccacaagcctcaacaccaatatctcagagcacaccagtcttccctcctgggtcacttcctatcccatcccagcctcagttttctcatgacatttttattccttccccaagtctggaagaacaatcaaatgatgggaagaaagatggagatatgcatagttcatctttgacagttgagtgttctaaaacttcagagattgaaccaaagaattcccctgaggatcttgggctatctttgacaggggattcttgcaagttgatgctttctacaagtgaatatagtcagtccccaaagatggagagcttgagttctcacagaattgatgaagatggagaaaacacacagattgaggatacggaacccatgtctccagttctcaattctaaatttgttcctgctgaaaatgatagtatcctgatgaatccagcacaggatggtgaagtacaactgagtcagaatgatgacaaaacaaagggagatgatacagacaccagggatgacattagtattttagccactggttgcaagggcagagaagaaacggtagcagaagatgtttgtattgatctcacttgtgattcggggagtcaggcagttccgtcaccagctactcgatctgaggcactttctagtgtgttagatcaggaggaagctatggaaattaaagaacaccatccagaggaggggtcttcagggtctgaggtggaagaaatccctgagacaccttgtgaaagtcaaggagaggaactcaaagaagaaaatatggagagtgttccgttgcacctttctctgactgaaactcagtcccaagggttgtgtcttcaaaaggaaatgccaaaaaaagaatgctcagaagctatggaagttgaaaccagtgtgattagtattgattcccctcaaaagttggcaatacttgaccaagaattggaacataaggaacaggaagcttgggaagaagctacttcagaggactccagtgttgtcattgtagatgtgaaagagccatctcccagagttgatgtttcttgtgaacctttggagggagtggagaagtgctcagattcccagtcatgggaggatattgctccagaaatagaaccatgtgctgagaatagattagacaccaaggaagaaaagagtgtagaatatgaaggagatctgaaatcagggactgcagaaacagaacctgtagagcaagattcttcacagccttccttacctttagtgagagcagatgatcctttaagacttgaccaggagttgcagcagccccaaactcaggagaaaacaagtaattcattaacagaagactcaaaaatggctaatgcaaagcagctaagctcagatgcagaggcccagaagctggggaagccctctgcccatgcctcacaaagcttctgtgaaagttctagtgaaaccccatttcatttcactttgcctaaagaaggtgatatcatcccaccattgactggtgcaaccccacctcttattgggcacctaaaattggagcccaagagacacagtactcctattggtattagcaactatccagaaagcaccatagcaaccagtgatgtcatgtctgaaagcatggtggagacccatgatcccatacttgggagtggaaaaggggattctggggctgccccagacgtggatgataaattatgtctaagaatgaaactggttagtcctgagactgaggcgagtgaagagtctttgcagttcaacctggaaaagcctgcaactggtgaaagaaaaaatggatctactgctgttgctgagtctgttgccagtccccagaagaccatgtctgtgttgagctgtatctgtgaagccaggcaagagaatgaggctcgaagtgaggatccccccaccacacccatcagggggaacttgctccactttccaagttctcaaggagaagaggagaaagaaaaattggagggtgaccatacaatcaggcagagtcaacagcctatgaagcccattagtcctgtcaaggaccctgtttctcctgcttcccagaagatggtcatacaagggccatccagtcctcaaggagaggcaatggtgacagatgtgctagaagaccagaaagaaggacggagtactaataaggaaaatcctagtaaggccttgattgaaaggcccagccaaaataacataggaatccaaaccatggagtgttccttgagggtcccagaaactgtttcagcagcaacccagactataaagaatgtgtgtgagcaggggaccagtacagtggaccagaactttggaaagcaagatgccacagttcagactgagagggggagtggtgagaaaccagtcagtgctcctggggatgatacagagtcgctccatagccagggagaagaagagtttgatatgcctcagcctccacatggccatgtcttacatcgtcacatgagaacaatccgggaagtacgcacacttgtcactcgtgtcattacagatgtgtattatgtggatggaacagaagtagaaagaaaagtaactgaggagactgaagagccaattgtagagtgtcaggagtgtgaaactgaagtttccccttcacagactgggggctcctcaggtgacctgggggatatcagctccttctcctccaaggcatccagcttacaccgcacatcaagtgggacaagtctctcagctatgcacagcagtggaagctcagggaaaggagccggaccactcagagggaaaaccagcgggacagaacccgcagattttgccttacccagctcccgaggaggcccaggaaaactgagtcctagaaaaggggtcagtcagacagggacgccagtgtgtgaggaggatggtgatgcaggccttggcatcagacagggagggaaggctccagtcacgcctcgtgggcgtgggcgaaggggccgcccaccttctcggaccactggaaccagagaaacagctgtgcctggccccttgggcatagaggacatttcacctaacttgtcaccagatgataaatccttcagccgtgtcgtgccccgagtgccagactccaccagacgaacagatgtgggtgctggtgctttgcgtcgtagtgactctccagaaattcctttccaggctgctgctggcccttctgatggcttagatgcctcctctccaggaaatagctttgtagggctccgtgttgtagccaagtggtcatccaatggctacttttactctgggaaaatcacacgagatgtcggagctgggaagtataaattgctctttgatgatgggtacgaatgtgatgtgttgggcaaagacattctgttatgtgaccccatcccgctggacactgaagtgacggccctctcggaggatgagtatttcagtgcaggagtggtgaaaggacataggaaggagtctggggaactgtactacagcattgaaaaagaaggccaaagaaagtggtataagcgaatggctgtcatcctgtccttggagcaaggaaacagactgagagagcagtatgggcttggcccctatgaagcagtaacacctcttacaaaggcagcagatatcagcttagacaatttggtggaagggaagcggaaacggcgcagtaacgtcagctccccagccacccctactgcctccagtagcagcagcacaacccctacccgaaagatcacagaaagtcctcgtgcctccatgggagttctctcaggcaaaagaaaacttatcacttctgaagaggaacggtcccctgccaagcgaggtcgcaagtctgccacagtaaaacctggtgcagtaggggcaggagagtttgtgagcccctgtgagagtggagacaacaccggtgaaccctctgccctggaagagcagagagggcctttgcctctcaacaagaccttgtttctgggctacgcatttccctatacatatggagacagtttctcttatggccaacaagagcttttctgacccttcataaaaccaaaataaatcccattttcttaaaggatagagaggaccctattgacagaaatagctgaagggacgtgtgtcaccacactggtgagtagaggcagaaatttttctaaaaaagatactttcttgggaaatatggctagag

SEQ ID NO: 446834 - DNA, 1149 bp, Homo sapiens
tttctggctcagataagttcatcaggacagtgcctgcccatcaggtcatgcttggtgctggggccttttggtgttaaggcttttgctgaggcaatggtgtgtatccctctagtaactgtgcccctgtccttcccaggtgcagtaggggcaggagagtttgtgagcccctgtgagagtggagacaacaccggtgaaccctctgccctggaagagcagagagggcctttgcctctcaacaagaccttgtttctgggctacgcatttctccttaccatggccacaaccagtgacaagttggccagccgctccaaactgccagatggtcctacaggaagcagtgaagaagaggaggaatttttggaaattcctcctttcaacaagcagtatacagaatcccagcttcgagcaggagctggctatatccttgaagatttcaatgaagcccagtgtaacacagcttaccagtgtcttctaattgcggatcagcattgtcgaacccggaagtacttcctgtgccttgccagtgggattccttgtgtgtctcatgtctgggtccatgatagttgccatgccaaccagctccagaactaccgtaattatctgttgccagctgggtacagccttgaggagcaaagaattctggactggcaaccccgtgaaaatcctttccagaatctgaaggtactcttggtatcagaccaacagcagaacttcctggagctctggtctgagatcctcatgactggtggtgcagcctctgtgaagcagcaccattcaagtgcccataacaaagatattgctttaggggtatttgatgtggtggtgacggacccctcatgcccagcctcggtgctgaagtgtgctgaagcattgcagctgcctgtggtgtcacaagagtgggtgatccagtgcctcattgttggggagagaattggattcaagcagcatccaaaatataaacacgattatgtttctcactaaagatacttggtcttactggttttattccctgctatcgtggagattgtgttttaaccaggttttaaatgtgtcttgtgtgtaactggattccttgcatggatcttgtatatagttttatttgctgaacttttatgataaaataaatgttgaatctctttggttgtagta

SEQ ID NO: 446835 - DNA, 4266 bp, Homo sapiens
acagcggcgacctagggatcgatctggagggacttggggagcgtgcagagacctctagctcgagcgcgagggacctcccgccgggatgcctggggagcagatggaccctactggaagtcagttggattcagatttctctcagcaagatactccttgcctgataattgaagattctcagcctgaaagccaggttctagaggatgattctggttctcacttcagtatgctatctcgacaccttcctaatctccagacgcacaaagaaaatcctgtgttggatgttgtgtccaatcctgaacaaacagctggagaagaacgaggagacggtaatagtgggttcaatgaacatttgaaagaaaacaaggttgcagaccctgtggattcttctaacttggacacatgtggttccatcagtcaggtcattgagcagttacctcagccaaacaggacaagcagtgttctgggaatgtcagtggaatctgctcctgctgtggaggaagagaagggagaagagttggaacagaaggagaaagagaaggaagaagatacttcaggcaatactacacattcccttggtgctgaagatactgcctcatcacagttgggttttggggttctggaactctcccagagccaggatgttgaggaaaatactgtgccatatgaagtggacaaagagcagctacaatcagtaaccaccaactctggttataccaggctgtctgatgtggatgctaatactgcaattaagcatgaagaacagtccaacgaagatatccccatagcagaacagtccagcaaggacatccctgtgacagcacagcccagtaaggatgtacatgttgtaaaagagcaaaatccaccacctgcaaggtcagaggacatgccttttagccccaaagcatctgttgctgctatggaagcaaaagaacagttgtctgcacaagaacttatggaaagtggactgcagattcagaagtcaccagagcctgaggttttgtcaactcaggaagacttgtttgaccagagcaataaaacagtatcttctgatggttgctctactccttcaagggaggaaggtgggtgttctttggcttccactcctgccaccactctgcatctcctgcagctctctggtcagaggtcccttgttcaggacagtctttccacgaattcttcagatcttgttgctccttctcctgatgctttccgatctactccttttatcgttcctagcagtcccacagagcaagaagggagacaagataagccaatggacacgtcagtgttatctgaagaaggaggagagccttttcagaagaaacttcaaagtggtgaaccagtggagttagaaaacccccctctcctgcctgagtccactgtatcaccacaagcctcaacaccaatatctcagagcacaccagtcttccctcctgggtcacttcctatcccatcccagcctcagttttctcatgacatttttattccttccccaagtctggaagaacaatcaaatgatgggaagaaagatggagatatgcatagttcatctttgacagttgagtgttctaaaacttcagagattgaaccaaagaattcccctgaggatcttgggctatctttgacaggggattcttgcaagttgatgctttctacaagtgaatatagtcagtccccaaagatggagagcttgagttctcacagaattgatgaagatggagaaaacacacagattgaggatacggaacccatgtctccagttctcaattctaaatttgttcctgctgaaaatgatagtatcctgatgaatccagcacaggatggtgaagtacaactgagtcagaatgatgacaaaacaaagggagatgatacagacaccagggatgacattagtattttagccactggttgcaagggcagagaagaaacggtagcagaagatgtttgtattgatctcacttgtgattcggggagtcaggcagttccgtcaccagctactcgatctgaggcactttctagtgtgttagatcaggaggaagctatggaaattaaagaacaccatccagaggaggggtcttcagggtctgaggtggaagaaatccctgagacaccttgtgaaagtcaaggagaggaactcaaagaagaaaatatggagagtgttccgttgcacctttctctgactgaaactcagtcccaagggttgtgtcttcaaaaggaaatgccaaaaaaagaatgctcagaagctatggaagttgaaaccagtgtgattagtattgattcccctcaaaagttggcaatacttgaccaagaattggaacataaggaacaggaagcttgggaagaagctacttcagaggactccagtgttgtcattgtagatgtgaaagagccatctcccagagttgatgtttcttgtgaacctttggagggagtggagaagtgctcagattcccagtcatgggaggatattgctccagaaatagaaccatgtgctgagaatagattagacaccaaggaagaaaagagtgtagaatatgaaggagatctgaaatcagggactgcagaaacagaacctgtagagcaagattcttcacagccttccttacctttagtgagagcagatgatcctttaagacttgaccaggagttgcagcagccccaaactcaggagaaaacaagtaattcattaacagaagactcaaaaatggctaatgcaaagcagctaagctcagatgcagaggcccagaagctggggaagccctctgcccatgcctcacaaagcttctgtgaaagttctagtgaaaccccatttcatttcactttgcctaaagaaggtgatatcatcccaccattgactggtgcaaccccacctcttattgggcacctaaaattggagcccaagagacacagtactcctattggtattagcaactatccagaaagcaccatagcaaccagtgatgtcatgtctgaaagcatggtggagacccatgatcccatacttgggagtggaaaaggggattctggggctgccccagacgtggatgataaattatgtctaagaatgaaactggttagtcctgagactgaggcgagtgaagagtctttgcagttcaacctggaaaagcctgcaactggtgaaagaaaaaatggatctactgctgttgctgagtctgttgccagtccccagaagaccatgtctgtgttgagctgtatctgtgaagccaggcaagagaatgaggctcgaagtgaggatccccccaccacacccatcagggggaacttgctccactttccaagttctcaaggagaagaggagaaagaaaaattggagggtgaccatacaatcaggcagagtcaacagcctatgaagcccattagtcctgtcaaggaccctgtttctcctgcttcccagaagatggtcatacaagggccatccagtcctcaaggagaggcaatggtgacagatgtgctagaagaccagaaagaaggacggagtactaataaggaaaatcctagtaaggccttgattgaaaggcccagccaaaataacataggaatccaaaccatggagtgttccttgagggtcccagaaactgtttcagcagcaacccagactataaagaatgtgtgtgagcaggggaccagtacagtggaccagaactttggaaagcaagatgccacagttcagactgagagggggagtggtgagaaaccagtcagtgctcctggggatgatacagagtcgctccatagccagggagaagaagagtttgatatgcctcagcctccacatggccatgtcttacatcgtcacatgagaacaatccgggaagtacgcacacttgtcactcgtgtcattacagatgtgtattatgtggatggaacagaagtagaaagaaaagtaactgaggagactgaagagccaattgtagagtgtcaggagtgtgaaactgaagtttccccttcacagactgggggctcctcaggtgacctgggggatatcagctccttctcctccaaggcatccagcttacaccgcacatcaagtgggacaagtctctcagctatgcacagcagtggaagctcagggaaaggagccggaccactcagagggaaaaccagcgggacagaacccgcagattttgccttacccagctcccgaggaggcccaggaaaactgaggtgcagacagggtctccagagagagagagccacagcaggggcagggactgcttcagtttctgtcgacgcggccgcgaattt

SEQ ID NO: 446836 - DNA, 2467 bp, Homo sapiens
acagcggcgacctagggatcgatctggagggacttggggagcgtgcagagacctctagctcgagcgcgagggacctcccgccgggatgcctggggagcagatggaccctactggaagtcagttggattcagatttctctcagcaagatactccttgcctgataattgaagattctcagcctgaaagccaggttctagaggatgattctggttctcacttcagtatgctatctcgacaccttcctaatctccagacgcacaaagaaaatcctgtgttggatgttgtgtccaatcctgaacaaacagctggagaagaacgaggagacggtaatagtgggttcaatgaacatttgaaagaaaacaaggttgcagaccctgtggattcttctaacttggacacatgtggttccatcagtcaggtcattgagcagttacctcagccaaacaggacaagcagtgttctgggaatgtcagtggaatctgctcctgctgtggaggaagagaagggagaagagttggaacagaaggagaaagagaaggaagaagatacttcaggcaatactacacattcccttggtgctgaagatactgcctcatcacagttgggttttggggttctggaactctcccagagccaggatgttgaggaaaatactgtgccatatgaagtggacaaagagcagctacaatcagtaaccaccaactctggttataccaggctgtctgatgtggatgctaatactgcaattaagcatgaagaacagtccaacgaagatatccccatagcagaacagtccagcaaggacatccctgtgacagcacagcccagtaaggatgtacatgttgtaaaagagcaaaatccaccacctgcaaggtcagaggacatgccttttagccccaaagcatctgttgctgctatggaagcaaaagaacagttgtctgcacaagaacttatggaaagtggactgcagattcagaagtcaccagagcctgaggttttgtcaactcaggaagacttgtttgaccagagcaataaaacagtatcttctgatggttgctctactccttcaagggaggaaggtgggtgttctttggcttccactcctgccaccactctgcatctcctgcagctctctggtcagaggtcccttgttcaggacagtctttccacgaattcttcagatcttgttgctccttctcctgatgctttccgatctactccttttatcgttcctagcagtcccacagagcaagaagggagacaagataagccaatggacacgtcagtgttatctgaagaaggaggagagccttttcagaagaaacttcaaagtggtgaaccagtggagttagaaaacccccctctcctgcctgagtccactgtatcaccacaagcctcaacaccaatatctcagagcacaccagtcttccctcctgggtcacttcctatcccatcccagcctcagttttctcatgacatttttattccttccccaagtctggaagaacaatcaaatgatgggaagaaagatggagatatgcatagttcatctttgacagttgagtgttctaaaacttcagagattgaaccaaagaattcccctgaggatcttgggctatctttgacaggggattcttgcaagttgatgctttctacaagtgaatatagtcagtccccaaagatggagagcttgagttctcacagaattgatgaagatggagaaaacacacagattgaggatacggaacccatgtctccagttctcaattctaaatttgttcctgctgaaaatgatagtatcctgatgaatccagcacaggatggtgaagtacaactgagtcagaatgatgacaaaacaaagggagatgatacagacaccagggatgacattagtattttagccactggttgcaagggcagagaagaaacggtagcagaagatgtttgtattgatctcacttgtgattcggggagtcaggcagttccgtcaccagctactcgatctgaggcactttctagtgtgttagatcaggaggaagctatggaaattaaagaacaccatccagaggaggggtcttcagggtctgaggtggaagaaatccctgagacaccttgtgaaagtcaaggagaggaactcaaagaagaaaatatggagagtgttccgttgcacctttctctgactgaaactcagtcccaagggttgtgtcttcaaaaggaaatgccaaaaaaagaatgctcagaagctatggaagttgaaaccagtgtgattagtattgattcccctcaaaagttggcaatacttgaccaagaattggaacataaggaacaggaagcttgggaagaagctacttcagaggactccagtgttgtcattgtagatgtgaaagagccatctcccagagttgatgtttcttgccaaccatcgtgacgatggttgcaacggtgttgatgaatagtcctacatttt

SEQ ID NO: 446837 - DNA, 399 bp, Homo sapiens
aggagactgaagagccaattgtagagtgtcaggagtgtgaaactgaagtttccccttcacagactgggggctcctcaggtgacctgggggatatcagctccttctcctccaaggcatccagcttacaccgcacatcaagtgggacaagtctctcagctatgcacagcagtggaagctcagggaaaggagccggaccactcagagggaaaaccagcgggacagaacccgcagattttgccttacccagctcccgaggaggcccaggaaaactgaggtgcagacagggtctccagagagagagagccacagcaggggcagggttgctgacattttaatatcacaggaaaaggggagtaatgggaaatcccccatcctccattaaagataaatcaactaccc

SEQ ID NO: 446838 - DNA, 2120 bp, Homo sapiens
ggcacgagggtaaggccgttttcttttcccattcgctcatctgccaggaaaagggacttgccgttggcgcttcggcctcttgttcattgagaaaaaagaggaaatactccgcgtgcgcttgtagaaggggagtcgtctccagctccgaaccccggagtgttcatcagcggggaatctggctccgaattctctttttttctcccgccgattgctcggaagttggtctaaagcagaggttggaaagaaaggaaaaaagtttgcatcgagactggatttatttgcacatcgcagaaagaagagaatccaagggagaggggttggtgcaaagccgcgatcacggagttcagatgtgttctaagcctgctggagtgaccacacttccaagacctgatggaggccagagctcagagtggcaacgggtcgcagcccttgctgcagacgccccgtgacggtggcagacagcgtggggagcccgaccccagagacgccctcacccagcaggtacatgtcttgtctctggatcagatcagagccatccgaaacaccaatgagtacacagaggggcctactgtcgtcccaagacctgggctcaagcctgctcctcgcccctccactcagcacaaacacgagagactccacggtctgcctgagcaccgccagcctcctaggctccagcactcgcaggtccattcttctgcacgagcctctctgtccagatccataagcacggtcagctcagggtcgcggagcagtacgaggacaagtaccagcagcagctcctctgaacagagactgctaggatcatccttctcctccgggcctgttgctgatggcataatccgggtgcaacccaaatctgagctcaagccaggtgagcttaagccactgagcaaggaagatttgggcctgcacgcctacaggtgtgaggactgtggcaagtgcaaatgtaaggagtgcacctacccaaggcctctgccatcagactggatctgcgacaagcagtgcctttgctcggcccagaacgtgattgactatgggacttgtgtatgctgtgtgaaaggtctcttctatcactgttctaatgatgatgaggacaactgtgctgacaacccatgttcttgcagccagtctcactgttgtacacgatggtcagccatgggtgtcatgtccctctttttgccttgtttatggtgttaccttccagccaagggttgccttaaattgtgccaggggtgttatgaccgggttaacaggcctggttgccgctgtaaaaactcaaacacagtttgctgcaaagttcccactgtcccccctaggaactttgaaaaaccaacatagcatcattaatcaggaatattacagtaatgaggattttttctttctttttttaatacacatatgcaaccaactaaacagttataatcttggcactgttaatagaaaggtgggatagtctttgctgtttgcggtgaaatgctttttgtccatgtgccgttttaactgatatgcttgttagaactcagctaatggagctcaaagtatgagatacagaacttggtgacccatgtattgcataagctaaagcaacacagacactcctaggcaaagtttttgtttgtgaatagtacttgcaaaacttgtaaattagcagatgacttttttccattgttttctccagagagaatgtgctatatttttgtatatacaataatatttgcaactgtgaaaaacaagttgtgccatactacatggcacagacacaaaatattatactaatatgttgtacattcggaagaatgtgaatcaatcagtatgtttttagattgtattttgccttacagaaagcctttattgtaagactctgatttccctttggacttcatgtatattgtacagttacagtaaaattcaacctttattttctaattttttcaacatattgtttagtgtaaagaatatttatttgaagttttattattttataaaaaagaatatttattttaagaggcatcttacaaattttgccccttttatgaggatgtgatagttgctgcaaatgaggggttacagatgcatatgtccaatataaaatagaaaatatattaacgtttgaaattaaa

SEQ ID NO: 446839 - DNA, 437 bp, Homo sapiens
ggcacgagggtaaggccgttttcttttcccattcgctcatctgccaggaaaagggacttgccgttggcgcttcggcctcttgttcattgagaaaaaagaggaaatactccgcgtgcgcttgtagaaggggagtcgtctccagctccgaaccccggagtgttcatcagcggggaatctggctccgaattctctttttttctcccgccgattgctcggaagttggtctgttcttcctcttggtggaaggcaaagtccagggagaggctgtccctaggcggggcgctggtggggctgggggacacaggttgcccgcctcgggggcaggagacttccagggtgagaaaaaggcagggtgccgggtggagggagtgcccgcctctgctccgtgtggacagtctagcccggagcgggtgggagcgtcgccctgcctggcgccg

SEQ ID NO: 446840 - DNA, 2587 bp, Homo sapiens
ggcacgagggtaaggccgttttcttttcccattcgctcatctgccaggaaaagggacttgccgttggcgcttcggcctcttgttcattgagaaaaaagaggaaatactccgcgtgcgcttgtagaaggggagtcgtctccagctccgaaccccggagtgttcatcagcggggaatctggctccgaattctctttttttctcccgccgattgctcggaagttggtctaaagcagaggttggaaagaaaggaaaaaagtttgcatcgagactggatttatttgcacatcgcagaaagaagagaatccaagggagaggggttggtgcaaagccgcgatcacggagttcagatgtgttctaagcctgctggagtgaccacacttccaagacctgatggaggccagagctcagagtggcaacgggtcgcagcccttgctgcagacgccccgtgacggtggcagacagcgtggggagcccgaccccagagacgccctcacccagcaggtacatgtcttgtctctggatcagatcagagccatccgaaacaccaatgagtacacagaggggcctactgtcgtcccaagacctgggctcaagcctgctcctcgcccctccactcagcacaaacacgagagactccacggtctgcctgagcaccgccagcctcctaggctccagcactcgcaggtccattcttctgcacgagcctctctgtccagatccataagcacggtcagctcagggtcgcggagcagtacgaggacaagtaccagcagcagctcctctgaacagagactgctaggatcatccttctcctccgggcctgttgctgatggcataatccgggtgcaacccaaatctgagctcaagccaggtgagcttaagccactgagcaaggaagatttgggcctgcacgcctacaggtgtgaggactgtggcaagtgcaaatgtaaggagtgcacctacccaaggcctctgccatcagactggatctgcgacaagcagtgcctttgctcggcccagaacgtgattgactatgggacttgtgtatgctgtgtgaaaggtctcttctatcactgttctaatgatgatgaggacaactgtgctgacaacccatgttcttgcagccagtctcactgttgtacacgatggtcagccatgggtgtcatgtccctctttttgccttgtttatggtgttaccttccagccaagggttgccttaaattgtgccaggggtgttatgaccgggttaacaggcctggttgccgctgtaaaaactcaaacacagtttgctgcaaagttcccactgtcccccctaggaactttgaaaaaccaacatagcatcattaatcaggaatattacagtaatgaggattttttctttctttttttaatacacatatgcaaccaactaaacagttataatcttggcactgttaatagaaaggtgggatagtctttgctgtttgcggtgaaatgctttttgtccatgtgccgttttaactgatatgcttgttagaactcagctaatggagctcaaagtatgagatacagaacttggtgacccatgtattgcataagctaaagcaacacagacactcctaggcaaagtttttgtttgtgaatagtacttgcaaaacttgtaaattagcagatgacttttttccattgttttctccagagagaatgtgctatatttttgtatatacaataatatttgcaactgtgaaaaacaagttgtgccatactacatggcacagacacaaaatattatactaatatgttgtacattcggaagaatgtgaatcaatcagtatgtttttagattgtattttgccttacagaaagcctttattgtaagactctgatttccctttggacttcatgtatattgtacagttacagtaaaattcaacctttattttctaattttttcaacatattgtttagtgtaaagaatatttatttgaagttttattattttataaaaaagaatatttattttaagaggcatcttacaaattttgccccttttatgaggatgtgatagttgctgcaaatgaggggttacagatgcatatgtccaatataaaatagaaaatatattaacgtttgaaattaaaaaaaaaaaaaaaaaaaaaaaaaaaaaaaaaaaaaaaaaaaaaaaaaaaaaaaaaaacctacggaacacctaaatataaggcaaatattcatgtattagtaaattaagcatttgatcttgcgtcaagagcaatggtcctggttcttaattggtgaacttgttattaggccctcatgacccttttgattaactgccctgcctagaatctgttgaaccgtcccacccaattagattacccacaacacctacttaccaggcactgggtctccgtgaatttgtcttaaaggacacactttcccacaattgctcacagcctagagtagcttggtaaacctggcgctgttcttgacataagagcgtatagagtgctctttttatgactgaatagtcttttaactaacccaggccctatactatgaaccccttttaaatcgcccatttcccaccttaagagctactcttctccac

SEQ ID NO: 446841 - DNA, 1365 bp, Homo sapiens
tcttacagcgagacactgagtgggaatccatctctagtcttcctcttcaattggctggctaatgagcctaagtccagggctggcaacctcactctctggtatgctctgacctagtgatgcatataacaagttgagcaaggaagatttgggcctgcacgcctacaggtgtgaggactgtggcaagtgcaaatgtaaggagtgcacctacccaaggcctctgccatcagactggatctgcgacaagcagtgcctttgctcggcccagaacgtgattgactatgggacttgtgtatgctgtgtgaaaggtctcttctatcactgttctaatgatgatgaggacaactgtgctgacaacccatgttcttgcagccagtctcactgttgtacacgatggtcagccatgggtgtcatgtccctctttttgccttgtttatggtgttaccttccagccaagggttgccttaaattgtgccaggggtgttatgaccgggttaacaggcctggttgccgctgtaaaaactcaaacacagtttgctgcaaagttcccactgtcccccctaggaactttgaaaaaccaacatagcatcattaatcaggaatattacagtaatgaggattttttctttctttttttaatacacatatgcaaccaactaaacagttataatcttggcactgttaatagaaaggtgggatagtctttgctgtttgcggtgaaatgctttttgtccatgtgccgttttaactgatatgcttgttagaactcagctaatggagctcaaagtatgagatacagaacttggtgacccatgtattgcataagctaaagcaacacagacactcctaggcaaagtttttgtttgtgaatagtacttgcaaaacttgtaaattagcagatgacttttttccattgttttctccagagagaatgtgctatatttttgtatatacaataatatttgcaactgtgaaaaacaagttgtgccatactacatggcacagacacaaaatattatactaatatgttgtacattcggaagaatgtgaatcaatcagtatgtttttagattgtattttgccttacagaaagcctttattgtaagactctgatttccctttggacttcatgtatattgtacagttacagtaaaattcaacctttattttctaattttttcaacatattgtttagtgtaaagaatatttatttgaagttttattattttataaaaaagaatatttattttaagaggcatcttacaaattttgccccttttatgaggatgtgatagttgctgcaaatgaggggttacagatgcatatgtccaatataaaatagaaaatatattaacgtttgaaattaaa

SEQ ID NO: 446842 - DNA, 269 bp, Homo sapiens
gcgtcagtccgcctggagaaactcccctggggatcggctgtgtcccacctgctggggacggtgttggggcacagagaggcgataaactaagtgaaagcaaagagcagcgttgtcttctgccattcttttggaggtgaggagatccggtttccagcactgccttgctccgaattgggagacgtttgtcacctgccttgttcgctgtggcctctattctaaagagcggagatcggataaaggtccacttttgcctgttttatactttttat

SEQ ID NO: 446843 - DNA, 1696 bp, Homo sapiens
tggaggtgaggagatccggtttccagcactgccttgctccgaattgggagacgtttgtcacctgccttgttcgctgtggcctctattctaaagagcggagatcggataaaggagttcagatgtgttctaagcctgctggagtgaccacacttccaagacctgatggaggccagagctcagagtggcaacgggtcgcagcccttgctgcagacgccccgtgacggtggcagacagcgtggggagcccgaccccagagacgccctcacccagcaggtacatgtcttgtctctggatcagatcagagccatccgaaacaccaatgagtacacagaggggcctactgtcgtcccaagacctgggctcaagcctgctcctcgcccctccactcagcacaaacacgagagactccacggtctgcctgagcaccgccagcctcctaggctccagcactcgcaggtccattcttctgcacgagcctctctgtccagatccataagcacggtcagctcagggtcgcggagcagtacgaggacaagtaccagcagcagctcctctgaacagagactgctaggatcatccttctcctccgggcctgttgctgatggcataatccgggtgcaacccaaatctgagctcaagccaggtgagcttaagccactgagcaaggaagatttgggcctgcacgcctacaggtgtgaggactgtggcaagtgcaaatgtaaggagtgcacctacccaaggcctctgccatcagactggatctgcgacaagcagtgcctttgctcggcccagaacgtgattgactatgggacttgtgtatgctgtgtgaaaggtctcttctatcactgttctaatgatgatgaggacaactgtgctgacaacccatgttcttgcagccagtctcactgttgtacacgatggtcagccatgggtgtcatgtccctctttttgccttgtttatggtgttaccttccagccaagggttgccttaaattgtgccaggggtgttatgaccgggttaacaggcctggttgccgctgtaaaaactcaaacacagtttgctgcaaagttcccactgtcccccctaggaactttgaaaaaccaacatagcatcattaatcaggaatattacagtaatgaggattttttctttctttttttaatacacatatgcaaccaactaaacagttataatcttggcactgttaatagaaaggtgggatagtctttgctgtttgcggtgaaatgctttttgtccatgtgccgttttaactgatatgcttgttagaactcagctaatggagctcaaagtatgagatacagaacttggtgacccatgtattgcataagctaaagcaacacagacactcctaggcaaagtttttgtttgtgaatagtacttgcaaaacttgtaaattagcagatgacttttttccattgttttctccagagagaatgtgctatatttttgtatatacaataatatttgcaactgtgaaaaacaagttgtgccatactacatggcacagacacaaaatattatactaatatgttgtacattcggaagaatgtgaatcaatcagtatgtttttagattgtattttgccttacagaaagcctttattgtaagactctgatttccctttggacttcatgtatattgtacagttacagtaaaattcaacctttattttct

SEQ ID NO: 446844 - DNA, 2476 bp, Homo sapiens
ggcacgagggtaaggccgttttcttttcccattcgctcatctgccaggaaaagggacttgccgttggcgcttcggcctcttgttcattgagaaaaaagaggaaatactccgcgtgcgcttgtagaaggggagtcgtctccagctccgaaccccggagtgttcatcagcggggaatctggctccgaattctctttttttctcccgccgattgctcggaagttggtctaaagcagaggttggaaagaaaggaaaaaagtttgcatcgagactggatttatttgcacatcgcagaaagaagagaatccaagggagaggggttggtgcaaagccgcgatcacggagttcagatgtgttctaagcctgctggagtgaccacacttccaagacctgatggaggccagagctcagagtggcaacgggtcgcagcccttgctgcagacgccccgtgacggtggcagacagcgtggggagcccgaccccagagacgccctcacccagcaggtacatgtcttgtctctggatcagatcagagccatccgaaacaccaatgagtacacagaggggcctactgtcgtcccaagacctgggctcaagcctgctcctcgcccctccactcagcacaaacacgagagactccacggtctgcctgagcaccgccagcctcctaggctccagcactcgcaggtccattcttctgcacgagcctctctgtccagatccataagcacggtcagctcagggtcgcggagcagtacgaggacaagtaccagcagcagctcctctgaacagagactgctaggatcatccttctcctccgggcctgttgctgatggcataatccgggtgcaacccaaatctgagctcaagccaggtgagcttaagccactgagcaaggaagatttgggcctgcacgcctacaggtgtgaggactgtggcaagtgcaaatgtaaggagtgcacctacccaaggcctctgccatcagactggatctgcgacaagcagtgcctttgctcggcccagaacgtgattgactatgggacttgtgtatgctgtgtgaaaggtctcttctatcactgttctaatgatgatgaggacaactgtgctgacaacccatgttcttgcagccagtctcactgttgtacacgatggtcagccatgggtgtcatgtccctctttttgccttgtttatggtgttaccttccagccaagggttgccttaaattgtgccaggggtgttatgaccgggttaacaggcctggttgccgctgtaaaaactcaaacacagtttgctgcaaagttcccactgtcccccctaggaactttgaaaaaccaacatagcatcattaatcaggaatattacagtaatgaggattttttctttctttttttaatacacatatgcaaccaactaaacagttataatcttggcactgttaatagaaaggtgggatagtctttgctgtttgcggtgaaatgctttttgtccatgtgccgttttaactgatatgcttgttagaactcagctaatggagctcaaagtatgagatacagaacttggtgacccatgtattgcataagctaaagcaacacagacactcctaggcaaagtttttgtttgtgaatagtacttgcaaaacttgtaaattagcagatgacttttttccattgttttctccagagagaatgtgctatatttttgtatatacaataatatttgcaactgtgaaaaacaagttgtgccatactacatggcacagacacaaaatattatactaatatgttgtacattcggaagaatgtgaatcaatcagtatgtttttagattgtattttgccttacagaaagcctttattgtaagactctgatttccctttggacttcatgtatattgtacagttacagtaaaattcaacctttattttctaattttttcaacatattgtttagtgtaaagaatatttatttgaagttttattattttataaaaaagaatatttattttaagaggcatcttacaaattttgccccttttatgaggatgtgatagttgctgcaaatgaggggttacagatgcatatgtccaatataaaatagaaaatatattaacgtttgaaattaaaaaaaaaaaaaaaaaaaaaaaaaaaaaaaaaaaaaaaaaaaaaaaaaaaaaaaaaaaaaaaaaaaagggggggggggtaaaaaaaagctccccccgagagggagcacccaagaagctggcgagcgacgacacgacactatagttggctggaacaacgaaaggcggcgccccaccaaatgggaggaggcagccataaatcaaaaacccaagaaacccggcgggcggcggctacatacaacaacgatccgttggagcgggcgaaaaaaaccgaggacccgtgggcggaccatctgcgcagcgagaacacctaccaccgggggggggaaacacatcgggggacgcacccaccaggaggct

SEQ ID NO: 446845 - DNA, 2678 bp, Homo sapiens
accaggccgcccttcccccacccgcttccggccgcggctcggttctcccgcctccgcctccgccgcggctcgtggttgtcccgccatggcactgtcgcgggggctgccccgggagctggctgaggcggtggccgggggccgggtgctggtggtgggggcgggcggcatcggctgcgagctcctcaagaatctcgtgctcaccggtttctcccacatcgacctgattgatctggatactattgatgtaagcaacctcaacagacagtttttgtttcaaaagaaacatgttggaagatcaaaggcacaggttgccaaggaaagtgtactgcagttttacccgaaagctaatatcgttgcctaccatgacagcatcatgaaccctgactataatgtggaatttttccgacagtttatactggttatgaatgctttagataacagagctgcccgaaaccatgttaatagaatgtgcctggcagctgatgttcctcttattgaaagtggaacagctgggtatcttggacaagtaactactatcaaaaagggtgtgaccgagtgttatgagtgtcatcctaagccgacccagagaacctttcctggctgtacaattcgtaacacaccttcagaacctatacattgcatcgtttgggcaaagtacttgttcaaccagttgtttggggaagaagatgctgatcaagaagtatctcctgacagagctgaccctgaagctgcctgggaaccaacggaagccgaagccagagctagagcatctaatgaagatggtgacattaaacgtatttctactaaggaatgggctaaatcaactggatatgatccagttaaactttttaccaagctttttaaagatgacatcaggtatctgttgacaatggacaaactatggcggaaaaggaaacctccagttccgttggactgggctgaagtacaaagtcaaggagaagaaacgaatgcatcagatcaacagaatgaaccccagttaggcctgaaagaccagcaggttctagatgtaaagagctatgcacgtcttttttcaaagagcatcgagactttgagagttcatttagcagaaaagggggatggagctgagctcatatgggataaggatgacccatctgcaatggattttgtcacctctgctgcaaacctcaggatgcatattttcagtatgaatatgaagagtagatttgatatcaaatcaatggcagggaacattattcctgctattgctactactaatgcagtaattgctgggttgatagtattggaaggattgaagattttatcaggaaaaatagaccagtgcagaacaatttttttgaataaacaaccaaacccaagaaagaagcttcttgtgccttgtgcactggatcctcccaaccccaattgttatgtatgtgccagcaagccagaggtgactgtgcggctgaatgtccataaagtgactgttctcaccttacaagacaagatagtgaaagaaaaatttgctatggtagcaccagatgtccaaattgaagatgggaaaggaacaatcctaatatcttccgaagagggagagacggaagctaataatcacaagaagttgtcagaatttggaattagaaatggcagccggcttcaagcagatgacttcctccaggactatactttattgatcaacatccttcatagtgaagacctaggaaaggacgttgaatttgaagttgttggtgatgccccggaaaaagtggggcccaaacaagctgaagatgctgccaaaagcataaccaatggcagtgatgatggagctcagccctccacctccacagctcaagagcaagatgacgttctcatagttgattcggatgaagaagattcttcaaataatgccgacgtcagtgaagaagagagaagccgcaagaggaaattagatgagaaagagaatctcagtgcaaagaggtcacgtatagaacagaaggaagagcttgatgatgtcatagcattagattgaacagaaatgcctctaaacagaaccctcttactatttagtttatctgggcagaaccagattgttatgtcctttgttccaaagggaaaaaattgacagcagtgacttgaaaatgattctgctccctttgaaagcattcattttgctagaactgttagacacattgcagtatgctgtattgaaagtaggaatatagttttaaaaaccctttgaacaaagtgtgtgcataaccagtcatgagataaaacaacacaatgcatgttgcctttttaatgtaaatacccttaggtatcattaatagtttcaaaatattgtggtttagtaaagttgatacctggttataaatattatgcctttatttttggctagaagaagaattatttttagcctagatctaaccattttcatactcttaactgattgaaacagattcaaagaagtatcgagtgctatgcattgaaacttgtttttaaatgttagatggcactatgtatattaatgtaaaacaatgttaatttactcaagttttcagtttgtaccgcctggtatgtctgtgtaagaagccaatttttgtgtattgttacagtttcaggttatttatattcgatgttttgtaaaactcaaataacgactatacttatggaccaaataaatggcatctgcattcttgtta

SEQ ID NO: 446846 - DNA, 847 bp, Homo sapiens
accaggccgcccttcccccacccgcttccggccgcggctcggttctcccgcctccgcctccgccgcggctcgtggttgtcccgccatggcactgtcgcgggggctgccccgggagctggctgaggcggtggccgggggccgggtgctggtggtgggggcgggcggcatcggctgcgagctcctcaagaatctcgtgctcaccggtttctcccacatcgacctgccaccagggtctcactattttgcttaggctggtcttgaaggtctgggctcaagcgattctctcactttgtcctcccaaagtgttgggattacagattgatctggatactattgatgtaagcaacctcaacagacagtttttgtttcaaaagaaacatgttggaagatcaaaggcacaggttgccaaggaaagtgtactgcagttttacccgaaagctaatatcgttgcctaccatgacagcatcatgaaccctgactataatgtggaatttttccgacagtttatactggttatgaatgctttagataacagagctgcccgaaaccatgttaatagaatgtgcctggcagctgatgttcctcttattgaaagtggaacagctgggtatcttggacaagtaactactatcaaaaagggtgtgaccgagtgttatgagtgtcatcctaagccgacccagagaacctttcctggctgtacaattcgtaacacaccttcagaacctatacattgcatcgtttgggcaaagtacttgttcaaccagtgttgggggacaacaatgtgatcagaagtattcctggaagaagtacccggatggctgggacccgggacgaccgaataagtcta

SEQ ID NO: 446847 - DNA, 778 bp, Homo sapiens
gatggggtttcactatgttggccaggctggtctggaactcctgacctcgtgatccacctgcctcagcctcccaaagtgctgggattacaggcgtgagccactgcgcctggcctaatggcagtgtttttaaaatttggattgtcagcagttggcctttgttgagaaaatgtgtgactttgcccaagcccagtaacttggagccttgaatttgagatgctggaaagggagtccttcctcctttctgcagtgtttgtctgggttgtcccctagtttaccaaagtccattttgaatgtaccatccccagcccaactccagcctacagatagtgccagaccgccagtaggtggagtagcactgtcttcctggtcccggacctcagagggctttgcctgttagggtactcttatcactcagagatgggccttgagttttcagagaacagaaacccattaagctgtttcccctattgtattcatgtgccctttgtgtttctggcaataatttattttatatttcaactaaattttaaatttctaattcatgtatagttccttgtgtaatttgtactgtaccattcagcttattaaccattactccttgttttccaccatttgtaaattcagcatgtaatcagagctttcagaaaaaccatgtagaagactgggtgtggtggctcacacccataagccttgcactttgagaggctgaggcaggaggatcgtttgagcccaggagtttgagaccagcctgagcaacatggcaaaaccccatctctac

SEQ ID NO: 446848 - DNA, 3472 bp, Homo sapiens
accaggccgcccttcccccacccgcttccggccgcggctcggttctcccgcctccgcctccgccgcggctcgtggttgtcccgccatggcactgtcgcgggggctgccccgggagctggctgaggcggtggccgggggccgggtgctggtggtgggggcgggcggcatcggctgcgagctcctcaagaatctcgtgctcaccggtttctcccacatcgacctgattgatctggatactattgatgtaagcaacctcaacagacagtttttgtttcaaaagaaacatgttggaagatcaaaggcacaggttgccaaggaaagtgtactgcagttttacccgaaagctaatatcgttgcctaccatgacagcatcatgaaccctgactataatgtggaatttttccgacagtttatactggttatgaatgctttagataacagagctgcccgaaaccatgttaatagaatgtgcctggcagctgatgttcctcttattgaaagtggaacagctgggtatcttggacaagtaactactatcaaaaagggtgtgaccgagtgttatgagtgtcatcctaagccgacccagagaacctttcctggctgtacaattcgtaacacaccttcagaacctatacattgcatcgtttgggcaaagtacttgttcaaccagttgtttggggaagaagatgctgatcaagaagtatctcctgacagagctgaccctgaagctgcctgggaaccaacggaagccgaagccagagctagagcatctaatgaagatggtgacattaaacgtatttctactaaggaatgggctaaatcaactggatatgatccagttaaactttttaccaagctttttaaagatgacatcaggtatctgttgacaatggacaaactatggcggaaaaggaaacctccagttccgttggactgggctgaagtacaaagtcaaggagaagaaacgaatgcatcagatcaacagaatgaaccccagttaggcctgaaagaccagcaggttctagatgtaaagagctatgcacgtcttttttcaaagagcatcgagactttgagagttcatttagcagaaaagggggatggagctgagctcatatgggataaggatgacccatctgcaatggattttgtcacctctgctgcaaacctcaggatgcatattttcagtatgaatatgaagagtagatttgatatcaaatcaatggcagggaacattattcctgctattgctactactaatgcagtaattgctgggttgatagtattggaaggattgaagattttatcaggaaaaatagaccagtgcagaacaatttttttgaataaacaaccaaacccaagaaagaagcttcttgtgccttgtgcactggatcctcccaaccccaattgttatgtatgtgccagcaagccagaggtgactgtgcggctgaatgtccataaagtgactgttctcaccttacaagacaagatagtgaaagaaaaatttgctatggtagcaccagatgtccaaattgaagatgggaaaggaacaatcctaatatcttccgaagagggagagacggaagctaataatcacaagaagttgtcagaatttggaattagaaatggcagccggcttcaagcagatgacttcctccaggactatactttattgatcaacatccttcatagtgaagacctaggaaaggacgttgaatttgaagttgttggtgatgccccggaaaaagtggggcccaaacaagctgaagatgctgccaaaagcataaccaatggcagtgatgatggagctcagccctccacctccacagctcaagagcaagatgacgttctcatagttgattcggatgaagaagattcttcaaataatgccgacgtcagtgaagaagagagaagccgcaagaggaaattagatgagaaagagaatctcagtgcaaagaggtcacgtatagaacagaaggaagagcttgatgatgtcatagcattagattgaacagaaatgcctctaaacagaaccctcttactatttagtttatctgggcagaaccagattgttatgtcctttgttccaaagggaaaaaattgacagcagtgacttgaaaatgattctgctccctttgaaagcattcattttgctagaactgttagacacattgcagtatgctgtattgaaagtaggaatatagttttaaaaaccctttgaacaaagtgtgtgcataaccagtcatgagataaaacaacacaatgcatgttgcctttttaatgtaaatacccttaggtatcattaatagtttcaaaatattgtggtttagtaaagttgatacctggttataaatattatgcctttatttttggctagaagaagaattatttttagcctagatctaaccattttcatactcttaactgattgaaacagattcaaagaagtatcgagtgctatgcattgaaacttgtttttaaatgttagatggcactatgtatattaatgtaaaacaatgttaatttactcaagttttcagtttgtaccgcctggtatgtctgtgtaagaagccaatttttgtgtattgttacagtttcaggttatttatattcgatgttttgtaaaactcaaataacgactatacttatggaccaaataaatggcatctgcattcttgttacacatgcctgcacagttcctgtttctgctgccttatatctactgcaggaatgtcaaattcttttcattaaaaaaagaactcgcctcccaaagtgctgggattacaggcgtgagccactgcgcctggcctaatggcagtgtttttaaaatttggattgtcagcagttggcctttgttgagaaaatgtgtgactttgcccaagcccagtaacttggagccttgaatttgagatgctggaaagggagtccttcctcctttctgcagtgtttgtctgggttgtcccctagtttaccaaagtccattttgaatgtaccatccccagcccaactccagcctacagatagtgccagaccgccagtaggtggagtagcactgtcttcctggtcccggacctcagagggctttgcctgttagggtactcttatcactcagagatgggccttgagttttcagagaacagaaacccattaagctgtttcccctattgtattcatgtgccctttgtgtttctggcaataatttattttatatttcaactaaattttaaatttctaattcatgtatagttccttgtgtaatttgtactgtaccattcagcttattaaccattactccttgttttccaccatttgtaaattcagcatgtaatcagagctttcagaaaaaccatgtagaagactgggtgtggtggctcacacccataagccttgcactttgagaggctgaggcaggaggatcgtttgagcccaggagtttgagaccagcctgagcaacatggcaaaaccccatctctac

SEQ ID NO: 446849 - DNA, 2880 bp, Homo sapiens
accaggccgcccttcccccacccgcttccggccgcggctcggttctcccgcctccgcctccgccgcggctcgtggttgtcccgccatggcactgtcgcgggggctgccccgggagctggctgaggcggtggccgggggccgggtgctggtggtgggggcgggcggcatcggctgcgagctcctcaagaatctcgtgctcaccggtttctcccacatcgacctgattgatctggatactattgatgtaagcaacctcaacagacagtttttgtttcaaaagaaacatgttggaagatcaaaggcacaggttgccaaggaaagtgtactgcagttttacccgaaagctaatatcgttgcctaccatgacagcatcatgaaccctgactataatgtggaatttttccgacagtttatactggttatgaatgctttagataacagagctgcccgaaaccatgttaatagaatgtgcctggcagctgatgttcctcttattgaaagtggaacagctgggtatcttggacaagtaactactatcaaaaagggtgtgaccgagtgttatgagtgtcatcctaagccgacccagagaacctttcctggctgtacaattcgtaacacaccttcagaacctatacattgcatcgtttgggcaaagtacttgttcaaccagttgtttggggaagaagatgctgatcaagaagtatctcctgacagagctgaccctgaagctgcctgggaaccaacggaagccgaagccagagctagagcatctaatgaagatggtgacattaaacgtatttctactaaggaatgggctaaatcaactggatatgatccagttaaactttttaccaagctttttaaagatgacatcaggtatctgttgacaatggacaaactatggcggaaaaggaaacctccagttccgttggactgggctgaagtacaaagtcaaggagaagaaacgaatgcatcagatcaacagaatgaaccccagttaggcctgaaagaccagcaggttctagatgtaaagagctatgcacgtcttttttcaaagagcatcgagactttgagagttcatttagcagaaaagggggatggagctgagctcatatgggataaggatgacccatctgcaatggattttgtcacctctgctgcaaacctcaggatgcatattttcagtatgaatatgaagagtagatttgatatcaaatcaatggcagggaacattattcctgctattgctactactaatgcagtaattgctgggttgatagtattggaaggattgaagattttatcaggaaaaatagaccagtgcagaacaatttttttgaataaacaaccaaacccaagaaagaagcttcttgtgccttgtgcactggatcctcccaaccccaattgttatgtatgtgccagcaagccagaggtgactgtgcggctgaatgtccataaagtgactgttctcaccttacaagacaagatagtgaaagaaaaatttgctatggtagcaccagatgtccaaattgaagatgggaaaggaacaatcctaatatcttccgaagagggagagacggaagctaataatcacaagaagttgtcagaatttggaattagaaatggcagccggcttcaagcagatgacttcctccaggactatactttattgatcaacatccttcatagtgaagacctaggaaaggacgttgaatttgaagttgttggtgatgccccggaaaaagtggggcccaaacaagctgaagatgctgccaaaagcataaccaatggcagtgatgatggagctcagccctccacctccacagctcaagagcaagatgacgttctcatagttgattcggatgaagaagattcttcaaataatgccgacgtcagtgaagaagagagaagccgcaagaggaaattagatgagaaagagaatctcagtgcaaagaggtcacgtatagaacagaaggaagagcttgatgatgtcatagcattagattgaacagaaatgcctctaaacagaaccctcttactatttagtttatctgggcagaaccagattgttatgtcctttgttccaaagggaaaaaattgacagcagtgacttgaaaatgattctgctccctttgaaagcattcattttgctagaactgttagacacattgcagtatgctgtattgaaagtaggaatatagttttaaaaaccctttgaacaaagtgtgtgcataaccagtcatgagataaaacaacacaatgcatgttgcctttttaatgtaaatacccttaggtatcattaatagtttcaaaatattgtggtttagtaaagttgatacctggttataaatattatgcctttatttttggctagaagaagaattatttttagcctagatctaaccattttcatactcttaactgattgaaacagattcaaagaagtatcgagtgctatgcattgaaacttgtttttaaatgttagatggcactatgtatattaatgtaaaacaatgttaatttactcaagttttcagtttgtaccgcctggtatgtctgtgtaagaagccaatttttgtgtattgttacagtttcaggttatttatattcgatgttttgtaaaactcaaataacgactatacttatggaccaaataaatggcatctgcattcttgttacacatgcctgcacagttcctgtttctgctgccttatatctactgcaggaatgtcaaattcttttcattaaaaaaagaactcggtcgggcacggtggctcatgcctgtaatcccagcactttggaaggctgaggcaggtggatcacctgaggtcagtagttcaagaccaacctggtcaacatggtgaaaccccatctctacta

SEQ ID NO: 446850 - DNA, 2503 bp, Homo sapiens
  misc_feature (13)..(13): n is a, c, g, or t
  misc_feature (16)..(16): n is a, c, g, or t
tgactctgaggantcnctcgaatcgacggtttctcccacatcgacctgattgatctggatactattgatgtaagcaacctcaacagacagtttttgtttcaaaagaaacatgttggaagatcaaaggcacaggttgccaaggaaagtgtactgcagttttacccgaaagctaatatcgttgcctaccatgacagcatcatgaaccctgactataatgtggaatttttccgacagtttatactggttatgaatgctttagataacagagctgcccgaaaccatgttaatagaatgtgcctggcagctgatgttcctcttattgaaagtggaacagctgggtatcttggacaagtaactactatcaaaaagggtgtgaccgagtgttatgagtgtcatcctaagccgacccagagaacctttcctggctgtacaattcgtaacacaccttcagaacctatacattgcatcgtttgggcaaagtacttgttcaaccagttgtttggggaagaagatgctgatcaagaagtatctcctgacagagctgaccctgaagctgcctgggaaccaacggaagccgaagccagagctagagcatctaatgaagatggtgacattaaacgtatttctactaaggaatgggctaaatcaactggatatgatccagttaaactttttaccaagctttttaaagatgacatcaggtatctgttgacaatggacaaactatggcggaaaaggaaacctccagttccgttggactgggctgaagtacaaagtcaaggagaagaaacgaatgcatcagatcaacagaatgaaccccagttaggcctgaaagaccagcaggttctagatgtaaagagctatgcacgtcttttttcaaagagcatcgagactttgagagttcatttagcagaaaagggggatggagctgagctcatatgggataaggatgacccatctgcaatggattttgtcacctctgctgcaaacctcaggatgcatattttcagtatgaatatgaagagtagatttgatatcaaatcaatggcagggaacattattcctgctattgctactactaatgcagtaattgctgggttgatagtattggaaggattgaagattttatcaggaaaaatagaccagtgcagaacaatttttttgaataaacaaccaaacccaagaaagaagcttcttgtgccttgtgcactggatcctcccaaccccaattgttatgtatgtgccagcaagccagaggtgactgtgcggctgaatgtccataaagtgactgttctcaccttacaagacaagatagtgaaagaaaaatttgctatggtagcaccagatgtccaaattgaagatgggaaaggaacaatcctaatatcttccgaagagggagagacggaagctaataatcacaagaagttgtcagaatttggaattagaaatggcagccggcttcaagcagatgacttcctccaggactatactttattgatcaacatccttcatagtgaagacctaggaaaggacgttgaatttgaagttgttggtgatgccccggaaaaagtggggcccaaacaagctgaagatgctgccaaaagcataaccaatggcagtgatgatggagctcagccctccacctccacagctcaagagcaagatgacgttctcatagttgattcggatgaagaagattcttcaaataatgccgacgtcagtgaagaagagagaagccgcaagaggaaattagatgagaaagagaatctcagtgcaaagaggtcacgtatagaacagaaggaagagcttgatgatgtcatagcattagattgaacagaaatgcctctaaacagaaccctcttactatttagtttatctgggcagaaccagattgttatgtcctttgttccaaagggaaaaaattgacagcagtgacttgaaaatgattctgctccctttgaaagcattcattttgctagaactgttagacacattgcagtatgctgtattgaaagtaggaatatagttttaaaaaccctttgaacaaagtgtgtgcataaccagtcatgagataaaacaacacaatgcatgttgcctttttaatgtaaatacccttaggtatcattaatagtttcaaaatattgtggtttagtaaagttgatacctggttataaatattatgcctttatttttggctagaagaagaattatttttagcctagatctaaccattttcatactcttaactgattgaaacagattcaaagaagtatcgagtgctatgcattgaaacttgtttttaaatgttagatggcactatgtatattaatgtaaaacaatgttaatttactcaagttttcagtttgtaccgcctggtatgtctgtgtaagaagccaatttttgtgtattgttacagtttcaggttatttatattcgatgttttgtaaaactcaaataacgactatacttatggaccaaataaatggcatctgcattcttgtta

SEQ ID NO: 446851 - DNA, 2540 bp, Homo sapiens
cagtttgagatctttctcttgtgccctagctggccaaaaaggataggaatttgaaggaaataatttctttaaaatctgcttatgtttggaaagagtcaaaccttactatctatatgacatataatcctgatatcagttttgtttacagttactatgtttttttcagaactgtttattatactgcaaagatcatgtggaaggctagttattttggtgacctttttttattttgttttgtagccctgactataatgtggaatttttccgacagtttatactggttatgaatgctttagataacagagctgcccgaaaccatgttaatagaatgtgcctggcagctgatgttcctcttattgaaagtggaacagctgggtatcttggacaagtaactactatcaaaaagggtgtgaccgagtgttatgagtgtcatcctaagccgacccagagaacctttcctggctgtacaattcgtaacacaccttcagaacctatacattgcatcgtttgggcaaagtacttgttcaaccagttgtttggggaagaagatgctgatcaagaagtatctcctgacagagctgaccctgaagctgcctgggaaccaacggaagccgaagccagagctagagcatctaatgaagatggtgacattaaacgtatttctactaaggaatgggctaaatcaactggatatgatccagttaaactttttaccaagctttttaaagatgacatcaggtatctgttgacaatggacaaactatggcggaaaaggaaacctccagttccgttggactgggctgaagtacaaagtcaaggagaagaaacgaatgcatcagatcaacagaatgaaccccagttaggcctgaaagaccagcaggttctagatgtaaagagctatgcacgtcttttttcaaagagcatcgagactttgagagttcatttagcagaaaagggggatggagctgagctcatatgggataaggatgacccatctgcaatggattttgtcacctctgctgcaaacctcaggatgcatattttcagtatgaatatgaagagtagatttgatatcaaatcaatggcagggaacattattcctgctattgctactactaatgcagtaattgctgggttgatagtattggaaggattgaagattttatcaggaaaaatagaccagtgcagaacaatttttttgaataaacaaccaaacccaagaaagaagcttcttgtgccttgtgcactggatcctcccaaccccaattgttatgtatgtgccagcaagccagaggtgactgtgcggctgaatgtccataaagtgactgttctcaccttacaagacaagatagtgaaagaaaaatttgctatggtagcaccagatgtccaaattgaagatgggaaaggaacaatcctaatatcttccgaagagggagagacggaagctaataatcacaagaagttgtcagaatttggaattagaaatggcagccggcttcaagcagatgacttcctccaggactatactttattgatcaacatccttcatagtgaagacctaggaaaggacgttgaatttgaagttgttggtgatgccccggaaaaagtggggcccaaacaagctgaagatgctgccaaaagcataaccaatggcagtgatgatggagctcagccctccacctccacagctcaagagcaagatgacgttctcatagttgattcggatgaagaagattcttcaaataatgccgacgtcagtgaagaagagagaagccgcaagaggaaattagatgagaaagagaatctcagtgcaaagaggtcacgtatagaacagaaggaagagcttgatgatgtcatagcattagattgaacagaaatgcctctaaacagaaccctcttactatttagtttatctgggcagaaccagattgttatgtcctttgttccaaagggaaaaaattgacagcagtgacttgaaaatgattctgctccctttgaaagcattcattttgctagaactgttagacacattgcagtatgctgtattgaaagtaggaatatagttttaaaaaccctttgaacaaagtgtgtgcataaccagtcatgagataaaacaacacaatgcatgttgcctttttaatgtaaatacccttaggtatcattaatagtttcaaaatattgtggtttagtaaagttgatacctggttataaatattatgcctttatttttggctagaagaagaattatttttagcctagatctaaccattttcatactcttaactgattgaaacagattcaaagaagtatcgagtgctatgcattgaaacttgtttttaaatgttagatggcactatgtatattaatgtaaaacaatgttaatttactcaagttttcagtttgtaccgcctggtatgtctgtgtaagaagccaatttttgtgtattgttacagtttcaggttatttatattcgatgttttgtaaaactcaaataacgactatacttatggaccaaataaatggcatctgcattcttgtta

SEQ ID NO: 446852 - DNA, 2419 bp, Homo sapiens
  misc_feature (13)..(13): n is a, c, g, or t
  misc_feature (16)..(16): n is a, c, g, or t
tgactctgaggantcnctcgaatcgacggtttctcccacatcgacctggttgccaaggaaagtgtactgcagttttacccgaaagctaatatcgttgcctaccatgacagcatcatgaaccctgactataatgtggaatttttccgacagtttatactggttatgaatgctttagataacagagctgcccgaaaccatgttaatagaatgtgcctggcagctgatgttcctcttattgaaagtggaacagctgggtatcttggacaagtaactactatcaaaaagggtgtgaccgagtgttatgagtgtcatcctaagccgacccagagaacctttcctggctgtacaattcgtaacacaccttcagaacctatacattgcatcgtttgggcaaagtacttgttcaaccagttgtttggggaagaagatgctgatcaagaagtatctcctgacagagctgaccctgaagctgcctgggaaccaacggaagccgaagccagagctagagcatctaatgaagatggtgacattaaacgtatttctactaaggaatgggctaaatcaactggatatgatccagttaaactttttaccaagctttttaaagatgacatcaggtatctgttgacaatggacaaactatggcggaaaaggaaacctccagttccgttggactgggctgaagtacaaagtcaaggagaagaaacgaatgcatcagatcaacagaatgaaccccagttaggcctgaaagaccagcaggttctagatgtaaagagctatgcacgtcttttttcaaagagcatcgagactttgagagttcatttagcagaaaagggggatggagctgagctcatatgggataaggatgacccatctgcaatggattttgtcacctctgctgcaaacctcaggatgcatattttcagtatgaatatgaagagtagatttgatatcaaatcaatggcagggaacattattcctgctattgctactactaatgcagtaattgctgggttgatagtattggaaggattgaagattttatcaggaaaaatagaccagtgcagaacaatttttttgaataaacaaccaaacccaagaaagaagcttcttgtgccttgtgcactggatcctcccaaccccaattgttatgtatgtgccagcaagccagaggtgactgtgcggctgaatgtccataaagtgactgttctcaccttacaagacaagatagtgaaagaaaaatttgctatggtagcaccagatgtccaaattgaagatgggaaaggaacaatcctaatatcttccgaagagggagagacggaagctaataatcacaagaagttgtcagaatttggaattagaaatggcagccggcttcaagcagatgacttcctccaggactatactttattgatcaacatccttcatagtgaagacctaggaaaggacgttgaatttgaagttgttggtgatgccccggaaaaagtggggcccaaacaagctgaagatgctgccaaaagcataaccaatggcagtgatgatggagctcagccctccacctccacagctcaagagcaagatgacgttctcatagttgattcggatgaagaagattcttcaaataatgccgacgtcagtgaagaagagagaagccgcaagaggaaattagatgagaaagagaatctcagtgcaaagaggtcacgtatagaacagaaggaagagcttgatgatgtcatagcattagattgaacagaaatgcctctaaacagaaccctcttactatttagtttatctgggcagaaccagattgttatgtcctttgttccaaagggaaaaaattgacagcagtgacttgaaaatgattctgctccctttgaaagcattcattttgctagaactgttagacacattgcagtatgctgtattgaaagtaggaatatagttttaaaaaccctttgaacaaagtgtgtgcataaccagtcatgagataaaacaacacaatgcatgttgcctttttaatgtaaatacccttaggtatcattaatagtttcaaaatattgtggtttagtaaagttgatacctggttataaatattatgcctttatttttggctagaagaagaattatttttagcctagatctaaccattttcatactcttaactgattgaaacagattcaaagaagtatcgagtgctatgcattgaaacttgtttttaaatgttagatggcactatgtatattaatgtaaaacaatgttaatttactcaagttttcagtttgtaccgcctggtatgtctgtgtaagaagccaatttttgtgtattgttacagtttcaggttatttatattcgatgttttgtaaaactcaaataacgactatacttatggaccaaataaatggcatctgcattcttgtta

SEQ ID NO: 446853 - DNA, 2453 bp, Homo sapiens
agcagggaacaatcacttagtaaggaagacaaataccaaaaacatcagcggggaacaatcacttggaagatcaaaggcacaggttgccaaggaaagtgtactgcagttttacccgaaagctaatatcgttgcctaccatgacagcatcatgaaccctgactataatgtggaatttttccgacagtttatactggttatgaatgctttagataacagagctgcccgaaaccatgttaatagaatgtgcctggcagctgatgttcctcttattgaaagtggaacagctgggtatcttggacaagtaactactatcaaaaagggtgtgaccgagtgttatgagtgtcatcctaagccgacccagagaacctttcctggctgtacaattcgtaacacaccttcagaacctatacattgcatcgtttgggcaaagtacttgttcaaccagttgtttggggaagaagatgctgatcaagaagtatctcctgacagagctgaccctgaagctgcctgggaaccaacggaagccgaagccagagctagagcatctaatgaagatggtgacattaaacgtatttctactaaggaatgggctaaatcaactggatatgatccagttaaactttttaccaagctttttaaagatgacatcaggtatctgttgacaatggacaaactatggcggaaaaggaaacctccagttccgttggactgggctgaagtacaaagtcaaggagaagaaacgaatgcatcagatcaacagaatgaaccccagttaggcctgaaagaccagcaggttctagatgtaaagagctatgcacgtcttttttcaaagagcatcgagactttgagagttcatttagcagaaaagggggatggagctgagctcatatgggataaggatgacccatctgcaatggattttgtcacctctgctgcaaacctcaggatgcatattttcagtatgaatatgaagagtagatttgatatcaaatcaatggcagggaacattattcctgctattgctactactaatgcagtaattgctgggttgatagtattggaaggattgaagattttatcaggaaaaatagaccagtgcagaacaatttttttgaataaacaaccaaacccaagaaagaagcttcttgtgccttgtgcactggatcctcccaaccccaattgttatgtatgtgccagcaagccagaggtgactgtgcggctgaatgtccataaagtgactgttctcaccttacaagacaagatagtgaaagaaaaatttgctatggtagcaccagatgtccaaattgaagatgggaaaggaacaatcctaatatcttccgaagagggagagacggaagctaataatcacaagaagttgtcagaatttggaattagaaatggcagccggcttcaagcagatgacttcctccaggactatactttattgatcaacatccttcatagtgaagacctaggaaaggacgttgaatttgaagttgttggtgatgccccggaaaaagtggggcccaaacaagctgaagatgctgccaaaagcataaccaatggcagtgatgatggagctcagccctccacctccacagctcaagagcaagatgacgttctcatagttgattcggatgaagaagattcttcaaataatgccgacgtcagtgaagaagagagaagccgcaagaggaaattagatgagaaagagaatctcagtgcaaagaggtcacgtatagaacagaaggaagagcttgatgatgtcatagcattagattgaacagaaatgcctctaaacagaaccctcttactatttagtttatctgggcagaaccagattgttatgtcctttgttccaaagggaaaaaattgacagcagtgacttgaaaatgattctgctccctttgaaagcattcattttgctagaactgttagacacattgcagtatgctgtattgaaagtaggaatatagttttaaaaaccctttgaacaaagtgtgtgcataaccagtcatgagataaaacaacacaatgcatgttgcctttttaatgtaaatacccttaggtatcattaatagtttcaaaatattgtggtttagtaaagttgatacctggttataaatattatgcctttatttttggctagaagaagaattatttttagcctagatctaaccattttcatactcttaactgattgaaacagattcaaagaagtatcgagtgctatgcattgaaacttgtttttaaatgttagatggcactatgtatattaatgtaaaacaatgttaatttactcaagttttcagtttgtaccgcctggtatgtctgtgtaagaagccaatttttgtgtattgttacagtttcaggttatttatattcgatgttttgtaaaactcaaataacgactatacttatggaccaaataaatggcatctgcattcttgtta

SEQ ID NO: 446854 - DNA, 2581 bp, Homo sapiens
accaggccgcccttcccccacccgcttccggccgcggctcggttctcccgcctccgcctccgccgcggctcgtggttgtcccgccatggcactgtcgcgggggctgccccgggagctggctgaggcggtggccgggggccgggtgctggtggtgggggcgggcggcatcggctgcgagctcctcaagaatctcgtgctcaccggtttctcccacatcgacctgattgatctggatactattgatgtaagcaacctcaacagacagtttttgtttcaaaagaaacatgttggaagatcaaaggcacaggttgccaaggaaagtgtactgcagttttacccgaaagctaatatcgttgcctaccatgacagcatcatgaaccctgactataatgtggaatttttccgacagtttatactggttatgaatgctttagataacagagctgcccgaaaccatgttaatagaatgtgcctggcagctgatgttcctcttattgaaagtggaacagctgggtatcttggacaagtaactactatcaaaaagggtgtgaccgagtgttatgagtgtcatcctaagccgacccagagaacctttcctggctgtacaattcgtaacacaccttcagaacctatacattgcatcgtttgggcaaagtacttgttcaaccagttgtttggggaagaagatgctgatcaagaagtatctcctgacagagctgaccctgaagctgcctgggaaccaacggaagccgaagccagagctagagcatctaatgaagatggtgacattaaacgtatttctactaaggaatgggctaaatcaactggatatgatccagttaaactttttaccaagctttttaaagatgacatcaggtatctgttgacaatggacaaactatggcggaaaaggaaacctccagttccgttggactgggctgaagtacaaagtcaaggagaagaaacgaatgcatcagatcaacagaatgaaccccagttaggcctgaaagaccagcaggttctagatgtaaagagctatgcacgtcttttttcaaagagcatcgagactttgagagttcatttagcagaaaagggggatggagctgagctcatatgggataaggatgacccatctgcaatggattttgtcacctctgctgcaaacctcaggatgcatattttcagtatgaatatgaagagtagatttgatatcaaatcaatggcagggaacattattcctgctattgctactactaatgcagtaattgctgggttgatagtattggaaggattgaagattttatcaggaaaaatagaccagtgcagaacaatttttttgaataaacaaccaaacccaagaaagaagcttcttgtgccttgtgcactggatcctcccaaccccaattgttatgtatgtgccagcaagccagaggtgactgtgcggctgaatgtccataaagtgactgttctcaccttacaagacaagctaataatcacaagaagttgtcagaatttggaattagaaatggcagccggcttcaagcagatgacttcctccaggactatactttattgatcaacatccttcatagtgaagacctaggaaaggacgttgaatttgaagttgttggtgatgccccggaaaaagtggggcccaaacaagctgaagatgctgccaaaagcataaccaatggcagtgatgatggagctcagccctccacctccacagctcaagagcaagatgacgttctcatagttgattcggatgaagaagattcttcaaataatgccgacgtcagtgaagaagagagaagccgcaagaggaaattagatgagaaagagaatctcagtgcaaagaggtcacgtatagaacagaaggaagagcttgatgatgtcatagcattagattgaacagaaatgcctctaaacagaaccctcttactatttagtttatctgggcagaaccagattgttatgtcctttgttccaaagggaaaaaattgacagcagtgacttgaaaatgattctgctccctttgaaagcattcattttgctagaactgttagacacattgcagtatgctgtattgaaagtaggaatatagttttaaaaaccctttgaacaaagtgtgtgcataaccagtcatgagataaaacaacacaatgcatgttgcctttttaatgtaaatacccttaggtatcattaatagtttcaaaatattgtggtttagtaaagttgatacctggttataaatattatgcctttatttttggctagaagaagaattatttttagcctagatctaaccattttcatactcttaactgattgaaacagattcaaagaagtatcgagtgctatgcattgaaacttgtttttaaatgttagatggcactatgtatattaatgtaaaacaatgttaatttactcaagttttcagtttgtaccgcctggtatgtctgtgtaagaagccaatttttgtgtattgttacagtttcaggttatttatattcgatgttttgtaaaactcaaataacgactatacttatggaccaaataaatggcatctgcattcttgtta

SEQ ID NO: 446855 - DNA, 2485 bp, Homo sapiens
accaggccgcccttcccccacccgcttccggccgcggctcggttctcccgcctccgcctccgccgcggctcgtggttgtcccgccatggcactgtcgcgggggctgccccgggagctggctgaggcggtggccgggggccgggtgctggtggtgggggcgggcggcatcggctgcgagctcctcaagaatctcgtgctcaccggtttctcccacatcgacctgattgatctggatactattgatgtaagcaacctcaacagacagtttttgtttcaaaagaaacatgttggaagatcaaaggcacaggttgccaaggaaagtgtactgcagttttacccgaaagctaatatcgttgcctaccatgacagcatcatgaaccctgactataatgtggaatttttccgacagtttatactggttatgaatgctttagataacagagctgcccgaaaccatgttaatagaatgtgcctggcagctgatgttcctcttattgaaagtggaacagctgggtatcttggacaagtaactactatcaaaaagggtgtgaccgagtgttatgagtgtcatcctaagccgacccagagaacctttcctggctgtacaattcgtaacacaccttcagaacctatacattgcatcgtttgggcaaagtacttgttcaaccagttgtttggggaagaagatgctgatcaagaagtatctcctgacagagctgaccctgaagctgcctgggaaccaacggaagccgaagccagagctagagcatctaatgaagatggtgacattaaacgtatttctactaaggaatgggctaaatcaactggatatgatccagttaaactttttaccaagctttttaaagatgacatcaggtatctgttgacaatggacaaactatggcggaaaaggaaacctccagttccgttggactgggctgaagtacaaagtcaaggagaagaaacgaatgcatcagatcaacagaatgaaccccagttaggcctgaaagaccagcaggttctagatgtaaagagctatgcacgtcttttttcaaagagcatcgagactttgagagttcatttagcagaaaagggggatggagctgagctcatatgggataaggatgacccatctgcaatggattttgtcacctctgctgcaaacctcaggatgcatattttcagtatgaatatgaagagtagatttgatatcaaatcaatggcagggaacattattcctgctattgctactactaatgcagtaattgctgggttgatagtattggaaggattgaagattttatcaggaaaaatagaccagtgcagaacaatttttttgaataaacaaccaaacccaagaaagaagcttcttgtgccttgtgcactggatcctcccaaccccaattgttatgtatgtgccagcaagccagaggtgactgtgcggctgaatgtccataaagtgactgttctcaccttacaagacaagatagtgaaagaaaaatttgctatggtagcaccagatgtccaaattgaagatgggaaaggaacaatcctaatatcttccgaagagggagagacggaagctaataatcacaagaagttgtcagaatttggaattagaaatggcagccggctcaagagcaagatgacgttctcatagttgattcggatgaagaagattcttcaaataatgccgacgtcagtgaagaagagagaagccgcaagaggaaattagatgagaaagagaatctcagtgcaaagaggtcacgtatagaacagaaggaagagcttgatgatgtcatagcattagattgaacagaaatgcctctaaacagaaccctcttactatttagtttatctgggcagaaccagattgttatgtcctttgttccaaagggaaaaaattgacagcagtgacttgaaaatgattctgctccctttgaaagcattcattttgctagaactgttagacacattgcagtatgctgtattgaaagtaggaatatagttttaaaaaccctttgaacaaagtgtgtgcataaccagtcatgagataaaacaacacaatgcatgttgcctttttaatgtaaatacccttaggtatcattaatagtttcaaaatattgtggtttagtaaagttgatacctggttataaatattatgcctttatttttggctagaagaagaattatttttagcctagatctaaccattttcatactcttaactgattgaaacagattcaaagaagtatcgagtgctatgcattgaaacttgtttttaaatgttagatggcactatgtatattaatgtaaaacaatgttaatttactcaagttttcagtttgtaccgcctggtatgtctgtgtaagaagccaatttttgtgtattgttacagtttcaggttatttatattcgatgttttgtaaaactcaaataacgactatacttatggaccaaataaatggcatctgcattcttgtta

SEQ ID NO: 446856 - DNA, 1749 bp, Homo sapiens
ttctaatatatatatttttttctttaggagaagaaacgaatgcatcagatcaacagaatgaaccccagttaggcctgaaagaccagcaggttctagatgtaaagagctatgcacgtcttttttcaaagagcatcgagactttgagagttcatttagcagaaaagggggatggagctgagctcatatgggataaggatgacccatctgcaatggattttgtcacctctgctgcaaacctcaggatgcatattttcagtatgaatatgaagagtagatttgatatcaaatcaatggcagggaacattattcctgctattgctactactaatgcagtaattgctgggttgatagtattggaaggattgaagattttatcaggaaaaatagaccagtgcagaacaatttttttgaataaacaaccaaacccaagaaagaagcttcttgtgccttgtgcactggatcctcccaaccccaattgttatgtatgtgccagcaagccagaggtgactgtgcggctgaatgtccataaagtgactgttctcaccttacaagacaagatagtgaaagaaaaatttgctatggtagcaccagatgtccaaattgaagatgggaaaggaacaatcctaatatcttccgaagagggagagacggaagctaataatcacaagaagttgtcagaatttggaattagaaatggcagccggcttcaagcagatgacttcctccaggactatactttattgatcaacatccttcatagtgaagacctaggaaaggacgttgaatttgaagttgttggtgatgccccggaaaaagtggggcccaaacaagctgaagatgctgccaaaagcataaccaatggcagtgatgatggagctcagccctccacctccacagctcaagagcaagatgacgttctcatagttgattcggatgaagaagattcttcaaataatgccgacgtcagtgaagaagagagaagccgcaagaggaaattagatgagaaagagaatctcagtgcaaagaggtcacgtatagaacagaaggaagagcttgatgatgtcatagcattagattgaacagaaatgcctctaaacagaaccctcttactatttagtttatctgggcagaaccagattgttatgtcctttgttccaaagggaaaaaattgacagcagtgacttgaaaatgattctgctccctttgaaagcattcattttgctagaactgttagacacattgcagtatgctgtattgaaagtaggaatatagttttaaaaaccctttgaacaaagtgtgtgcataaccagtcatgagataaaacaacacaatgcatgttgcctttttaatgtaaatacccttaggtatcattaatagtttcaaaatattgtggtttagtaaagttgatacctggttataaatattatgcctttatttttggctagaagaagaattatttttagcctagatctaaccattttcatactcttaactgattgaaacagattcaaagaagtatcgagtgctatgcattgaaacttgtttttaaatgttagatggcactatgtatattaatgtaaaacaatgttaatttactcaagttttcagtttgtaccgcctggtatgtctgtgtaagaagccaatttttgtgtattgttacagtttcaggttatttatattcgatgttttgtaaaactcaaataacgactatacttatggaccaaataaatggcatctgcattcttgtta

SEQ ID NO: 446857 - DNA, 1344 bp, Homo sapiens
cttagatgacagtcggctgatggtttcgataataactagtatggggataaggggtgtaggtgtgccttgtggtaagaagtgcgcctgggtgcgctgaggtgactgtgcggctgaatgtccataaagtgactgttctcaccttacaagacaagatagtgaaagaaaaatttgctatggtagcaccagatgtccaaattgaagatgggaaaggaacaatcctaatatcttccgaagagggagagacggaagctaataatcacaagaagttgtcagaatttggaattagaaatggcagccggcttcaagcagatgacttcctccaggactatactttattgatcaacatccttcatagtgaagacctaggaaaggacgttgaatttgaagttgttggtgatgccccggaaaaagtggggcccaaacaagctgaagatgctgccaaaagcataaccaatggcagtgatgatggagctcagccctccacctccacagctcaagagcaagatgacgttctcatagttgattcggatgaagaagattcttcaaataatgccgacgtcagtgaagaagagagaagccgcaagaggaaattagatgagaaagagaatctcagtgcaaagaggtcacgtatagaacagaaggaagagcttgatgatgtcatagcattagattgaacagaaatgcctctaaacagaaccctcttactatttagtttatctgggcagaaccagattgttatgtcctttgttccaaagggaaaaaattgacagcagtgacttgaaaatgattctgctccctttgaaagcattcattttgctagaactgttagacacattgcagtatgctgtattgaaagtaggaatatagttttaaaaaccctttgaacaaagtgtgtgcataaccagtcatgagataaaacaacacaatgcatgttgcctttttaatgtaaatacccttaggtatcattaatagtttcaaaatattgtggtttagtaaagttgatacctggttataaatattatgcctttatttttggctagaagaagaattatttttagcctagatctaaccattttcatactcttaactgattgaaacagattcaaagaagtatcgagtgctatgcattgaaacttgtttttaaatgttagatggcactatgtatattaatgtaaaacaatgttaatttactcaagttttcagtttgtaccgcctggtatgtctgtgtaagaagccaatttttgtgtattgttacagtttcaggttatttatattcgatgttttgtaaaactcaaataacgactatacttatggaccaaataaatggcatctgcattcttgtta

SEQ ID NO: 446858 - DNA, 1040 bp, Homo sapiens
  misc_feature (28)..(28): n is a, c, g, or t
atggatttggtatctccccgaggagtanctttattgatcaacatccttcattgaagacctaggaaaggacgttgaatttgaagttgttggtgatgccccggaaaaagtggggcccaaacaagctgaagatgctgccaaaagcataaccaatggcagtgatgatggagctcagccctccacctccacagctcaagagcaagatgacgttctcatagttgattcggatgaagaagattcttcaaataatgccgacgtcagtgaagaagagagaagccgcaagaggaaattagatgagaaagagaatctcagtgcaaagaggtcacgtatagaacagaaggaagagcttgatgatgtcatagcattagattgaacagaaatgcctctaaacagaaccctcttactatttagtttatctgggcagaaccagattgttatgtcctttgttccaaagggaaaaaattgacagcagtgacttgaaaatgattctgctccctttgaaagcattcattttgctagaactgttagacacattgcagtatgctgtattgaaagtaggaatatagttttaaaaaccctttgaacaaagtgtgtgcataaccagtcatgagataaaacaacacaatgcatgttgcctttttaatgtaaatacccttaggtatcattaatagtttcaaaatattgtggtttagtaaagttgatacctggttataaatattatgcctttatttttggctagaagaagaattatttttagcctagatctaaccattttcatactcttaactgattgaaacagattcaaagaagtatcgagtgctatgcattgaaacttgtttttaaatgttagatggcactatgtatattaatgtaaaacaatgttaatttactcaagttttcagtttgtaccgcctggtatgtctgtgtaagaagccaatttttgtgtattgttacagtttcaggttatttatattcgatgttttgtaaaactcaaataacgactatacttatggaccaaataaatggcatctgcattcttgtta

SEQ ID NO: 446859 - DNA, 1048 bp, Homo sapiens
gattagaaaataaataggttcttatataaaacatttaaaacagtatggaaatacgtaatgtgtaaagtgaaaatgcagccattcttaagtctggtgtgtattagaagagtcagctttcaattatagaaaatacaggtgagcacaggtaactcccacgcttttacccattttctttttcccttttttctgaaataagctcaagagcaagatgacgttctcatagttgattcggatgaagaagattcttcaaataatgccgacgtcagtgaagaagagagaagccgcaagaggaaattagatgagaaagagaatctcagtgcaaagaggtcacgtatagaacagaaggaagagcttgatgatgtcatagcattagattgaacagaaatgcctctaaacagaaccctcttactatttagtttatctgggcagaaccagattgttatgtcctttgttccaaagggaaaaaattgacagcagtgacttgaaaatgattctgctccctttgaaagcattcattttgctagaactgttagacacattgcagtatgctgtattgaaagtaggaatatagttttaaaaaccctttgaacaaagtgtgtgcataaccagtcatgagataaaacaacacaatgcatgttgcctttttaatgtaaatacccttaggtatcattaatagtttcaaaatattgtggtttagtaaagttgatacctggttataaatattatgcctttatttttggctagaagaagaattatttttagcctagatctaaccattttcatactcttaactgattgaaacagattcaaagaagtatcgagtgctatgcattgaaacttgtttttaaatgttagatggcactatgtatattaatgtaaaacaatgttaatttactcaagttttcagtttgtaccgcctggtatgtctgtgtaagaagccaatttttgtgtattgttacagtttcaggttatttatattcgatgttttgtaaaactcaaataacgactatacttatggaccaaataaatggcatctgcattcttgtta

SEQ ID NO: 446860 - DNA, 1005 bp, Homo sapiens
  misc_feature (963)..(963): n is a, c, g, or t
  misc_feature (965)..(965): n is a, c, g, or t
  misc_feature (980)..(980): n is a, c, g, or t
accaggccgcccttcccccacccgcttccggccgcggctcggttctcccgcctccgcctccgccgcggctcgtggttgtcccgccatggcactgtcgcgggggctgccccgggagctggctgaggcggtggccgggggccgggtgctggtggtgggggcgggcggcatcggctgcgagctcctcaagaatctcgtgctcaccggtttctcccacatcgacctgattgatctggatactattgatgtaagcaacctcaacagacagtttttgtttcaaaagaaacatgttggaagatcaaaggcacaggttgccaaggaaagtgtactgcagttttacccgaaagctaatatcgttgcctaccatgacagcatcatgaaccctgactataatgtggaatttttccgacagtttatactggttatgaatgctttagataacagagctgcccgaaaccatgttaatagaatgtgcctggcagctgatgttcctcttattgaaagtggaacagctgggtatcttggacaagtaactactatcaaaaagggtgtgaccgagtgttatgagtgtcatcctaagccgacccagagaacctttcctggctgtacaattcgtaacacaccttcagaacctatacattgcatcgtttgggcaaagtacttgttcaaccagttgtttggggaagaagatgctgatcaagaagtatctcctgacagagctgaccctgaagctgcctgggaaccaacggaagccgaagccagagctagagcatctaatgaagatggtgacattaaacgtatttctactaaggaatgggctaaatcaactggatatgatccagttaaactttttaccaagctttttaaagatgacatcaggtatctgttgacaatggacaaactatggcggaaaaggaaacctccagttccgttggactgggctgaagtacaaagtcaaggagaagnancgaagcatcaggtcnacatactgccgaacgtaacctctgg

SEQ ID NO: 446861 - DNA, 482 bp, Homo sapiens
ctagggacaaatgggtccagggtggccctttgattgtggtcccgggtgcggattggcagggcctccgccgcggctcgtggttgtcccgccatggcactgtcgcgggggctgccccgggagctggctgaggcggtggccgggggccgggtgctggtggtgggggcgggcggcatcggctgcgagctcctcaagaatctcgtgctcaccggtttctcccacatcgacctgattgatctggatactattgatgtaagcaacctcaacagacagtttttgtttcaaaagaaacatgttggaagatcaaaggcacaggttgccaaggaaagtgtactgcagttttacccgaaagctaatatcgttgcctaccatgacagcatcatgaaccctgactataatgtggaatttttccgacagtttatactggttatgaatgctttagataacagagccacccttacgatagcacccgggatcctctagat

SEQ ID NO: 446862 - DNA, 430 bp, Homo sapiens
ttgtccagcaaccttctctttactgatgaatggaaccaggaaagggttgccattgtcagtgagtggaattgagattccggtgtatacaactgagtctccggtgcctttgtttaggctggagtgagttcctagaagctggtgattcttggtgttcttgtcagactcattactggaccagaggagctgatgatgagaccccaccccctacttaacccacctccatgctactgtgaggtcctagctgactggtctttccctcagcaacctcttgttctagtcgaaagtctatagtattataaacacgtgaaagtattgttctgaaagtaatgcttcaaaatagtcaatttgtggagaaacttgttaaattgtttaaattattggcaggatgacccatctgcaatggattttgtcacctctgctgcaaacctca

SEQ ID NO: 446863 - DNA, 482 bp, Homo sapiens
agggaacattattcctgctattgctactactaatgcagtaattgctgggttgatagtattggaaggattgaagattttatcaggaaaaatagaccagtgcagaacagtgagtatttctgtttgcatttttatgcaaccccccttaaaaaaatcattaattaaaagtacattaaacagataatttttaaaatgaaaacaataaaattggtttaaagcaatggaaaagtaatttttctggttaccaagtgagtgtgtgtttaagcttcctggaaattgcaacaaaaaggaaaaattaagaagttgcttttgcttttaacatttccaattttactgaattcttcgaagaattcattgtgcggtccttatactaagaagatgtttcaactgtttttcaattctgagagtgctatatgggttttaaaatttgcttggtcattttatagtcccctgttcagtcattctcctattgagtcattcttttc

SEQ ID NO: 446864 - DNA, 2683 bp, Homo sapiens
ctagggacaaatgggtccagggtggccctttgattgtggtcccgggtgcggattggcagggcctccgccgcggctcgtggttgtcccgccatggcactgtcgcgggggctgccccgggagctggctgaggcggtggccgggggccgggtgctggtggtgggggcgggcggcatcggctgcgagctcctcaagaatctcgtgctcaccggtttctcccacatcgacctgattgatctggatactattgatgtaagcaacctcaacagacagtttttgtttcaaaagaaacatgttggaagatcaaaggcacaggttgccaaggaaagtgtactgcagttttacccgaaagctaatatcgttgcctaccatgacagcatcatgaaccctgactataatgtggaatttttccgacagtttatactggttatgaatgctttagataacagagctgcccgaaaccatgttaatagaatgtgcctggcagctgatgttcctcttattgaaagtggaacagctgggtatcttggacaagtaactactatcaaaaagggtgtgaccgagtgttatgagtgtcatcctaagccgacccagagaacctttcctggctgtacaattcgtaacacaccttcagaacctatacattgcatcgtttgggcaaagtacttgttcaaccagttgtttggggaagaagatgctgatcaagaagtatctcctgacagagctgaccctgaagctgcctgggaaccaacggaagccgaagccagagctagagcatctaatgaagatggtgacattaaacgtatttctactaaggaatgggctaaatcaactggatatgatccagttaaactttttaccaagctttttaaagatgacatcaggtatctgttgacaatggacaaactatggcggaaaaggaaacctccagttccgttggactgggctgaagtacaaagtcaaggagaagaaacgaatgcatcagatcaacagaatgaaccccagttaggcctgaaagaccagcaggttctagatgtaaagagctatgcacgtcttttttcaaagagcatcgagactttgagagttcatttagcagaaaagggggatggagctgagctcatatgggataaggatgacccatctgcaatggattttgtcacctctgctgcaaacctcaggatgcatattttcagtatgaatatgaagagtagatttgatatcaaatcaatggcagggaacattattcctgctattgctactactaatgcagtaattgctgggttgatagtattggaaggattgaagattttatcaggaaaaatagaccagtgcagaacaatttttttgaataaacaaccaaacccaagaaagaagcttcttgtgccttgtgcactggatcctcccaaccccaattgttatgtatgtgccagcaagccagaggtgactgtgcggctgaatgtccataaagtgactgttctcaccttacaagacaagatagtgaaagaaaaatttgctatggtagcaccagatgtccaaattgaagatgggaaaggaacaatcctaatatcttccgaagagggagagacggaagctaataatcacaagaagttgtcagaatttggaattagaaatggcagccggcttcaagcagatgacttcctccaggactatactttattgatcaacatccttcatagtgaagacctaggaaaggacgttgaatttgaagttgttggtgatgccccggaaaaagtggggcccaaacaagctgaagatgctgccaaaagcataaccaatggcagtgatgatggagctcagccctccacctccacagctcaagagcaagatgacgttctcatagttgattcggatgaagaagattcttcaaataatgccgacgtcagtgaagaagagagaagccgcaagaggaaattagatgagaaagagaatctcagtgcaaagaggtcacgtatagaacagaaggaagagcttgatgatgtcatagcattagattgaacagaaatgcctctaaacagaaccctcttactatttagtttatctgggcagaaccagattgttatgtcctttgttccaaagggaaaaaattgacagcagtgacttgaaaatgattctgctccctttgaaagcattcattttgctagaactgttagacacattgcagtatgctgtattgaaagtaggaatatagttttaaaaaccctttgaacaaagtgtgtgcataaccagtcatgagataaaacaacacaatgcatgttgcctttttaatgtaaatacccttaggtatcattaatagtttcaaaatattgtggtttagtaaagttgatacctggttataaatattatgcctttatttttggctagaagaagaattatttttagcctagatctaaccattttcatactcttaactgattgaaacagattcaaagaagtatcgagtgctatgcattgaaacttgtttttaaatgttagatggcactatgtatattaatgtaaaacaatgttaatttactcaagttttcagtttgtaccgcctggtatgtctgtgtaagaagccaatttttgtgtattgttacagtttcaggttatttatattcgatgttttgtaaaactcaaataacgactatacttatggaccaaataaatggcatctgcattcttgtta

SEQ ID NO: 446865 - DNA, 2926 bp, Homo sapiens
  misc_feature (2857)..(2857): n is a, c, g, or t
accaggccgcccttcccccacccgcttccggccgcggctcggttctcccgcctccgcctccgccgcggctcgtggttgtcccgccatggcactgtcgcgggggctgccccgggagctggctgaggcggtggccgggggccgggtgctggtggtgggggcgggcggcatcggctgcgagctcctcaagaatctcgtgctcaccggtttctcccacatcgacctgattgatctggatactattgatgtaagcaacctcaacagacagtttttgtttcaaaagaaacatgttggaagatcaaaggcacaggttgccaaggaaagtgtactgcagttttacccgaaagctaatatcgttgcctaccatgacagcatcatgaaccctgactataatgtggaatttttccgacagtttatactggttatgaatgctttagataacagagctgcccgaaaccatgttaatagaatgtgcctggcagctgatgttcctcttattgaaagtggaacagctgggtatcttggacaagtaactactatcaaaaagggtgtgaccgagtgttatgagtgtcatcctaagccgacccagagaacctttcctggctgtacaattcgtaacacaccttcagaacctatacattgcatcgtttgggcaaagtacttgttcaaccagttgtttggggaagaagatgctgatcaagaagtatctcctgacagagctgaccctgaagctgcctgggaaccaacggaagccgaagccagagctagagcatctaatgaagatggtgacattaaacgtatttctactaaggaatgggctaaatcaactggatatgatccagttaaactttttaccaagctttttaaagatgacatcaggtatctgttgacaatggacaaactatggcggaaaaggaaacctccagttccgttggactgggctgaagtacaaagtcaaggagaagaaacgaatgcatcagatcaacagaatgaaccccagttaggcctgaaagaccagcaggttctagatgtaaagagctatgcacgtcttttttcaaagagcatcgagactttgagagttcatttagcagaaaagggggatggagctgagctcatatgggataaggatgacccatctgcaatggattttgtcacctctgctgcaaacctcaggatgcatattttcagtatgaatatgaagagtagatttgatatcaaatcaatggcagggaacattattcctgctattgctactactaatgcagtaattgctgggttgatagtattggaaggattgaagattttatcaggaaaaatagaccagtgcagaacaatttttttgaataaacaaccaaacccaagaaagaagcttcttgtgccttgtgcactggatcctcccaaccccaattgttatgtatgtgccagcaagccagaggtgactgtgcggctgaatgtccataaagtgactgttctcaccttacaagacaagatagtgaaagaaaaatttgctatggtagcaccagatgtccaaattgaagatgggaaaggaacaatcctaatatcttccgaagagggagagacggaagctaataatcacaagaagttgtcagaatttggaattagaaatggcagccggcttcaagcagatgacttcctccaggactatactttattgatcaacatccttcatagtgaagacctaggaaaggacgttgaatttgaagttgttggtgatgccccggaaaaagtggggcccaaacaagctgaagatgctgccaaaagcataaccaatggcagtgatgatggagctcagccctccacctccacagctcaagagcaagatgacgttctcatagttgattcggatgaagaagattcttcaaataatgccgacgtcagtgaagaagagagaagccgcaagaggaaattagatgagaaagagaatctcagtgcaaagaggtcacgtatagaacagaaggaagagcttgatgatgtcatagcattagattgaacagaaatgcctctaaacagaaccctcttactatttagtttatctgggcagaaccagattgttatgtcctttgttccaaagggaaaaaattgacagcagtgacttgaaaatgattctgctccctttgaaagcattcattttgctagaactgttagacacattgcagtatgctgtattgaaagtaggaatatagttttaaaaaccctttgaacaaagtgtgtgcataaccagtcatgagataaaacaacacaatgcatgttgcctttttaatgtaaatacccttaggtatcattaatagtttcaaaatattgtggtttagtaaagttgatacctggttataaatattatgcctttatttttggctagaagaagaattatttttagcctagatctaaccattttcatactcttaactgattgaaacagattcaaagaagtatcgagtgctatgcattgaaacttgtttttaaatgttagatggcactatgtatattaatgtaaaacaatgttaatttactcaagttttcagtttgtaccgcctggtatgtctgtgtaagaagccaatttttgtgtattgttacagtttcaggttatttatattcgatgttttgtaaaactcaaataacgactatacttatggaccaaataaatggcatctgcattcttgttaaaaaaaaaacaaaacaaaaaaaaaaaaaaaaaagaaaaaaagaaaaaaattgttggccgcttgggcccagtgaactttaaactctgaggaagtttatgcattgggccgaattttgggctactttggccaattcgcctttagggaggggaatacaaatacctgggccgggtttacaacgngggaatgggaaaacctggggttcccaaaataacgcttggagaaaatccccttttgcggtgggggaaaaa

SEQ ID NO: 446866 - DNA, 2772 bp, Homo sapiens
accaggccgcccttcccccacccgcttccggccgcggctcggttctcccgcctccgcctccgccgcggctcgtggttgtcccgccatggcactgtcgcgggggctgccccgggagctggctgaggcggtggccgggggccgggtgctggtggtgggggcgggcggcatcggctgcgagctcctcaagaatctcgtgctcaccggtttctcccacatcgacctgccaccagggtctcactattttgcttaggctggtcttgaaggtctgggctcaagcgattctctcactttgtcctcccaaagtgttgggattacagattgatctggatactattgatgtaagcaacctcaacagacagtttttgtttcaaaagaaacatgttggaagatcaaaggcacaggttgccaaggaaagtgtactgcagttttacccgaaagctaatatcgttgcctaccatgacagcatcatgaaccctgactataatgtggaatttttccgacagtttatactggttatgaatgctttagataacagagctgcccgaaaccatgttaatagaatgtgcctggcagctgatgttcctcttattgaaagtggaacagctgggtatcttggacaagtaactactatcaaaaagggtgtgaccgagtgttatgagtgtcatcctaagccgacccagagaacctttcctggctgtacaattcgtaacacaccttcagaacctatacattgcatcgtttgggcaaagtacttgttcaaccagttgtttggggaagaagatgctgatcaagaagtatctcctgacagagctgaccctgaagctgcctgggaaccaacggaagccgaagccagagctagagcatctaatgaagatggtgacattaaacgtatttctactaaggaatgggctaaatcaactggatatgatccagttaaactttttaccaagctttttaaagatgacatcaggtatctgttgacaatggacaaactatggcggaaaaggaaacctccagttccgttggactgggctgaagtacaaagtcaaggagaagaaacgaatgcatcagatcaacagaatgaaccccagttaggcctgaaagaccagcaggttctagatgtaaagagctatgcacgtcttttttcaaagagcatcgagactttgagagttcatttagcagaaaagggggatggagctgagctcatatgggataaggatgacccatctgcaatggattttgtcacctctgctgcaaacctcaggatgcatattttcagtatgaatatgaagagtagatttgatatcaaatcaatggcagggaacattattcctgctattgctactactaatgcagtaattgctgggttgatagtattggaaggattgaagattttatcaggaaaaatagaccagtgcagaacaatttttttgaataaacaaccaaacccaagaaagaagcttcttgtgccttgtgcactggatcctcccaaccccaattgttatgtatgtgccagcaagccagaggtgactgtgcggctgaatgtccataaagtgactgttctcaccttacaagacaagatagtgaaagaaaaatttgctatggtagcaccagatgtccaaattgaagatgggaaaggaacaatcctaatatcttccgaagagggagagacggaagctaataatcacaagaagttgtcagaatttggaattagaaatggcagccggcttcaagcagatgacttcctccaggactatactttattgatcaacatccttcatagtgaagacctaggaaaggacgttgaatttgaagttgttggtgatgccccggaaaaagtggggcccaaacaagctgaagatgctgccaaaagcataaccaatggcagtgatgatggagctcagccctccacctccacagctcaagagcaagatgacgttctcatagttgattcggatgaagaagattcttcaaataatgccgacgtcagtgaagaagagagaagccgcaagaggaaattagatgagaaagagaatctcagtgcaaagaggtcacgtatagaacagaaggaagagcttgatgatgtcatagcattagattgaacagaaatgcctctaaacagaaccctcttactatttagtttatctgggcagaaccagattgttatgtcctttgttccaaagggaaaaaattgacagcagtgacttgaaaatgattctgctccctttgaaagcattcattttgctagaactgttagacacattgcagtatgctgtattgaaagtaggaatatagttttaaaaaccctttgaacaaagtgtgtgcataaccagtcatgagataaaacaacacaatgcatgttgcctttttaatgtaaatacccttaggtatcattaatagtttcaaaatattgtggtttagtaaagttgatacctggttataaatattatgcctttatttttggctagaagaagaattatttttagcctagatctaaccattttcatactcttaactgattgaaacagattcaaagaagtatcgagtgctatgcattgaaacttgtttttaaatgttagatggcactatgtatattaatgtaaaacaatgttaatttactcaagttttcagtttgtaccgcctggtatgtctgtgtaagaagccaatttttgtgtattgttacagtttcaggttatttatattcgatgttttgtaaaactcaaataacgactatacttatggaccaaataaatggcatctgcattcttgtta

SEQ ID NO: 446867 - DNA, 2488 bp, Homo sapiens
  misc_feature (25)..(26): n is a, c, g, or t
  misc_feature (37)..(37): n is a, c, g, or t
  misc_feature (43)..(43): n is a, c, g, or t
  misc_feature (46)..(46): n is a, c, g, or t
  misc_feature (49)..(49): n is a, c, g, or t
  misc_feature (51)..(51): n is a, c, g, or t
  misc_feature (53)..(54): n is a, c, g, or t
  misc_feature (62)..(62): n is a, c, g, or t
ctttttcctatgatgttaaaacccnngcaacctttgncggttngtnacntnannaaacctcngctcaacagacagtttttgtttcaaaagaaacatgttggaagatcaaaggcacaggttgccaaggaaagtgtactgcagttttacccgaaagctaatatcgttgcctaccatgacagcatcatgaaccctgactataatgtggaatttttccgacagtttatactggttatgaatgctttagataacagagctgcccgaaaccatgttaatagaatgtgcctggcagctgatgttcctcttattgaaagtggaacagctgggtatcttggacaagtaactactatcaaaaagggtgtgaccgagtgttatgagtgtcatcctaagccgacccagagaacctttcctggctgtacaattcgtaacacaccttcagaacctatacattgcatcgtttgggcaaagtacttgttcaaccagttgtttggggaagaagatgctgatcaagaagtatctcctgacagagctgaccctgaagctgcctgggaaccaacggaagccgaagccagagctagagcatctaatgaagatggtgacattaaacgtatttctactaaggaatgggctaaatcaactggatatgatccagttaaactttttaccaagctttttaaagatgacatcaggtatctgttgacaatggacaaactatggcggaaaaggaaacctccagttccgttggactgggctgaagtacaaagtcaaggagaagaaacgaatgcatcagatcaacagaatgaaccccagttaggcctgaaagaccagcaggttctagatgtaaagagctatgcacgtcttttttcaaagagcatcgagactttgagagttcatttagcagaaaagggggatggagctgagctcatatgggataaggatgacccatctgcaatggattttgtcacctctgctgcaaacctcaggatgcatattttcagtatgaatatgaagagtagatttgatatcaaatcaatggcagggaacattattcctgctattgctactactaatgcagtaattgctgggttgatagtattggaaggattgaagattttatcaggaaaaatagaccagtgcagaacaatttttttgaataaacaaccaaacccaagaaagaagcttcttgtgccttgtgcactggatcctcccaaccccaattgttatgtatgtgccagcaagccagaggtgactgtgcggctgaatgtccataaagtgactgttctcaccttacaagacaagatagtgaaagaaaaatttgctatggtagcaccagatgtccaaattgaagatgggaaaggaacaatcctaatatcttccgaagagggagagacggaagctaataatcacaagaagttgtcagaatttggaattagaaatggcagccggcttcaagcagatgacttcctccaggactatactttattgatcaacatccttcatagtgaagacctaggaaaggacgttgaatttgaagttgttggtgatgccccggaaaaagtggggcccaaacaagctgaagatgctgccaaaagcataaccaatggcagtgatgatggagctcagccctccacctccacagctcaagagcaagatgacgttctcatagttgattcggatgaagaagattcttcaaataatgccgacgtcagtgaagaagagagaagccgcaagaggaaattagatgagaaagagaatctcagtgcaaagaggtcacgtatagaacagaaggaagagcttgatgatgtcatagcattagattgaacagaaatgcctctaaacagaaccctcttactatttagtttatctgggcagaaccagattgttatgtcctttgttccaaagggaaaaaattgacagcagtgacttgaaaatgattctgctccctttgaaagcattcattttgctagaactgttagacacattgcagtatgctgtattgaaagtaggaatatagttttaaaaaccctttgaacaaagtgtgtgcataaccagtcatgagataaaacaacacaatgcatgttgcctttttaatgtaaatacccttaggtatcattaatagtttcaaaatattgtggtttagtaaagttgatacctggttataaatattatgcctttatttttggctagaagaagaattatttttagcctagatctaaccattttcatactcttaactgattgaaacagattcaaagaagtatcgagtgctatgcattgaaacttgtttttaaatgttagatggcactatgtatattaatgtaaaacaatgttaatttactcaagttttcagtttgtaccgcctggtatgtctgtgtaagaagccaatttttgtgtattgttacagtttcaggttatttatattcgatgttttgtaaaactcaaataacgactatacttatggaccaaataaatggcatctgcattcttgtta

SEQ ID NO: 446868 - DNA, 2586 bp, Homo sapiens
accaggccgcccttcccccacccgcttccggccgcggctcggttctcccgcctccgcctccgccgcggctcgtggttgtcccgccatggcactgtcgcgggggctgccccgggagctggctgaggcggtggccgggggccgggtgctggtggtgggggcgggcggcatcggctgcgagctcctcaagaatctcgtgctcaccggtttctcccacatcgacctgattgatctggatactattgatgtaagcaacctcaacagacagtttttgtttcaaaagaaacatgttggaagatcaaaggcacaggttgccaaggaaagtgtactgcagttttacccgaaagctaatatcgttgcctaccatgacagcatcatgaaccctgactataatgtggaatttttccgacagtttatactggttatgaatgctttagataacagagctgcccgaaaccatgttaatagaatgtgcctggcagctgatgttcctcttattgaaagtggaacagctgggtatcttggacaagtaactactatcaaaaagggtgtgaccgagtgttatgagtgtcatcctaagccgacccagagaacctttcctggctgtacaattcgtaacacaccttcagaacctatacattgcatcgtttgggcaaagtacttgttcaaccagttgtttggggaagaagatgctgatcaagaagtatctcctgacagagctgaccctgaagctgcctgggaaccaacggaagccgaagccagagctagagcatctaatgaagatggtgacattaaacgtatttctactaaggaatgggctaaatcaactggatatgatccagttaaactttttaccaagctttttaaagatgacatcaggtatctgttgacaatggacaaactatggcggaaaaggaaacctccagttccgttggactgggctgaagtacaaagtcaaggagaagaaacgaatgcatcagatcaacagaatgaaccccagttaggcctgaaagaccagcaggttctagatgtaaagagctatgcacgtcttttttcaaagagcatcgagactttgagagttcatttagcagaaaagggggatggagctgagctcatatgggataaggatgacccatctgcaatggattttgtcacctctgctgcaaacctcaggatgcatattttcagtatgaatatgaagagtagatttgatatcaaatcaatggcagggaacattattcctgctattgctactactaatgcagtaattgctgggttgatagtattggaaggattgaagattttatcaggaaaaatagaccagtgcagaacaatttttttgaataaacaaccaaacccaagaaagaagcttcttgtgccttgtgcactggatcctcccaaccccaattgttatgtatgtgccagcaagccagaggtgactgtgcggctgaatgtccataaagtgactgttctcaccttacaagacaagatagtgaaagaaaaatttgctatggtagcaccagatgtccaaattgaagatgggaaaggaacaatcctaatatcttccgaagagggagagacggaagctaataatcacaagaagttgtcagaatttggaattagaaatggcagccggcttcaagcagatgacttcctccaggactatactttattgatcaacatccttcatagtgaagacctaggaaaggacgttgaatttgaagttgttggtgatgccccggaaaaagtggggcccaaacaagctgaagatgctgccaaaagcataaccaatggcagtgatgatggagctcagccctccacctccacagctcaagagcaagatgacgttctcatagttgattcggatgaagaagattcttcaaataatgccgacgtcagtgaagaagagagaagccgcaagaggaaattagatgagaaagagaatctcagtgcaaagaggtcacgtatagaacagaaggaagagcttgatgatgtcatagcattagattgaacagaaatgcctctaaacagaaccctcttactatttagtttatctgggcagaaccagattgttatgtcctttgttccaaagggaaaaaattgacagcagtgacttgaaaatgattctgctccctttgaaagcattcattttgctagaactgttagacacattgcagtatgctgtattgaaagtaggaatatagttttaaaaaccctttgaacaaagtgtgtgcataaccagtcatgagataaaacaacacaatgcatgttgcctttttaatgtaaatacccttaggtatcattaatagtttcaaaatattgtggtttagtaaagttgatacctggttataaatattatgcctttatttttggctagaagaagaattaaatgttagatggcactatgtatattaatgtaaaacaatgttaatttactcaagttttcagtttgtaccgcctggtatgtctgtgtaagaagccaatttttgtgtattgttacagtttcaggttatttatattcgatgttttgtaaaactcaaataacgactatacttatggaccaaataaatggcatctgcattcttgtta

SEQ ID NO: 446869 - DNA, 2304 bp, Homo sapiens
aaagataggctagtacgaggctgggtgttaatcggccgaggctaaaatcggaacgatacagagaagattagcatggcccctgcgcaaggatgacacgcaaattcgtgaagcgttccatatttttaagtggaacagctgggtatcttggacaagtaactactatcaaaaagggtgtgaccgagtgttatgagtgtcatcctaagccgacccagagaacctttcctggctgtacaattcgtaacacaccttcagaacctatacattgcatcgtttgggcaaagtacttgttcaaccagttgtttggggaagaagatgctgatcaagaagtatctcctgacagagctgaccctgaagctgcctgggaaccaacggaagccgaagccagagctagagcatctaatgaagatggtgacattaaacgtatttctactaaggaatgggctaaatcaactggatatgatccagttaaactttttaccaagctttttaaagatgacatcaggtatctgttgacaatggacaaactatggcggaaaaggaaacctccagttccgttggactgggctgaagtacaaagtcaaggagaagaaacgaatgcatcagatcaacagaatgaaccccagttaggcctgaaagaccagcaggttctagatgtaaagagctatgcacgtcttttttcaaagagcatcgagactttgagagttcatttagcagaaaagggggatggagctgagctcatatgggataaggatgacccatctgcaatggattttgtcacctctgctgcaaacctcaggatgcatattttcagtatgaatatgaagagtagatttgatatcaaatcaatggcagggaacattattcctgctattgctactactaatgcagtaattgctgggttgatagtattggaaggattgaagattttatcaggaaaaatagaccagtgcagaacaatttttttgaataaacaaccaaacccaagaaagaagcttcttgtgccttgtgcactggatcctcccaaccccaattgttatgtatgtgccagcaagccagaggtgactgtgcggctgaatgtccataaagtgactgttctcaccttacaagacaagatagtgaaagaaaaatttgctatggtagcaccagatgtccaaattgaagatgggaaaggaacaatcctaatatcttccgaagagggagagacggaagctaataatcacaagaagttgtcagaatttggaattagaaatggcagccggcttcaagcagatgacttcctccaggactatactttattgatcaacatccttcatagtgaagacctaggaaaggacgttgaatttgaagttgttggtgatgccccggaaaaagtggggcccaaacaagctgaagatgctgccaaaagcataaccaatggcagtgatgatggagctcagccctccacctccacagctcaagagcaagatgacgttctcatagttgattcggatgaagaagattcttcaaataatgccgacgtcagtgaagaagagagaagccgcaagaggaaattagatgagaaagagaatctcagtgcaaagaggtcacgtatagaacagaaggaagagcttgatgatgtcatagcattagattgaacagaaatgcctctaaacagaaccctcttactatttagtttatctgggcagaaccagattgttatgtcctttgttccaaagggaaaaaattgacagcagtgacttgaaaatgattctgctccctttgaaagcattcattttgctagaactgttagacacattgcagtatgctgtattgaaagtaggaatatagttttaaaaaccctttgaacaaagtgtgtgcataaccagtcatgagataaaacaacacaatgcatgttgcctttttaatgtaaatacccttaggtatcattaatagtttcaaaatattgtggtttagtaaagttgatacctggttataaatattatgcctttatttttggctagaagaagaattatttttagcctagatctaaccattttcatactcttaactgattgaaacagattcaaagaagtatcgagtgctatgcattgaaacttgtttttaaatgttagatggcactatgtatattaatgtaaaacaatgttaatttactcaagttttcagtttgtaccgcctggtatgtctgtgtaagaagccaatttttgtgtattgttacagtttcaggttatttatattcgatgttttgtaaaactcaaataacgactatacttatggaccaaataaatggcatctgcattcttgtta

SEQ ID NO: 446870 - DNA, 2522 bp, Homo sapiens
accaggccgcccttcccccacccgcttccggccgcggctcggttctcccgcctccgcctccgccgcggctcgtggttgtcccgccatggcactgtcgcgggggctgccccgggagctggctgaggcggtggccgggggccgggtgctggtggtgggggcgggcggcatcggctgcgagctcctcaagaatctcgtgctcaccggtttctcccacatcgacctgattgatctggatactattgatgtaagcaacctcaacagacagtttttgtttcaaaagaaacatgttggaagatcaaaggcacaggttgccaaggaaagtgtactgcagttttacccgaaagctaatatcgttgcctaccatgacagcatcatgaaccctgactataatgtggaatttttccgacagtttatactggttatgaatgctttagataacagagctgcccgaaaccatgttaatagaatgtgcctggcagctgatgttcctcttattgaaagtggaacagctgggtatcttggacaagtaactactatcaaaaagggtgtgaccgagtgttatgagtgtcatcctaagccgacccagagaacctttcctggctgtacaattcgtaacacaccttcagaacctatacattgcatcgtttgggcaaagtacttgttcaaccagttgtttggggaagaagatgctgatcaagaagtatctcctgacagagctgaccctgaagctgcctgggaaccaacggaagccgaagccagagctagagcatctaatgaagatggtgacattaaacgtatttctactaaggaatgggctaaatcaactggatatgatccagttaaactttttaccaagctttttaaagatgacatcaggtatctgttgacaatggacaaactatggcggaaaaggaaacctccagttccgttggactgggctgaagtacaaagtcaaggagaagaaacgaatgcatcagatcaacagaatgaaccccagttaggcctgaaagaccagcaggttctagatgtaaagagctatgcacgtcttttttcaaagagcatcgagactttgagagttcatttagcagaaaagggggatggagctgagctcatatgggataaggatgacccatctgcaatggattttgtcacctctgctgcaaacctcaggatgcatattttcagtatgaatatgaagagtagatttgatatcaaatcaatggcagggaacattattcctgctattgctactactaatgcagtaattgctgggttgatagtattggaaggattgaagattttatcaggaaaaatagaccagtgcagaacaatagtgaaagaaaaatttgctatggtagcaccagatgtccaaattgaagatgggaaaggaacaatcctaatatcttccgaagagggagagacggaagctaataatcacaagaagttgtcagaatttggaattagaaatggcagccggcttcaagcagatgacttcctccaggactatactttattgatcaacatccttcatagtgaagacctaggaaaggacgttgaatttgaagttgttggtgatgccccggaaaaagtggggcccaaacaagctgaagatgctgccaaaagcataaccaatggcagtgatgatggagctcagccctccacctccacagctcaagagcaagatgacgttctcatagttgattcggatgaagaagattcttcaaataatgccgacgtcagtgaagaagagagaagccgcaagaggaaattagatgagaaagagaatctcagtgcaaagaggtcacgtatagaacagaaggaagagcttgatgatgtcatagcattagattgaacagaaatgcctctaaacagaaccctcttactatttagtttatctgggcagaaccagattgttatgtcctttgttccaaagggaaaaaattgacagcagtgacttgaaaatgattctgctccctttgaaagcattcattttgctagaactgttagacacattgcagtatgctgtattgaaagtaggaatatagttttaaaaaccctttgaacaaagtgtgtgcataaccagtcatgagataaaacaacacaatgcatgttgcctttttaatgtaaatacccttaggtatcattaatagtttcaaaatattgtggtttagtaaagttgatacctggttataaatattatgcctttatttttggctagaagaagaattatttttagcctagatctaaccattttcatactcttaactgattgaaacagattcaaagaagtatcgagtgctatgcattgaaacttgtttttaaatgttagatggcactatgtatattaatgtaaaacaatgttaatttactcaagttttcagtttgtaccgcctggtatgtctgtgtaagaagccaatttttgtgtattgttacagtttcaggttatttatattcgatgttttgtaaaactcaaataacgactatacttatggaccaaataaatggcatctgcattcttgtta

SEQ ID NO: 446871 - DNA, 2139 bp, Homo sapiens
accaggccgcccttcccccacccgcttccggccgcggctcggttctcccgcctccgcctccgccgcggctcgtggttgtcccgccatggcactgtcgcgggggctgccccgggagctggctgaggcggtggccgggggccgggtgctggtggtgggggcgggcggcatcggctgcgagctcctcaagaatctcgtgctcaccggtttctcccacatcgacctgattgatctggatactattgatgtaagcaacctcaacagacagtttttgtttcaaaagaaacatgttggaagatcaaaggcacaggttgccaaggaaagtgtactgcagttttacccgaaagctaatatcgttgcctaccatgacagcatcatgaaccctgactataatgtggaatttttccgacagtttatactggttatgaatgctttagataacagagctgcccgaaaccatgttaatagaatgtgcctggcagctgatgttcctcttattgaaagtggaacagctgggtatcttggacaagtaactactatcaaaaagggtgtgaccgagtgttatgagtgtcatcctaagccgacccagagaacctttcctggctgtacaattcgtaacacaccttcagaacctatacattgcatcgtttgggcaaagtacttgttcaaccagttgtttggggaagaagatgctgatcaagaagtatctcctgacagagctgaccctgaagctgcctgggaaccaacggaagccgaagccagagctagagcatctaatgaagatggtgacattaaacgtatttctactaaggaatgggctaaatcaactggatatgatccagttaaactttttaccaagctttttaaagatgacatcaggtatctgttgacaatggacaaactatggcggaaaaggaaacctccagttccgttggactgggctgaagtacaaagtcaaggagaagaaacgaatgcatcagatcaacagaatgaaccccagttaggcctgaaagaccagcaggttctagatgtaaagagctatgcacgtcttttttcaaagagcatcgagactttgagagttcatttagcagaaaagggggatggagctgagctcatatgggataaggatgacccatctgcaatggattttgtcacctctgctgcaaacctcaggatgcatattttcagtatgaatatgaagagtagatttgatatcaaatcaatggcagggaacattattcctgctattgctactactaatgcagtaattgctgggttgatagtattggaaggattgaagattttatcaggaaaaatagaccagtgcagaacaatttttttgaataaacaaccaaacccaagaaagaagcttcttgtgccttgtgcactggatcctcccaaccccaattgttatgtatgtgccagcaagccagaggtgactgtgcggctgaatgtccataaagtgactgttctcaccttacaagacaagatagtgaaagaaaaatttgctatggtagcaccagatgtccaaattgaagatgggaaaggaacaatcctaatatcttccgaagagggagagacggaagctaataatcacaagaagttgtcagaatttggaattagaaatggcagccggcttcaagcagatgacttcctccaggactatactttattgatcaacatccttcatagtgaagacctaggaaaggacgttgaatttgaagttgttggtgatgccccggaaaaagtggggcccaaacaagctgaagatgctgccaaaagcataaccaatggcagtgatgatggagctcagccctccacctccacagctcaagagcaagatgacgttctcatagttgattcggatgaagaagattcttcaaataatgccgacgtcagtgaagaagagagaagccgcaagaggaaattagatgagaaagagaatctcagtgcaaagaggtcacgtatagaacagaaggaagagcttgatgatgtcatagcattagattgaacagaaatgcctctaaacagaaccctcttactatttagtttatctgggcagaaccagattgttatgtcctttgtttcccttggtcacaaaggacataacaatctggttctgcccaaatgaactaaatagta

SEQ ID NO: 446872 - DNA, 1554 bp, Homo sapiens
ctagggacaaatgggtccagggtggccctttgattgtggtcccgggtgcggattggcagggcctccgccgcggctcgtggttgtcccgccatggcactgtcgcgggggctgccccgggagctggctgaggcggtggccgggggccgggtgctggtggtgggggcgggcggcatcggctgcgagctcctcaagaatctcgtgctcaccggtttctcccacatcgacctgattgatctggatactattgatgtaagcaacctcaacagacagtttttgtttcaaaagaaacatgttggaagatcaaaggcacagatttttttgaataaacaaccaaacccaagaaagaagcttcttgtgccttgtgcactggatcctcccaaccccaattgttatgtatgtgccagcaagccagaggtgactgtgcggctgaatgtccataaagtgactgttctcaccttacaagacaagatagtgaaagaaaaatttgctatggtagcaccagatgtccaaattgaagatgggaaaggaacaatcctaatatcttccgaagagggagagacggaagtgaagacctaggaaaggacgttgaatttgaagttgttggtgatgccccggaaaaagtggggcccaaacaagctgaagatgctgccaaaagcataaccaatggcagtgatgatggagctcagccctccacctccacagctcaagagcaagatgacgttctcatagttgattcggatgaagaagattcttcaaataatgccgacgtcagtgaagaagagagaagccgcaagaggaaattagatgagaaagagaatctcagtgcaaagaggtcacgtatagaacagaaggaagagcttgatgatgtcatagcattagattgaacagaaatgcctctaaacagaaccctcttactatttagtttatctgggcagaaccagattgttatgtcctttgttccaaagggaaaaaattgacagcagtgacttgaaaatgattctgctccctttgaaagcattcattttgctagaactgttagacacattgcagtatgctgtattgaaagtaggaatatagttttaaaaaccctttgaacaaagtgtgtgcataaccagtcatgagataaaacaacacaatgcatgttgcctttttaatgtaaatacccttaggtatcattaatagtttcaaaatattgtggtttagtaaagttgatacctggttataaatattatgcctttatttttggctagaagaagaattatttttagcctagatctaaccattttcatactcttaactgattgaaacagattcaaagaagtatcgagtgctatgcattgaaacttgtttttaaatgttagatggcactatgtatattaatgtaaaacaatgttaatttactcaagttttcagtttgtaccgcctggtatgtctgtgtaagaagccaatttttgtgtattgttacagtttcaggttatttatattcgatgttttgtaaaactcaaataacgactatacttatggaccaaataaatggcatctgcattcttgtta

SEQ ID NO: 446873 - DNA, 1429 bp, Homo sapiens
accaggccgcccttcccccacccgcttccggccgcggctcggttctcccgcctccgcctccgccgcggctcgtggttgtcccgccatggcactgtcgcgggggctgccccgggagctggctgaggcggtggccgggggccgggtgctggtggtgggggcgggcggcatcggctgcgagctcctcaagaatctcgtgctcaccggtttctcccacatcgacctgattgatctggatactattgatgtaagcaacctcaacagacagtttttgtttcaaaagaaacatgttggaagatcaaaggcacaggttgccaaggaaagtgtactgcagttttacccgaaagctaatatcgttgcctaccatgacagcatcatgaaccctgactataatgtggaatttttccgacagtttatactggttatgaatgctttagataacagagctgcccgaaaccatgttaatagaatgtgcctggcagctgatgttcctcttattgaaagtggaacagctgggtatcttggacaagtaactactatcaaaaagggtgtgaccgagtgttatgagtgtcatcctaagccgacccagagaacctttcctggctgtacaattcgtaacacaccttcagaacctatacattgcatcgtttgggcaaagtacttgttcaaccagttgtttggggaagaagatgctgatcaagaagtatctcctgacagagctgaccctgaagctgcctgggaaccaacggaagccgaagccagagctagagcatctaatgaagatggtgacattaaacgtatttctactaaggaatgggctaaatcaactggatatgatccagttaaactttttaccaagctttttaaagatgacatcaggtatctgttgacaatggacaaactatggcggaaaaggaaacctccagttccgttggactgggctgaagtacaaagtcaaggagaagaaacgaatgcatcagatcaacagaatgaaccccagttaggcctgaaagaccagcaggttctagatgtaaagagctatgcacgtcttttttcaaagagcatcgagactttgagagttcatttagcagaaaagggggatggagctgagctcatatgggataaggatgacccatctggcaaatggatttgtccacctctgtgaaacctcaaggatggctatttgcagtattgaatgtgacagaggtgcttgggtttcgatccatgggcgggaacattattccgggtatgggtgtagtatggcgcactgccggtggaatctcggacgggtgcagatgttcggagaagagaccgggagacattttgaatacaacaacgacaaaatcgtgctgtgagggcccacccagtgtttgtccacaggtgggagtaaggggcccagagggaatggcaggggagacaccaggagacagag

SEQ ID NO: 446874 - DNA, 1023 bp, Homo sapiens
accaggccgcccttcccccacccgcttccggccgcggctcggttctcccgcctccgcctccgccgcggctcgtggttgtcccgccatggcactgtcgcgggggctgccccgggagctggctgaggcggtggccgggggccgggtgctggtggtgggggcgggcggcatcggctgcgagctcctcaagaatctcgtgctcaccggtttctcccacatcgacctgattgatctggatactattgatgtaagcaacctcaacagacagtttttgtttcaaaagaaacatgttggaagatcaaaggcacaggttgccaaggaaagtgtactgcagttttacccgaaagctaatatcgttgcctaccatgacagcatcatgaaccctgactataatgtggaatttttccgacagtttatactggttatgaatgctttagataacagagctgcccgaaaccatgttaatagaatgtgcctggcagctgatgttcctcttattgaaagtggaacagctgggtatcttggacaagtaactactatcaaaaagggtgtgaccgagtgttatgagtgtcatcctaagccgacccagagaacctttcctggctgtacaattcgtaacacaccttcagaacctatacattgcatcgtttgggcaaagtacttgttcaaccagttgtttggggaagaagatgctgatcaagaagtatctcctgacagagctgaccctgaagctgcctgggaaccaacggaagccgaagccagagctagagcatctaatgaagatggtgacattaaacgtatttctactaaggaatgggctaaatcaactggatatgatccagttaaactttttaccaagctttttaaagatgacatcaggtatctgttgacaatggacaaactatggcggaaaaggaaacctccagttccgttggactgggctgaagtacaaagtcaaggaaaggatttctgaatgctatcgagaccgtacaaaggttgccaggagtgtgtttacatcatagagat

SEQ ID NO: 446875 - DNA, 2164 bp, Homo sapiens
tttctttggatgctctccccaccccgccatctagatcccatctttagacctcagcttcactctggtctccttgcaacactccctccccgtgttcccactccctctagcatcttcatcttccgccacgcccttcacctgtcctcgacctccaccttcatacaactgcactgttcccttaaaagctttctccgatttcctccacctgccttcatccttattctccttatccctctaccacccagactcatacccaaccccacgcatggcccctagtgggagccttttcagttcttctctttctcttgagctccagccttaagtgctcagggtttgccttctgaccctacttcaaacactgctgatgtttcaaaacctttcattcccgactccagcgcgtggaatctaggacacccctttcccagtgatgctcacctcagaatcacctgagggtttttcagaatgcccaagcttctagatcgaagttgttagggatggacttgaacatctggcatactgttctgcagcttcacttctgctccctgaagctaagagatgtgttgtttgggatcgactctgccaccaacttgttagatgactttgattctgcccatacgggtttcacagaccatctgactttcctggtcccttcatccctcaggttgaggccccaggcttggcctcaccacaatgtggcacgaggctcggaagcatgagcggaagcttcgaggcatgatggtcgactacaagaagagggcggagcggagacgggagtattatgaaaagatcaagaaggacccagcccagttcctgcaggtacatggccgagcttgcaaggtgcacctggattctgcagtcgccctggccgctgagagccctgttaatatgatgccctggcagggggacaccaacaacatgattgaccgattcgatgtccgtgcccacctggaccacatccccgactacaccccccctctgctcaccaccatctccccagaacaggagtcggacgaacggaagtgtaactacgagcgctacagaggcctggtgcagaacgactttgccggcatctcagaggagcagtgcctgtaccagatctacattgatgagttgtacggaggcctccagagacccagcgaagatgagaagaagaagctggcagagaagaaggcttccatcggttatacctacgaggacctccagctcccgctccagctctcgctccagctcccgctctcgccgtggtgggggctactaccgttccggccgccacgcccgctcccggtcccgctcctggtcccgctcccgctcccgctcccggcgctattcccggtcccgtagccgtggccggcggcactcaggtgggggctcccgagacggacaccggtactcccgctcgcccgcccggcgtggtggttacgggccccggcgcagaagcaggagccgctcccactcaggggaccgctacaggcggggcggccggggcctcaggcaccacagcagtagccgcagccgcagcagctggtccctcagcccgtcccgcagtcgcagcctgactcgcagccgcagccatagccccagccccagccagagccgcagccgcagccgcagccgcagccagagcccctcgccatcacccgcaagagagaagctgaccaggccggccgcgtcccctgctgtgggcgagaagctgaaaaagaccgaacctgccgctggtaaagagacaggagctgccaaacccaagctgacgcctcaggagaagctgaaactgaggatgcagaaggcgctgaacaggcagttcaaggcggataagaaggcggcacaagaaaagatgatccagcaggagcatgagcggcaggagcgggaagacgagcttcgagccatggcccgcaagatccgcatgaaggagcgggaacgccgagagaaggagagagaagagtgggaacgccagtacagccggcagagccgctcaccctccccccgatacagtcgagaatacagctcttctcgaaggcgctcaaggtcccgatcccgaagcccccattaccgacattaggcagaagagtggggggtggggaggacaagggggtgggtaaggggctcaagctgtgatgctgctggttttatctctagtgaaataaagtcaaaagttatttaattcccgtca

SEQ ID NO: 446876 - DNA, 1052 bp, Homo sapiens
  misc_feature (7)..(8): n is a, c, g, or t
gcgcgannggggtttggggaggcggcgaccagccggttgaggccccaggcttggcctcaccacaatgtggcacgaggctcggaagcatgagcggaagcttcgaggcatgatggtcgactacaagaagagggcggagcggagacgggagtattatgaaaagatcaagaaggacccagcccagttcctgcaggtacatggccgagcttgcaaggtgcacctggattctgcagtcgccctggccgctgagagccctgttaatatgatgccctggcagggggacaccaacaacatgattgaccgattcgatgtccgtgcccacctggaccacatccccgactacaccccccctctgctcaccaccatctccccagaacaggagtcggacgaacggaagtgtaactacgagcgctacagaggcctggtgcagaacgactttgccggcatctcagaggagcagtgcctgtaccagatctacattgatgagttgtacggaggcctccagagacccagcgaagatgagaagaagaagctggcagagaagaaggcttccatcggttatacctacgaggacagcacggtggccgaggtagagaaggcggcagaaaagccagaggaggaggagtcagcggccgaggaggagagcaactcggacgaagatgaggtcatccccgacatcgacgtggaggtggacgtggatgaattgaaccaggagcaggtggcagatctcaacaaacaggccacgacttatggcatggccgacggtgacttcgtcaggatgctccggaaagacaaggaggaggcagaggccatcaagcatgccaaggctcttgaggaggagaaggccatgtactcgggacgccgctctcgacgccagcggagagagtttcgggagaagcggctgaggggtcgcaagatcagcccacccagctatgccttttaaaacaagggaaaaagtaatgaaccactaataaagcgatatcgccgtcggaggtacaggatcatgagttaccgcatccgtgctctccagctcactcatctcctgcgccgcgcgg

SEQ ID NO: 446877 - DNA, 225 bp, Homo sapiens
aggctgaggtgggtggatcaatcacctgaggtcaggagttcgagaccagcctgaccaacatggtgacacacatacgtacacacacacacacacagattgctttagtcacaaggtgattgcagcaattagaagtgctcattccggcatgggctggtgaggggcacagatggcagccactggactctctggaaatgtcccctcatttggagacaacccctgaagttc

SEQ ID NO: 446878 - DNA, 2214 bp, Homo sapiens
  misc_feature (1)..(1): n is a, c, g, or t
  misc_feature (26)..(26): n is a, c, g, or t
  misc_feature (48)..(49): n is a, c, g, or t
nattcggcactagggcgcgagcaagngttggggaggcggcgaccagcnngttgaggccccaggcttggcctcaccacaatgtggcacgaggctcggaagcatgagcggaagcttcgaggcatgatggtcgactacaagaagagggcggagcggagacgggagtattatgaaaagatcaagaaggacccagcccagttcctgcaggtacatggccgagcttgcaaggtgcacctggattctgcagtcgccctggccgctgagagccctgttaatatgatgccctggcagggggacaccaacaacatgattgaccgattcgatgtccgtgcccacctggaccacatccccgactacaccccccctctgctcaccaccatctccccagaacaggagtcggacgaacggaagtgtaactacgagcgctacagaggcctggtgcagaacgactttgccggcatctcagaggagcagtgcctgtaccagatctacattgatgagttgtacggaggcctccagagacccagcgaagatgagaagaagaagctggcagagaagaaggcttccatcggttatacctacgaggacagcacggtggccgaggtagagaaggcggcagaaaagccagaggaggaggagtcagcggccgaggaggagagcaactcggacgaagatgaggtcatccccgacatcgacgtggaggtggacgtggatgaattgaaccaggagcaggtggcagatctcaacaaacaggccacgacttatggcatggccgacggtgacttcgtcaggatgctccggaaagacaaggaggaggcagaggccatcaagcatgccaaggctcttgaggaggagaaggccatgtactcgggacgccgctctcgacgccagcggagagagtttcgggagaagcggctgaggggtcgcaagatcagcccacccagctatgcccgccgagacagccccacctatgacccctataagcggtcaccctcggagtccagctcagagtcccgctcccgctcccgctccccgaccccgggccgcgaggagaagatcacgttcatcaccagttttgggggcagcgatgaggaggcagccgcagccgctgctgccgcagcagcatcaggagtcaccacagggaagccccccgcacctccccagcctggcggccccgccccgggacgtaatgccagcgcccgccgccgctcctcctcctcctcctcctcctcttctgcctcgaggacctccagctcccgctccagctctcgctccagctcccgctctcgccgtggtgggggctactaccgttccggccgccacgcccgctcccggtcccgctcctggtcccgctcccgctcccgctcccggcgctattcccggtcccgtagccgtggccggcggcactcaggtgggggctcccgagacggacaccggtactcccgctcgcccgcccggcgtggtggttacgggccccggcgcagaagcaggagccgctcccactcaggggaccgctacaggcggggcggccggggcctcaggcaccacagcagtagccgcagccgcagcagctggtccctcagcccgtcccgcagtcgcagcctgactcgcagccgcagccatagccccagccccagccagagccgcagccgcagccgcagccgcagccagagcccctcgccatcacccgcaagagagaagctgaccaggccggccgcgtcccctgctgtgggcgagaagctgaaaaagaccgaacctgccgctggtaaagagacaggagctgccaaacccaagctgacgcctcaggagaagctgaaactgaggatgcagaaggcgctgaacaggcagttcaaggcggataagaaggcggcacaagaaaagatgatccagcaggagcatgagcggcaggagcgggaagacgagcttcgagccatggcccgcaagatccgcatgaaggagcgggaacgccgagagaaggagagagaagagtgggaacgccagtacagccggcagagccgctcaccctccccccgatacagtcgagaatacagctcttctcgaaggcgctcaaggtcccgatcccgaagcccccattaccgacattaggcagaagagtggggggtggggaggacaagggggtgggtaaggggctcaagctgtgatgctgctggttttatctctagtgaaataaagtcaaaagttatttaattcccgtca

SEQ ID NO: 446879 - DNA, 2027 bp, Homo sapiens
  misc_feature (7)..(8): n is a, c, g, or t
gcgcgannggggtttggggaggcggcgaccagccggttgaggccccaggcttggcctcaccacaatgtggcacgaggctcggaagcatgagcggaagcttcgaggcatgatggtcgactacaagaagagggcggagcggagacgggagtattatgaaaagatcaagaaggacccagcccagttcctgcagctccccagaacaggagtcggacgaacggaagtgtaactacgagcgctacagaggcctggtgcagaacgactttgccggcatctcagaggagcagtgcctgtaccagatctacattgatgagttgtacggaggcctccagagacccagcgaagatgagaagaagaagctggcagagaagaaggcttccatcggttatacctacgaggacagcacggtggccgaggtagagaaggcggcagaaaagccagaggaggaggagtcagcggccgaggaggagagcaactcggacgaagatgaggtcatccccgacatcgacgtggaggtggacgtggatgaattgaaccaggagcaggtggcagatctcaacaaacaggccacgacttatggcatggccgacggtgacttcgtcaggatgctccggaaagacaaggaggaggcagaggccatcaagcatgccaaggctcttgaggaggagaaggccatgtactcgggacgccgctctcgacgccagcggagagagtttcgggagaagcggctgaggggtcgcaagatcagcccacccagctatgcccgccgagacagccccacctatgacccctataagcggtcaccctcggagtccagctcagagtcccgctcccgctcccgctccccgaccccgggccgcgaggagaagatcacgttcatcaccagttttgggggcagcgatgaggaggcagccgcagccgctgctgccgcagcagcatcaggagtcaccacagggaagccccccgcacctccccagcctggcggccccgccccgggacgtaatgccagcgcccgccgccgctcctcctcctcctcctcctcctcttctgcctcgaggacctccagctcccgctccagctctcgctccagctcccgctctcgccgtggtgggggctactaccgttccggccgccacgcccgctcccggtcccgctcctggtcccgctcccgctcccgctcccggcgctattcccggtcccgtagccgtggccggcggcactcaggtgggggctcccgagacggacaccggtactcccgctcgcccgcccggcgtggtggttacgggccccggcgcagaagcaggagccgctcccactcaggggaccgctacaggcggggcggccggggcctcaggcaccacagcagtagccgcagccgcagcagctggtccctcagcccgtcccgcagtcgcagcctgactcgcagccgcagccatagccccagccccagccagagccgcagccgcagccgcagccgcagccagagcccctcgccatcacccgcaagagagaagctgaccaggccggccgcgtcccctgctgtgggcgagaagctgaaaaagaccgaacctgccgctggtaaagagacaggagctgccaaacccaagctgacgcctcaggagaagctgaaactgaggatgcagaaggcgctgaacaggcagttcaaggcggataagaaggcggcacaagaaaagatgatccagcaggagcatgagcggcaggagcgggaagacgagcttcgagccatggcccgcaagatccgcatgaaggagcgggaacgccgagagaaggagagagaagagtgggaacgccagtacagccggcagagccgctcaccctccccccgatacagtcgagaatacagctcttctcgaaggcgctcaaggtcccgatcccgaagcccccattaccgacattaggcagaagagtggggggtggggaggacaagggggtgggtaaggggctcaagctgtgatgctgctggttttatctctagtgaaataaagtcaaaagttatttaattcccgtca

SEQ ID NO: 446880 - DNA, 2725 bp, Homo sapiens
gcggcctttcatttccgcttccggtgcgggccgcgcgcgagcgcagcggtgggaggcggcgaccagccggttgaggccccaggcttggcctcaccacaatgtggcacgaggctcggaagcatgagcggaagcttcgaggcatgatggtcgactacaagaagagggcggagcggagacgggagtattatgaaaagatcaagaaggacccagcccagttcctgcaggtacatggccgagcttgcaaggtgcacctggattctgcagtcgccctggccgctgagagccctgttaatatgatgccctggcagggggacaccaacaacatgattgaccgattcgatgtccgtgcccacctggaccacatccccgactacaccccccctctgctcaccaccatctccccagaacaggagtcggacgaacggaagtgtaactacgagcgctacagaggcctggtgcagaacgactttgccggcatctcagaggagcagtgcctgtaccagatctacattgatgagttgtacggaggcctccagagacccagcgaagatgagaagaagaagctggcagagaagaaggcttccatcggttatacctacgaggacagcacggtggccgaggtagagaaggcggcagaaaagccagaggaggaggagtcagcggccgaggaggagagcaactcggacgaagatgaggtcatccccgacatcgacgtggaggtggacgtggatgaattgaaccaggagcaggtggcagatctcaacaaacaggccacgacttatggcatggccgacggtgacttcgtcaggatgctccggaaagacaaggaggaggcagaggccatcaagcatgccaaggctcttgaggaggagaaggccatgtactcgggacgccgctctcgacgccagcggagagagtttcgggagaagcggctgaggggtcgcaagatcagcccacccagctatgcccgccgagacagccccacctatgacccctataagcggtcaccctcggagtccagctcagagtcccgctcccgctcccgctccccgaccccgggccgcgaggagaagatcacgttcatcaccagttttgggggcagcgatgaggaggcagccgcagccgctgctgccgcagcagcatcaggagtcaccacagggaagccccccgcacctccccagcctggcggccccgccccgggacgtaatgccagcgcccgccgccgctcctcctcctcctcctcctcctcttctgcctcgaggacctccagctcccgctccagctctcgctccagctcccgctctcgccgtggtgggggctactaccgttccggccgccacgcccgctcccggtcccgctcctggtcccgctcccgctcccgctcccggcgctattcccggtcccgtagccgtggccggcggcactcaggtgggggctcccgagacggacaccggtactcccgctcgcccgcccggcgtggtggttacgggccccggcgcagaagcaggagccgctcccactcaggggaccgctacaggcggggcggccggggcctcaggcaccacagcagtagccgcagccgcagcagctggtccctcagcccgtcccgcagtcgcagcctgactcgcagccgcagccatagccccagccccagccagagccgcagccgcagccgcagccgcagccagagcccctcgccatcacccgcaagagagaagctgaccaggccggccgcgtcccctgctgtgggcgagaagctgaaaaagaccgaacctgccgctggtaaagagacaggagctgccaaacccaagctgacgcctcaggagaagctgaaactgaggatgcagaaggcgctgaacaggcagttcaaggcggataagaaggcggcacaagaaaagatgatccagcaggagcatgagcggcaggagcgggaagacgagcttcgagccatggcccgcaagatccgcatgaaggagcgggaacgccgagagaaggagagagaagagtgggaacgccagtacagccggcagagccgctcaccctccccccgatacagtcgagaatacagctcttctcgaaggcgctcaaggtcccgatcccgaagcccccattaccgacattaggcagaagagtggggggtggggaggacaagggggtgggtaaggggctcaagctgtgatgctgctggttttatctctagtgaaataaagtcaaaagttatttaattcccgtcaaaaacaaaaacagagaaagagaacaaaaacaaaaaagaaacacaaaaaagagagaacaaaagaaacaaacagaaaagagcgaagaaaaacacaagaagaaaaagagaaacagaagacgcaggggaggcgggacagcgagggcgcggcggggggggggggggaggaaagccaaggtgggagaggacggggagaccggagcgggcgcaagacggacaacgaggacgaagacgacgcgcgccacgaggagaaagaggagagcacgagagagagcagcgtgggcggacggaacaacccccggagggaagaacaagcccgcgcgcgaggaagcaaccagccgcgggcgggggacgagagacggcacgacgacgaggagagagcacgcagcaggcgccagggcgagccccacgctcaaggggggggctcagccaagaggcgggcgacatgagagcaaggagaccccgagcgggagggaggtggcccggcgcaggggg

SEQ ID NO: 446881 - DNA, 3084 bp, Homo sapiens
gcggcctttcatttccgcttccggtgcgggccgcgcgcgagcgcagcggtgggaggcggcgaccagccggttgaggccccaggcttggcctcaccacaatgtggcacgaggctcggaagcatgagcggaagcttcgaggcatgatggtcgactacaagaagagggcggagcggagacgggagtattatgaaaagatcaagaaggacccagcccagttcctgcaggtacatggccgagcttgcaaggtgcacctggattctgcagtcgccctggccgctgagagccctgttaatatgatgccctggcagggggacaccaacaacatgattgaccgattcgatgtccgtgcccacctggaccacatccccgactacaccccccctctgctcaccaccatctccccagaacaggagtcggacgaacggaagtgtaactacgagcgctacagaggcctggtgcagaacgactttgccggcatctcagaggagcagtgcctgtaccagatctacattgatgagttgtacggaggcctccagagacccagcgaagatgagaagaagaagctggcagagaagaaggcttccatcggttatacctacgaggacagcacggtggccgaggtagagaaggcggcagaaaagccagaggaggaggagtcagcggccgaggaggagagcaactcggacgaagatgaggtcatccccgacatcgacgtggaggtggacgtggatgaattgaaccaggagcaggtggcagatctcaacaaacaggccacgacttatggcatggccgacggtgacttcgtcaggatgctccggaaagacaaggaggaggcagaggccatcaagcatgccaaggctcttgaggaggagaaggccatgtactcgggacgccgctctcgacgccagcggagagagtttcgggagaagcggctgaggggtcgcaagatcagcccacccagctatgcccgccgagacagccccacctatgacccctataagcggtcaccctcggagtccagctcagagtcccgctcccgctcccgctccccgaccccgggccgcgaggagaagatcacgttcatcaccagttttgggggcagcgatgaggaggcagccgcagccgctgctgccgcagcagcatcaggagtcaccacagggaagccccccgcacctccccagcctggcggccccgccccgggacgtaatgccagcgcccgccgccgctcctcctcctcctcctcctcctcttctgcctcgaggacctccagctcccgctccagctctcgctccagctcccgctctcgccgtggtgggggctactaccgttccggccgccacgcccgctcccggtcccgctcctggtcccgctcccgctcccgctcccggcgctattcccggtcccgtagccgtggccggcggcactcaggtgggggctcccgagacggacaccggtactcccgctcgcccgcccggcgtggtggttacgggccccggcgcagaagcaggagccgctcccactcaggggaccgctacaggcggggcggccggggcctcaggcaccacagcagtagccgcagccgcagcagctggtccctcagcccgtcccgcagtcgcagcctgactcgcagccgcagccatagccccagccccagccagagccgcagccgcagccgcagccgcagccagagcccctcgccatcacccgcaagagagaagctgaccaggccggccgcgtcccctgctgtgggcgagaagctgaaaaagaccgaacctgccgctggtaaagagacaggagctgccaaacccaagctgacgcctcaggagaagctgaaactgaggatgcagaaggcgctgaacaggcagttcaaggcggataagaaggcggcacaagaaaagatgatccagcaggagcatgagcggcaggtgaagtgggaaagggagggctggggtgacgggtgggtgctggcctggccacgtcctcatagccctgtctgctgcaggagcgggaagacgagcttcgagccatggcccgcaagatccgcatgaagtaagaccttgcccctccctgtcccatggccacacctcctggcctgcctggccttcccaccatgggctgctggctcaagccctgcccagctccctgtgggtggatgaaaggcagagatccctgcctggccctcggggctgtgcccagctgcctctcttgctcctctccctgaatttcctcccaccatttcgacctgcctcccgccaccgcgacctcctcccagctcttccagcctccaagtgccagtcacctttgctgtttttttggcctggcaagctgttcctgataccccttccccactcacccaccgccatgggtctttctcctgtcccagcctcagtttgcttatctcctaaatggagatacagtcactgtcccacctcacaggctgttgggaggatttgacaagatcaaggccaggcacggaggaggcacccagtagacgtagccattgggttgccaagcctggccactgtgacggagaccatttcaacactcactgtgtgcaggtgccccagtgcggcaggaaatgatgggactatcctgcctccctctgttccccaggctttcctaggaaggggctgggattccagtcagccccgccagctggggtccctctgaacctggggctccctttccaagcggggattggtggcagtaccggcccccttggtttactgtcttcctcggagtagggtgttggaagcacctgccctccctgagttcagtgtgtccagtgttcccggccagatgctcatgccatgccttcgcagggagcgggaacgccgagagaaggagagagaagagtgggaacgccagtacagccggcagagccgctcaccctccccccgatacagtcgagaatacagctcttctcgaaggcgctcaaggtcccgatcccgaagcccccattaccgacattaggcagaagagtggggggtggggaggacaagggggtgggtaaggggctcaagctgtgatgctgctggttttatctctagtgaaataaagtcaaaagttatttaattcccgtca

SEQ ID NO: 446882 - DNA, 804 bp, Homo sapiens
ggatccggacccagggtggggtgcggttggggtccctggagcctcacagtcctcctcccgccctgctgcatccccaggagccgctcccactcaggggaccgctacaggcggggcggccggggcctcaggcaccacagcagtagccgcagccgcagcagctggtccctcagcccgtcccgcagtcgcagcctgactcgcagccgcagccatagccccagccccagccagagccgcagccgcagccgcagccgcagccagagcccctcgccatcacccgcaagagagaagctgaccaggccggccgcgtcccctgctgtgggcgagaagctgaaaaagaccgaacctgccgctggtaaagagacaggagctgccaaacccaagctgacgcctcaggagaagctgaaactgaggatgcagaaggcgctgaacaggcagttcaaggcggataagaaggcggcacaagaaaagatgatccagcaggagcatgagcggcaggagcgggaagacgagcttcgagccatggcccgcaagatccgcatgaaggagcgggaacgccgagagaaggagagagaagagtgggaacgccagtacagccggcagagccgctcaccctccccccgatacagtcgagaatacagctcttctcgaaggcgctcaaggtcccgatcccgaagcccccattaccgacattaggcagaagagtggggggtggggaggacaagggggtgggtaaggggctcaagctgtgatgctgctggttttatctctagtgaaataaagtcaaaagttatttaattcccgtca

SEQ ID NO: 446883 - DNA, 2312 bp, Homo sapiens
gcggcctttcatttccgcttccggtgcgggccgcgcgcgagcgcagcggtgggaggcggcgaccagccggttgaggccccaggcttggcctcaccacaatgtggcacgaggctcggaagcatgagcggaagcttcgaggcatgatggtcgactacaagaagagggcggagcggagacgggagtattatgaaaagatcaagaaggacccagcccagttcctgcaggtacatggccgagcttgcaaggtgcacctggattctgcagtcgccctggccgctgagagccctgttaatatgatgccctggcagggggacaccaacaacatgattgaccgattcgatgtccgtgcccacctggaccacatccccgactacaccccccctctgctcaccaccatctccccagaacaggagtcggacgaacggaagtgtaactacgagcgctacagaggcctggtgcagaacgactttgccggcatctcagaggagcagtgcctgtaccagatctacattgatgagttgtacggaggcctccagagacccagcgaagatgagaagaagaagctggcagagaagaaggcttccatcggttatacctacgaggacagcacggtggccgaggtagagaaggcggcagaaaagccagaggaggaggagtcagcggccgaggaggagagcaactcggacgaagatgaggtcatccccgacatcgacgtggaggtggacgtggatgaattgaaccaggagcaggtggcagatctcaacaaacaggccacgacttatggcatggccgacggtgacttcgtcaggatgctccggaaagacaaggaggaggcagaggccatcaagcatgccaaggctcttgaggaggagaaggccatgtactcgggacgccgctctcgacgccagcggagagagtttcgggagaagcggctgaggggtcgcaagatcagcccacccagctatgcccgccgagacagccccacctatgacccctataagcggtcaccctcggagtccagctcagagtcccgctcccgctcccgctccccgaccccgggccgcgaggagaagatcacgttcatcaccagttttgggggcagcgatgaggaggcagccgcagccgctgctgccgcagcagcatcaggagtcaccacagggaagccccccgcacctccccagcctggcggccccgccccgggacgtaatgccagcgcccgccgccgctcctcctcctcctcctcctcctcttctgcctcgaggacctccagctcccgctccagctctcgctccagctcccgctctcgccgtggtgggggctactaccgttccggccgccacgcccgctcccggtcccgctcctggtcccgctcccgctcccgctcccggcgctattcccggtcccgtagccgtggccggcggcactcaggtgggggctcccgagacggacaccggtactcccgctcgcccgcccggcgtggtggttacgggccccggcgcagaagcaggagccgctcccactcaggggaccgctacaggcggggcggccggggcctcaggcaccacagcagtagccgcagccgcagcagctggtccctcagcccgtcccgcagtcgcagcctgactcgcagccgcagccatagccccagccccagccagagccgcagccgcagccgcagccgcagccagagcccctcgccatcacccgcaagagagaagctgaccaggccggccgcgtcccctgctgtgggcgagaagctgaaaaagaccgaacctgccgctggtaaagagacaggagctgccaaacccaagctgacgcctcaggagaagctgaaactgaggatgcagaaggcgctgaacaggcagttcaaggcggataagaaggcggcacaagaaaagatgatccagcaggagcatgagcggcaggagcgggaagacgagcttcgagccatggcccgcaagatccgcatgaaggtgttggaagcacctgccctccctgagttcagtgtgtccagtgttcccggccagatgctcatgccatgccttcgcagggagcgggaacgccgagagaaggagagagaagagtgggaacgccagtacagccggcagagccgctcaccctccccccgatacagtcgagaatacagctcttctcgaaggcgctcaaggtcccgatcccgaagcccccattaccgacattaggcagaagagtggggggtggggaggacaagggggtgggtaaggggctcaagctgtgatgctgctggttttatctctagtgaaataaagtcaaaagttatttaattcccgtca

SEQ ID NO: 446884 - DNA, 1988 bp, Homo sapiens
gcggcctttcatttccgcttccggtgcgggccgcgcgcgagcgcagcggtgggaggcggcgaccagccggttgaggccccaggcttggcctcaccacaatgtggcacgaggctcggaagcatgagcggaagcttcgaggcatgatggtcgactacaagaagagggcggagcggagacgggagtattatgaaaagatcaagaaggacccagcccagttcctgcaggtacatggccgagcttgcaaggtgcacctggattctgcagtcgccctggccgctgagagccctgttaatatgatgccctggcagggggacaccaacaacatgattgaccgattcgatgtccgtgcccacctggaccacatccccgactacaccccccctctgctcaccaccatctccccagaacaggagtcggacgaacggaagtgtaactacgagcgctacagaggcctggtgcagaacgactttgccggcatctcagaggagcagtgcctgtaccagatctacattgatgagttgtacggaggcctccagagacccagcgaagatgagaagaagaagctggcagagaagaaggcttccatcggttatacctacgaggacagcacggtggccgaggtagagaaggcggcagaaaagccagaggaggaggagtcagcggccgaggaggagagcaactcggacgaagatgaggtcatccccgacatcgacgtggaggtggacgtggatgaattgaaccaggagcaggtggcagatctcaacaaacaggccacgacttatggcatggccgacggtgacttcgtcaggatgctccggaaagacaaggaggaggcagaggccatcaagcatgccaaggctcttgaggaggagaaggccatgtactcgggacgccgctctcgacgccagcggagagagtttcgggagaagcggctgaggggtcgcaagatcagcccacccagctatgcccgccgagacagccccacctatgacccctataagcggtcaccctcggagtccagctcagagtcccgctcccgctcccgctccccgaccccgggccgcgaggagaagatcacgttcatcaccagttttgggggcagcgatgaggaggcagccgcagccgctgctgccgcagcagcatcaggagtcaccacagggaagccccccgcacctccccagcctggcggccccgccccgggacgtaatgccagcgcccggtcggtaacgctcacgccgcccgccctacgccccggtcaccatggggggtacccggggcagaggggggccgcggctcaggcctgcgctgaccggccctccgtgccccgcctgcagccgccgctcctcctcctcctcctcctcctcttctgcctcgaggacctccagctcccgctccagctctcgctccagctcccgctctcgccgtggtgggggctactaccgttccggccgccacgcccgctcccggtcccgctcctggtcccgctcccgctcccgctcccggcgctattcccggtcccgtagccgtggccggcggcactcaggtgggggctcccgagacggacaccggtactcccgctcgcccgcccggcgtggtggttacgggccccggcgcagaagcaggagccgctcccactcaggggaccgctacaggcggggcggccggggcctcaggcaccacagcagtagccgcagccgcagcagctggtccctcagcccgtcccgcagtcgcagcctgactcgcagccgcagccatagccccagccccagccagagccgcagccgcagccgcagccgcagccagagcccctcgccatcacccgcaagagagaagctgaccaggccggccgcgtcccctgctgtgggcgagaagctgaaaaagaccgaacctgccgctggtaaagagacaggagctgccaaagtcagtaagaatttggaactcgcccgtctaattcccgtcagcagcagtgcccaagagctgggcccggt

SEQ ID NO: 446885 - DNA, 1257 bp, Homo sapiens
gcggcctttcatttccgcttccggtgcgggccgcgcgcgagcgcagcggtgggaggcggcgaccagccggttgaggccccaggcttggcctcaccacaatgtggcacgaggctcggaagcatgagcggaagcttcgaggcatgatggtcgactacaagaagagggcggagcggagacgggagtattatgaaaagatcaagaaggacccagcccagttcctgcaggtacatggccgagcttgcaaggtgcacctggattctgcagtcgccctggccgctgagagccctgttaatatgatgccctggcagggggacaccaacaacatgattgaccgattcgatgtccgtgcccacctggaccacatccccgactacaccccccctctgctcaccaccatctccccagaacaggagtcggacgaacggaagtgtaactacgagcgctacagaggcctggtgcagaacgactttgccggcatctcagaggagcagtgcctgtaccagatctacattgatgagttgtacggaggcctccagagacccagcgaagatgagaagaagaagctggcagagaagaaggcttccatcggttatacctacgaggacagcacggtggccgaggtagagaaggcggcagaaaagccagaggaggaggagtcagcggccgaggaggagagcaactcggacgaagatgaggtcatccccgacatcgacgtggaggtggacgtggatgaattgaaccaggagcaggtggcagatctcaacaaacaggccacgacttatggcatggccgacggtgacttcgtcaggatgctccggaaagacaaggaggaggcagaggccatcaagcatgccaaggctcttgaggaggagaaggccatgtactcgggacgccgctctcgacgccagcggagagagtttcgggagaagcggctgaggggtcgcaagatcagcccacccagctatgcccgccgagacagccccacctatgacccctataagcggtcaccctcggagtccagctcagagtcccgctcccgctcccgctccccgaccccgggccgcgaggagaagatcacgttcatcaccagttttgggggcagcgatgaggaggcagccgcagccgctgctgccgcagcagcatcaggagtcacagtggggggtggggaggacaagggggtgggtaaggggctcaagctgtgatgctgctggttttatctctagtgaaataaagtcaaaagttatttaattcccgtca

SEQ ID NO: 446886 - DNA, 1086 bp, Homo sapiens
gcggcctttcatttccgcttccggtgcgggccgcgcgcgagcgcagcggtgggaggcggcgaccagccggttgaggccccaggcttggcctcaccacaatgtggcacgaggctcggaagcatgagcggaagcttcgaggcatgatggtcgactacaagaagagggcggagcggagacgggagtattatgaaaagatcaagaaggacccagcccagttcctgcaggtacatggccgagcttgcaaggtgcacctggattctgcagtcgccctggccgctgagagccctgttaatatgatgccctggcagggggacaccaacaacatgattgaccgattcgatgtccgtgcccacctggaccacatccccgactacaccccccctctgctcaccaccatctccccagaacaggagtcggacgaacggaagtgtaactacgagcgctacagaggcctggtgcagaacgactttgccggcatctcagaggagcagtgcctgtaccagatctacattgatgagttgtacggaggcctccagagacccagcgaagatgagaagaagaagctggcagagaagaaggcttccatcggttatacctacgaggacagcacggtggccgaggtagagaaggcggcagaaaagccagaggaggaggagtcagcggccgaggaggagagcaactcggacgaagatgaggtcatccccgacatcgacgtggaggtggacgtggatgaattgaaccaggagcaggtggcagatctcaacaaacaggccacgacttatggcatggccgacggtgacttcgtcaggatgctccggaaagacaaggaggaggcagaggccatcaagcatgccaaggctcttgaggaggagaaggccatgtactcgggacgccgctctcgacgccagcggagagagtttcgggagaagcggctgaggggtcgcaagatcagcccacccagctatgccttttaaaacaagggaaaaagtaatgaaccactaataaagcgatatcgccgtcggaggtacaggatcatgagttaccgcatccgtgctctccagctcactcatctcctgcgccgcgcgg

SEQ ID NO: 446887 - DNA, 882 bp, Homo sapiens
ggatccggacccagggtggggtgcggttggggtccctggagcctcacagtcctcctcccgccctgctgcatccccaggagccgctcccactcaggggaccgctacaggcggggcggccggggcctcaggcaccacagcagtagccgcagccgcagcagctggtccctcagcccgtcccgcagtcgcagcctgactcgcagccgcagccatagccccagccccagccagagccgcagccgcagccgcagccgcagccagagcccctcgccatcacccgcaagagagaagctgaccaggccggccgcgtcccctgctgtgggcgagaagctgaaaaagaccgaacctgccgctggtaaagagacaggagctgccaaacccaagctgacgcctcaggagaagctgaaactgaggatgcagaaggcgctgaacaggcagttcaaggcggataagaaggcggcacaagaaaagatgatccagcaggagcatgagcggcaggagcgggaagacgagcttcgagccatggcccgcaagatccgcatgaaggtgttggaagcacctgccctccctgagttcagtgtgtccagtgttcccggccagatgctcatgccatgccttcgcagggagcgggaacgccgagagaaggagagagaagagtgggaacgccagtacagccggcagagccgctcaccctccccccgatacagtcgagaatacagctcttctcgaaggcgctcaaggtcccgatcccgaagcccccattaccgacattaggcagaagagtggggggtggggaggacaagggggtgggtaaggggctcaagctgtgatgctgctggttttatctctagtgaaataaagtcaaaagttatttaattcccgtca

SEQ ID NO: 446888 - DNA, 1805 bp, Homo sapiens
tttctttggatgctctccccaccccgccatctagatcccatctttagacctcagcttcactctggtctccttgcaacactccctccccgtgttcccactccctctagcatcttcatcttccgccacgcccttcacctgtcctcgacctccaccttcatacaactgcactgttcccttaaaagctttctccgatttcctccacctgccttcatccttattctccttatccctctaccacccagactcatacccaaccccacgcatggcccctagtgggagccttttcagttcttctctttctcttgagctccagccttaagtgctcagggtttgccttctgaccctacttcaaacactgctgatgtttcaaaacctttcattcccgactccagcgcgtggaatctaggacacccctttcccagtgatgctcacctcagaatcacctgagggtttttcagaatgcccaagcttctagatcgaagttgttagggatggacttgaacatctggcatactgttctgcagcttcacttctgctccctgaagctaagagatgtgttgtttgggatcgactctgccaccaacttgttagatgactttgattctgcccatacgggtttcacagaccatctgactttcctggtcccttcatccctcaggttgaggccccaggcttggcctcaccacaatgtggcacgaggctcggaagcatgagcggaagcttcgaggcatgatggtcgactacaagaagagggcggagcggagacgggagtattatgaaaagatcaagaaggacccagcccagttcctgcaggtacatggccgagcttgcaaggtgcacctggattctgcagtcgccctggccgctgagagccctgttaatatgatgccctggcagggggacaccaacaacatgattgaccgattcgatgtccgtgcccacctggaccacatccccgactacaccccccctctgctcaccaccatgtaagccacctcccagggggttgccaggcacagcgtcatacccaggagcccctgttcttttcccagcctacctgtcaccttcctaggagccgttcctatttggtaccgccctgagcctgagggggatgcctcatttcccttcctgctggcttggggggggatccactccttctctctgatttcaaggtctcgcccttccctaaagctctccccagaacaggagtcggacgaacggaagtgtaactacgagcgctacagaggcctggtgcagaacgactttgccggcatctcagaggagcagtgcctgtaccagatctacattgatgagttgtacggaggcctccagagacccagcgaagatgagaagaagaagctggcagagaagaaggcttccatcggttatacctacgaggacagcacggtggccgaggtagagaaggcggcagaaaagccagaggaggaggagtcagcggccgaggaggagagcaactcggacgaagatgaggtcatccccgacatcgatcggtggggtcccctctctgccctccccacctgcagtccctgggcatcgtttctgtgtctcgtccctcaccctctgtggggcaccccgtgcttacgaaccgtgtctctctccctaccccgccccagggcacaccagcctcctgctgcccctgtctcactcctgtcctcctccgttccggccttcctctgcctcactcatctctcatttctagggtgctatttctatgatcttttcccctcctaggtgttggctccattctcctccacttgggccggcctctctctgcctttgcccct

SEQ ID NO: 446889 - DNA, 273 bp, Homo sapiens
cgaggcatgatggtcgactacaagaagagggcggagcggagacgggagtattatgaaaagatcgtgagtaactggccttttgtctggggtgagggaccctgggttggggggcacagctggtcatcctggtaaaatctgggcttggaagtatgtcaagacaagaggctcatttcctcaggagtatattcattaatcttttcttgaggataatcattggtgggatcccaagggcttctgtttgttgtagcatactgtgtcgtttggtgtggcctc

SEQ ID NO: 446890 - DNA, 183 bp, Homo sapiens
ttgctcccctcccacttcaggatgccctggcagggggacaccaacaacatgattgaccgattcgatgtccgtgcccacctggaccacatccccgactacaccccccctctgctcaccaccatgtaagccacctcccagggggttgccaggcacagcgtcatacccaggagcccctgttctttt

SEQ ID NO: 446891 - DNA, 495 bp, Homo sapiens
acctgaggtcaggagttcgagaccagcctgaccaacatggtgacacacatacgtacacacacacacacacagattgctttagtcacaaggtgattgcagcaattagaagtgctcattccggcatgggctggtgaggggcacagatggcagccactggactctctggaaatgtcccctcatttggagacaacccctgaagttcagttttgaggacctcaccccaggtcaaggaagaggccctggccctggatgtttgctcgctcttcacctgttgttttctttccaggtcgagaatacagctcttctcgaaggtaaggaagcccatgaccctccactttcttggaagtaacacttgtcctttgatgggaggtcctggctgtcattcctccagcctcaccctgtacccacctccagttggaggggctggtctcatcccttggggaacatccttccctccacagacaagtgccccgatcactgaagcatccacggccc

SEQ ID NO: 446892 - DNA, 2234 bp, Homo sapiens
gcggcctttcatttccgcttccggtgcgggccgcgcgcgagcgcagcggtgggaggcggcgaccagccggttgaggccccaggcttggcctcaccacaatgtggcacgaggctcggaagcatgagcggaagcttcgaggcatgatggtcgactacaagaagagggcggagcggagacgggagtattatgaaaagatcaagaaggacccagcccagttcctgcaggtacatggccgagcttgcaaggtgcacctggattctgcagtcgccctggccgctgagagccctgttaatatgatgccctggcagggggacaccaacaacatgattgaccgattcgatgtccgtgcccacctggaccacatccccgactacaccccccctctgctcaccaccatctccccagaacaggagtcggacgaacggaagtgtaactacgagcgctacagaggcctggtgcagaacgactttgccggcatctcagaggagcagtgcctgtaccagatctacattgatgagttgtacggaggcctccagagacccagcgaagatgagaagaagaagctggcagagaagaaggcttccatcggttatacctacgaggacagcacggtggccgaggtagagaaggcggcagaaaagccagaggaggaggagtcagcggccgaggaggagagcaactcggacgaagatgaggtcatccccgacatcgacgtggaggtggacgtggatgaattgaaccaggagcaggtggcagatctcaacaaacaggccacgacttatggcatggccgacggtgacttcgtcaggatgctccggaaagacaaggaggaggcagaggccatcaagcatgccaaggctcttgaggaggagaaggccatgtactcgggacgccgctctcgacgccagcggagagagtttcgggagaagcggctgaggggtcgcaagatcagcccacccagctatgcccgccgagacagccccacctatgacccctataagcggtcaccctcggagtccagctcagagtcccgctcccgctcccgctccccgaccccgggccgcgaggagaagatcacgttcatcaccagttttgggggcagcgatgaggaggcagccgcagccgctgctgccgcagcagcatcaggagtcaccacagggaagccccccgcacctccccagcctggcggccccgccccgggacgtaatgccagcgcccgccgccgctcctcctcctcctcctcctcctcttctgcctcgaggacctccagctcccgctccagctctcgctccagctcccgctctcgccgtggtgggggctactaccgttccggccgccacgcccgctcccggtcccgctcctggtcccgctcccgctcccgctcccggcgctattcccggtcccgtagccgtggccggcggcactcaggtgggggctcccgagacggacaccggtactcccgctcgcccgcccggcgtggtggttacgggccccggcgcagaagcaggagccgctcccactcaggggaccgctacaggcggggcggccggggcctcaggcaccacagcagtagccgcagccgcagcagctggtccctcagcccgtcccgcagtcgcagcctgactcgcagccgcagccatagccccagccccagccagagccgcagccgcagccgcagccgcagccagagcccctcgccatcacccgcaagagagaagctgaccaggccggccgcgtcccctgctgtgggcgagaagctgaaaaagaccgaacctgccgctggtaaagagacaggagctgccaaacccaagctgacgcctcaggagaagctgaaactgaggatgcagaaggcgctgaacaggcagttcaaggcggataagaaggcggcacaagaaaagatgatccagcaggagcatgagcggcaggagcgggaagacgagcttcgagccatggcccgcaagatccgcatgaaggagcgggaacgccgagagaaggagagagaagagtgggaacgccagtacagccggcagagccgctcaccctccccccgatacagtcgagaatacagctcttctcgaaggcgctcaaggtcccgatcccgaagcccccattaccgacattaggcagaagagtggggggtggggaggacaagggggtgggtaaggggctcaagctgtgatgctgctggttttatctctagtgaaataaagtcaaaagttatttaattcccgtca

SEQ ID NO: 446893 - DNA, 486 bp, Homo sapiens
  misc_feature (23)..(23): n is a, c, g, or t
  misc_feature (28)..(28): n is a, c, g, or t
tcccgcctcttctcccccctccncagcncaagctgacgcctcaggagaagctgaaactgaggatgcagaaggcgctgaacaggcagaggccatcaagcatgccaaggctcttgaggaggagaaggccatgtactcgggacgccgctctcgacgccagcggagagagtttcgggagaagcggctgaggggtcgcaagatcagcccacccagctatgcccgccgagacagccccacctatgacccctataagcggtcaccctcggagtccagctcagagtcccgctcccgctcccgctccccgaccccgggccgcgaggagaagatcacgttcatcaccagttttgggggcagcgatgaggaggcagccgcagccgctgctgccgcagcagcatcaggagtcacagggggtgggtaaggggctcaagctgtgatgctgctggttttatctctagtgaaataaagtcaaaagttatttaattcccgtca

SEQ ID NO: 446894 - DNA, 3030 bp, Homo sapiens
tttctttggatgctctccccaccccgccatctagatcccatctttagacctcagcttcactctggtctccttgcaacactccctccccgtgttcccactccctctagcatcttcatcttccgccacgcccttcacctgtcctcgacctccaccttcatacaactgcactgttcccttaaaagctttctccgatttcctccacctgccttcatccttattctccttatccctctaccacccagactcatacccaaccccacgcatggcccctagtgggagccttttcagttcttctctttctcttgagctccagccttaagtgctcagggtttgccttctgaccctacttcaaacactgctgatgtttcaaaacctttcattcccgactccagcgcgtggaatctaggacacccctttcccagtgatgctcacctcagaatcacctgagggtttttcagaatgcccaagcttctagatcgaagttgttagggatggacttgaacatctggcatactgttctgcagcttcacttctgctccctgaagctaagagatgtgttgtttgggatcgactctgccaccaacttgttagatgactttgattctgcccatacgggtttcacagaccatctgactttcctggtcccttcatccctcaggttgaggccccaggcttggcctcaccacaatgtggcacgaggctcggaagcatgagcggaagcttcgaggcatgatggtcgactacaagaagagggcggagcggagacgggagtattatgaaaagatcaagaaggacccagcccagttcctgcaggtacatggccgagcttgcaaggtgcacctggattctgcagtcgccctggccgctgagagccctgttaatatgatgccctggcagggggacaccaacaacatgattgaccgattcgatgtccgtgcccacctggaccacatccccgactacaccccccctctgctcaccaccatgtaagccacctcccagggggttgccaggcacagcgtcatacccaggagcccctgttcttttcccagcctacctgtcaccttcctaggagccgttcctatttggtaccgccctgagcctgagggggatgcctcatttcccttcctgctggcttggggggggatccactccttctctctgatttcaaggtctcgcccttccctaaagctctccccagaacaggagtcggacgaacggaagtgtaactacgagcgctacagaggcctggtgcagaacgactttgccggcatctcagaggagcagtgcctgtaccagatctacattgatgagttgtacggaggcctccagagacccagcgaagatgagaagaagaagctggcagagaagaaggcttccatcggttatacctacgaggacagcacggtggccgaggtagagaaggcggcagaaaagccagaggaggaggagtcagcggccgaggaggagagcaactcggacgaagatgaggtcatccccgacatcgacgtggaggtggacgtggatgaattgaaccaggagcaggtggcagatctcaacaaacaggccacgacttatggcatggccgacggtgacttcgtcaggatgctccggaaagacaaggaggaggcagaggccatcaagcatgccaaggctcttgaggaggagaaggccatgtactcgggacgccgctctcgacgccagcggagagagtttcgggagaagcggctgaggggtcgcaagatcagcccacccagctatgcccgccgagacagccccacctatgacccctataagcggtcaccctcggagtccagctcagagtcccgctcccgctcccgctccccgaccccgggccgcgaggagaagatcacgttcatcaccagttttgggggcagcgatgaggaggcagccgcagccgctgctgccgcagcagcatcaggagtcaccacagggaagccccccgcacctccccagcctggcggccccgccccgggacgtaatgccagcgcccgccgccgctcctcctcctcctcctcctcctcttctgcctcgaggacctccagctcccgctccagctctcgctccagctcccgctctcgccgtggtgggggctactaccgttccggccgccacgcccgctcccggtcccgctcctggtcccgctcccgctcccgctcccggcgctattcccggtcccgtagccgtggccggcggcactcaggtgggggctcccgagacggacaccggtactcccgctcgcccgcccggcgtggtggttacgggccccggcgcagaagcaggagccgctcccactcaggggaccgctacaggcggggcggccggggcctcaggcaccacagcagtagccgcagccgcagcagctggtccctcagcccgtcccgcagtcgcagcctgactcgcagccgcagccatagccccagccccagccagagccgcagccgcagccgcagccgcagccagagcccctcgccatcacccgcaagagagaagctgaccaggccggccgcgtcccctgctgtgggcgagaagctgaaaaagaccgaacctgccgctggtaaagagacaggagctgccaaacccaagctgacgcctcaggagaagctgaaactgaggatgcagaaggcgctgaacaggcagttcaaggcggataagaaggcggcacaagaaaagatgatccagcaggagcatgagcggcaggagcgggaagacgagcttcgagccatggcccgcaagatccgcatgaaggagcgggaacgccgagagaaggagagagaagagtgggaacgccagtacagccggcagagccgctcaccctccccccgatacagtcgagaatacagctcttctcgaaggcgctcaaggtcccgatcccgaagcccccattaccgacattaggcagaagagtggggggtggggaggacaagggggtgggtaaggggctcaagctgtgatgctgctggttttatctctagtgaaataaagtcaaaagttatttaattcccgtca

SEQ ID NO: 446895 - DNA, 1595 bp, Homo sapiens
ccttgttggccaggctggtctcaaactcctggtctcaagtgatcggcctgcctcggcctcccacagtgctgggattacaggtgtgagccaccgcgcccggcctgctcatccatttttcatagccacataaaatcagagcagttgtgtgtcattgtccttcctggttatttagcgaaggctgcatggttgtgagtcaagtccttgtccagagctgggtctccactgccctccaggctccatccacccgcctggtttcccgggtcgctgtggcccgcgctggcgctgctgttgatctgctgtgtgtgctgttcccgaagaggctccgggagcctgagctagtgagcctcctcctccctacccgcaggtcaccctcggagtccagctcagagtcccgctcccgctcccgctccccgaccccgggccgcgaggagaagatcacgttcatcaccagttttgggggcagcgatgaggaggcagccgcagccgctgctgccgcagcagcatcaggagtcaccacagggaagccccccgcacctccccagcctggcggccccgccccgggacgtaatgccagcgcccgccgccgctcctcctcctcctcctcctcctcttctgcctcgaggacctccagctcccgctccagctctcgctccagctcccgctctcgccgtggtgggggctactaccgttccggccgccacgcccgctcccggtcccgctcctggtcccgctcccgctcccgctcccggcgctattcccggtcccgtagccgtggccggcggcactcaggtgggggctcccgagacggacaccggtactcccgctcgcccgcccggcgtggtggttacgggccccggcgcagaagcaggagccgctcccactcaggggaccgctacaggcggggcggccggggcctcaggcaccacagcagtagccgcagccgcagcagctggtccctcagcccgtcccgcagtcgcagcctgactcgcagccgcagccatagccccagccccagccagagccgcagccgcagccgcagccgcagccagagcccctcgccatcacccgcaagagagaagctgaccaggccggccgcgtcccctgctgtgggcgagaagctgaaaaagaccgaacctgccgctggtaaagagacaggagctgccaaacccaagctgacgcctcaggagaagctgaaactgaggatgcagaaggcgctgaacaggcagttcaaggcggataagaaggcggcacaagaaaagatgatccagcaggagcatgagcggcaggagcgggaagacgagcttcgagccatggcccgcaagatccgcatgaaggagcgggaacgccgagagaaggagagagaagagtgggaacgccagtacagccggcagagccgctcaccctccccccgatacagtcgagaatacagctcttctcgaaggcgctcaaggtcccgatcccgaagcccccattaccgacattaggcagaagagtggggggtggggaggacaagggggtgggtaaggggctcaagctgtgatgctgctggttttatctctagtgaaataaagtcaaaagttatttaattcccgtca

SEQ ID NO: 446896 - DNA, 2311 bp, Homo sapiens
gcggcctttcatttccgcttccggtgcgggccgcgcgcgagcgcagcggtgggaggcggcgaccagccggttgaggccccaggcttggcctcaccacaatgtggcacgaggctcggaagcatgagcggaagcttcgaggcatgatggtcgactacaagaagagggcggagcggagacgggagtattatgaaaagatcaagaaggacccagcccagttcctgcaggtacatggccgagcttgcaaggtgcacctggattctgcagtcgccctggccgctgagagccctgttaatatgatgccctggcagggggacaccaacaacatgattgaccgattcgatgtccgtgcccacctggaccacatccccgactacaccccccctctgctcaccaccatctccccagaacaggagtcggacgaacggaagtgtaactacgagcgctacagaggcctggtgcagaacgactttgccggcatctcagaggagcagtgcctgtaccagatctacattgatgagttgtacggaggcctccagagacccagcgaagatgagaagaagaagctggcagagaagaaggcttccatcggttatacctacgaggacagcacggtggccgaggtagagaaggcggcagaaaagccagaggaggaggagtcagcggccgaggaggagagcaactcggacgaagatgaggtcatccccgacatcgacgtggaggtggacgtggatgaattgaaccaggagcaggtggcagatctcaacaaacaggccacgacttatggcatggccgacggtgacttcgtcaggatgctccggaaagacaaggaggaggcagaggccatcaagcatgccaaggctcttgaggaggagaaggccatgtactcgggacgccgctctcgacgccagcggagagagtttcgggagaagcggctgaggggtcgcaagatcagcccacccagctatgcccgccgagacagccccacctatgacccctataagcggtcaccctcggagtccagctcagagtcccgctcccgctcccgctccccgaccccgggccgcgaggagaagatcacgttcatcaccagttttgggggcagcgatgaggaggcagccgcagccgctgctgccgcagcagcatcaggagtcaccacagggaagccccccgcacctccccagcctggcggccccgccccgggacgtaatgccagcgcccgccgccgctcctcctcctcctcctcctcctcttctgcctcgaggacctccagctcccgctccagctctcgctccagctcccgctctcgccgtggtgggggctactaccgttccggccgccacgcccgctcccggtcccgctcctggtcccgctcccgctcccgctcccggcgctattcccggtcccgtagccgtggccggcggcactcaggtgggggctcccgagacggacaccggtactcccgctcgcccgcccggcgtggtggttacgggccccggcgcagaagcaggagccgctcccactcaggggaccgctacaggcggggcggccggggcctcaggcaccacagcagtagccgcagccgcagcagctggtccctcagcccgtcccgcagtcgcagcctgactcgcagccgcagccatagccccagccccagccagagccgcagccgcagccgcagccgcagccagagcccctcgccatcacccgcaagagagaagctgaccaggccggccgcgtcccctgctgtgggcgagaagctgaaaaagaccgaacctgccgctggtaaagagacaggagctgccaaacccaagctgacgcctcaggagaagctgaaactgaggatgcagaaggcgctgaacaggcagttcaaggcggataagaaggcggcacaagaaaagatgatccagcaggagcatgagcggcaggtgaagtgggaaagggagggctggggtgacgggtgggtgctggcctggccacgtcctcatagccctgtctgctgcaggagcgggaagacgagcttcgagccatggcccgcaagatccgcatgaaggagcgggaacgccgagagaaggagagagaagagtgggaacgccagtacagccggcagagccgctcaccctccccccgatacagtcgagaatacagctcttctcgaaggcgctcaaggtcccgatcccgaagcccccattaccgacattaggcagaagagtggggggtggggaggacaagggggtgggtaaggggctcaagctgtgatgctgctggttttatctctagtgaaataaagtcaaaagttatttaattcccgtca

SEQ ID NO: 446897 - DNA, 1838 bp, Homo sapiens
gcggcctttcatttccgcttccggtgcgggccgcgcgcgagcgcagcggtgggaggcggcgaccagccggttgaggccccaggcttggcctcaccacaatgtggcacgaggctcggaagcatgagcggaagcttcgaggcatgatggtcgactacaagaagagggcggagcggagacgggagtattatgaaaagatcaagaaggacccagcccagttcctgcaggtacatggccgagcttgcaaggtgcacctggattctgcagtcgccctggccgctgagagccctgttaatatgatgccctggcagggggacaccaacaacatgattgaccgattcgatgtccgtgcccacctggaccacatccccgactacaccccccctctgctcaccaccatctccccagaacaggagtcggacgaacggaagtgtaactacgagcgctacagaggcctggtgcagaacgactttgccggcatctcagaggagcagtgcctgtaccagatctacattgatgagttgtacggaggcctccagagacccagcgaagatgagaagaagaagctggcagagaagaaggcttccatcggttatacctacgaggacagcacggtggccgaggtagagaaggcggcagaaaagccagaggaggaggagtcagcggccgaggaggagagcaactcggacgaagatgaggtcatccccgacatcgacgtggaggtggacgtggatgaattgaaccaggagcaggtggcagatctcaacaaacaggccacgacttatggcatggccgacggtgacttcgtcaggatgctccggaaagacaaggaggaggcagaggccatcaagcatgccaaggctcttgaggaggagaaggccatgtactcgggacgccgctctcgacgccagcggagagagtttcgggagaagcggctgaggggtcgcaagatcagcccacccagctatgcccgccgagacagccccacctatgacccctataagcggtcaccctcggagtccagctcagagtcccgctcccgctcccgctccccgaccccgggccgcgaggagaagatcacgttcatcaccagttttgggggcagcgatgaggaggcagccgcagccgctgctgccgcagcagcatcaggagtcaccacagggaagccccccgcacctccccagcctggcggccccgccccgggacgtaatgccagcgcccggtcggtaacgctcacgccgcccgccctacgccccggtcaccatggggggtacccggggcagaggggggccgcggctcaggcctgcgctgaccggccctccgtgccccgcctgcagccgccgctcctcctcctcctcctcctcctcttctgcctcgaggacctccagctcccgctccagctctcgctccagctcccgctctcgccgtggtgggggctactaccgttccggccgccacgcccgctcccggtcccgctcctggtcccgctcccgctcccgctcccggcgctattcccggtcccgtagccgtggccggcggcactcaggtgggggctcccgagacggacaccggtactcccgctcgcccgcccggcgtggtggttacgggccccggcgcagaagcaggagccgctcccactcaggggaccgctacaggcggggcggccggggcctcaggcaccacagcagtagccgcagccgcagcagctggtccctcagcccgtcccgcagtcgcagcctgactcgcagccgcagccatagccccagccccagccagagccctgtgatgctgctggttttatctctagtgaaataaagtcaaaagttatttaattcccgtca

SEQ ID NO: 446898 - DNA, 1966 bp, Homo sapiens
gcggcctttcatttccgcttccggtgcgggccgcgcgcgagcgcagcggtgggaggcggcgaccagccggttgaggccccaggcttggcctcaccacaatgtggcacgaggctcggaagcatgagcggaagcttcgaggcatgatggtcgactacaagaagagggcggagcggagacgggagtattatgaaaagatcaagaaggacccagcccagttcctgcaggtacatggccgagcttgcaaggtgcacctggattctgcagtcgccctggccgctgagagccctgttaatatgatgccctggcagggggacaccaacaacatgattgaccgattcgatgtccgtgcccacctggaccacatccccgactacaccccccctctgctcaccaccatctccccagaacaggagtcggacgaacggaagtgtaactacgagcgctacagaggcctggtgcagaacgactttgccggcatctcagaggagcagtgcctgtaccagatctacattgatgagttgtacggaggcctccagagacccagcgaagatgagaagaagaagctggcagagaagaaggcttccatcggttatacctacgaggacagcacggtggccgaggtagagaaggcggcagaaaagccagaggaggaggagtcagcggccgaggaggagagcaactcggacgaagatgaggtcatccccgacatcgacgtggaggtggacgtggatgaattgaaccaggagcaggtggcagatctcaacaaacaggccacgacttatggcatggccgacggtgacttcgtcaggatgctccggaaagacaaggaggaggcagaggccatcaagcatgccaaggctcttgaggaggagaaggccatgtactcgggacgccgctctcgacgccagcggagagagtttcgggagaagcggctgaggggtcgcaagatcagcccacccagctatgcccgccgagacagccccacctatgacccctataagcggtcaccctcggagtccagctcagagtcccgctcccgctcccgctccccgaccccgggccgcgaggagaagatcacgttcatcaccagttttgggggcagcgatgaggaggcagccgcagccgctgctgccgcagcagcatcaggagtcaccacagggaagccccccgcacctccccagcctggcggccccgccccgggacgtaatgccagcgcccggtcggtaacgctcacgccgcccgccctacgccccggtcaccatggggggtacccggggcagaggggggccgcggctcaggcctgcgctgaccggccctccgtgccccgcctgcagccgccgctcctcctcctcctcctcctcctcttctgcctcgaggacctccagctcccgctccagctctcgctccagctcccgctctcgccgtggtgggggctactaccgttccggccgccacgcccgctcccggtcccgctcctggtcccgctcccgctcccgctcccggcgctattcccggtcccgtagccgtggccggcggcactcaggtgggggctcccgagacggacaccggtactcccgctcgcccgcccggcgtggtggttacgggccccggcgcagaagcaggagccgctcccactcaggggaccgctacaggcggggcggccggggcctcaggcaccacagcagtagccgcagccgcagcagctggtccctcagcccgtcccgcagtcgcagcctgactcgcagccgcagccatagccccagccccagccagagccgcagccgcagccgcagccgcagccagagcccctcggcgctcaaggtcccgatcccgaagcccccattaccgacattaggcagaagagtggggggtggggaggacaagggggtgggtaaggggctcaagctgtgatgctgctggttttatctctagtgaaataaagtcaaaagttatttaattcccgtca

SEQ ID NO: 446899 - DNA, 1051 bp, Homo sapiens
gcggcctttcatttccgcttccggtgcgggccgcgcgcgagcgcagcggtgggaggcggcgaccagccggttgaggccccaggcttggcctcaccacaatgtggcacgaggctcggaagcatgagcggaagcttcgaggcatgatggtcgactacaagaagagggcggagcggagacgggagtattatgaaaagatcaagaaggacccagcccagttcctgcaggtacatggccgagcttgcaaggtgcacctggattctgcagtcgccctggccgctgagagccctgttaatatgatgccctggcagggggacaccaacaacatgattgaccgattcgatgtccgtgcccacctggaccacatccccgactacaccccccctctgctcaccaccatctccccagaacaggagtcggacgaacggaagtgtaactacgagcgctacagaggcctggtgcagaacgactttgccggcatctcagaggagcagtgcctgtaccagatctacattgatgagttgtacggaggcctccagagacccagcgaagatgagaagaagaagctggcagagaagaaggcttccatcggttatacctacgaggacagcacggtggccgaggtagagaaggcggcagaaaagccagaggaggaggagtcagcggccgaggaggagagcaactcggacgaagatgaggtcatccccgacatcgacgtggaggtggacgtggatgaattgaaccaggagcaggtggcagatctcaacaaacaggccacgacttatggcatggccgacggtgacttcgtcaggatgctccggaaagacaaggaggaggcagaggccatcaagcatgccaaggctcttgaggaggagaaggccatgtactcgatcacgttcatcaccagttttgggggcagcgatgaggaggcagccgcagccgctgctgccgcagcagcatcaggagtcacagggggtgggtaaggggctcaagctgtgatgctgctggttttatctctagtgaaataaagtcaaaagttatttaattcccgtca

SEQ ID NO: 446900 - DNA, 585 bp, Homo sapiens
ggagatccagccccagggacagggaggggaggggaagggtctgcccctgtgagaaccatgtccctctcccctcctcactgtacactggggctccacctgtcactgaaccttctgggacacccaccccctctcccgcctcttctcccccctccccagcccaagctgacgcctcaggagaagctgaaactgaggatgcagaaggcgctgaacaggcagttcaaggcggataagaaggcggcacaagaaaagatgatccagcaggagcatgagcggcaggagcgggaagacgagcttcgagccatggcccgcaagatccgcatgaaggagcgggaacgccgagagaaggagagagaagagtgggaacgccagtacagccggcagagccgctcaccctccccccgatacagtcgagaatacagctcttctcgaaggcgctcaaggtcccgatcccgaagcccccattaccgacattaggcagaagagtggggggtggggaggacaagggggtgggtaaggggctcaagctgtgatgctgctggttttatctctagtgaaataaagtcaaaagttatttaattcccgtca

SEQ ID NO: 446901 - DNA, 1009 bp, Homo sapiens
gcggcctttcatttccgcttccggtgcgggccgcgcgcgagcgcagcggtgggaggcggcgaccagccggttgaggccccaggcttggcctcaccacaatgtggcacgaggctcggaagcatgagcggaagcttcgaggcatgatggtcgactacaagaagagggcggagcggagacgggagtattatgaaaagatcaagaaggacccagcccagttcctgcaggtacatggccgagcttgcaaggtgcacctggattctgcagtcgccctggccgctgagagccctgttaatatgatgccctggcagggggacaccaacaacatgattgaccgattcgatgtccgtgcccacctggaccacatccccgactacaccccccctctgctcaccaccatctccccagaacaggagtcggacgaacggaagtgtaactacgagcgctacagaggcctggtgcagaacgactttgccggcatctcagaggagcagtgcctgtaccagatctacattgatgagttgtacggaggcctccagagacccagcgaagatgagaagaagaagctggcagagaagaaggcttccatcggttatacctacgaggacagcacggtggccgaggtagagaaggcggcagaaaagccagaggaggaggagtcagcggccgaggaggagagcaactcggacgaagatgaggtcatccccgacatcgatcggtggggtcccctctctgccctccccacctgcagtccctgggcatcgtttctgtgtctcgtccctcaccctctgtggggcaccccgtgcttacgaaccgtgtctctctccctaccccgccccagggcacaccagcctcctgctgcccctgtctcactcctgtcctcctccgttccggccttcctctgcctcactcatctctcatttctagggtgctatttctatgatcttttcccctcctaggtgttggctccattctcctccacttgggccggcctctctctgcctttgcccct

SEQ ID NO: 446902 - DNA, 5085 bp, Homo sapiens
  misc_feature (1771)..(1771): n is a, c, g, or t
gttagtttggcctattgcagcgtcccagcatctgtcgcgtttctcatgtgtgattgggctctggcggcccatcctggcggagacttcggctagcaggccccgctgcagaccccaggccggctcgggtctacctgcgccagcgctgtacctgggcgaccttggctttgcccccaccggtgacccggcccgcaggacgtgtgggtgccgctcagctccccccgcctcggccgccgacccccagctccccggcggggcctcctcctgccacgtgacgcccccgccaggggccccagcgccctcctcgcggccgcgccgttccggctcccgagccccgcctgcgcgcggcctcctcggcgcagccatcctcttggctgccgcgggcggcaaagcccacggcatctgccatttgtcattcagcccgtcggtaccgccccgagccttgatttagacacggctggggcgtgctctggcctcactctccgggcgggtgctggacggacggacggacggggcagccgtgctcacagctcagcagcgcggggccttggcgcgcggggcgcttccccgggtcgccgtcatggccgcggaggtggcacgcccgagcggcctcgcctgagctccgggggtcgtcgccccgcaggattgctgtcacgtctaatgtggctgctgcctcgtgtcacatctgaaactcatctgtacctcacttagaaagtggttctgattagacaagacttttcgttgcagtcgacagaaacctaatgggaccattgaagaattccaaacaggcaagtgacaggaacatatttgcatgttagaagaatcagcctggcagcagcattgtgattagaatgaaggggaaccgtccaaaaacagactggggaaccaatatggatctgcctctagcatgcggaaatatctctctacactgacctaactgactcactaagcttgtggtttgtttaaaggaagccacatgaaaattgagtttgggccaatagagtgaactcgttctccattctctagcatccctccccatgcaaccaccctatccctgccaagtttctgggcaccacagattggaaagtagcctcctgtaggtatttgcccatgttaagtggtggggtctctttctgtcttcccttcttggtctcacctgtctggtgtgacaagggaagcatgtgccaaccaaggctagacccttgtgagaccagagcagccccactttcggtaaagcaagcaacctctgcttacttgcccaacacaccctagcttccgtgttccttgccttgtgagttatcttcttgggtacaatttaacacagcgttcccacctccttataactaaaatagctagagggggctttgtgcctcaaaccccaaggagaccatcttggcaatctctgcctctgcaacagggcacttgctccctgggcaactcctttcccaggtcatcttctcccttgacatgcccatcagatttaatagtgtgcctatttggcagaaaaatggggtcccttggttgctgattcttaggaatgtgaggttctcccagccagagctctcagcactaaaagttctagtctctgcgtaatggccggcatatctttggcgtatctaaaatcctcttcagtttccagcagggtctttataagcttcttctgaaggtctcagacattcagccacggaactcaagtggaatttgtttggataacgtgactgatttcaaagcccggaccccttagacgtgcccatttggtgctgcaagtactgancattactacaacatcttacagtcaacaaatttgacacattaaagatttatatcctttcttttgggttaggatcttctctcccctaaagcatctcagtttccagcatgcaatcatttccatcttatggaaatcagccatcccgctccgtgccagcatgctaccctgggaggcacatccaggcttgggaaacgggggtgtcctggatctcatgactccagcagcaccagctgctctctttcctcttccaagtagacttccgttccccccccacttgggtgtttttgtttgttttagcaattcagagctcaagataaagaccttaaagataactttgtgtgtctctccctttctaggtatttgcataggaatcagaggagttaatcttgtctcttctcacaggtttgaatcttcagacaaacttctgggaggactcggtccctgcctcgcagcagatgttccctgtcactcagtagccaatccgggggacccaggacatgccccagctatagtgatgcagattacctttctgctcctgaatcgcacctgtgcctcagactttctcccctcagcttgagactgcatgtaaactgggatgtgtgaaagcaggaagcaaagctagtgacagctgagaggtccatgtctgggtagaaccaggcccacgatgctgcctctcccgtggtctggagttcagctgcagggactctgctgatgtgcccagcaccatcgttctgtttgtgcttaaatggcacagcatttggtcagcacatctgaaaaggaaggtgtgagaagcaaagcccatggccacgttcccctgccagttatgtggcaagacgttcctcaccctggagaagttcacgattcacaattattcccactccagggagcggccgtacaagtgtgtgcagcctgactgtggcaaagcctttgtttccagatataaattgatgaggcatatggctacccattctccccagaaatctcaccagtgtgctcactgtgagaagacgttcaaccggaaagaccacctgaaaaaccacctccagacccacgaccccaacaaaatggcctttgggtgtgaggagtgtgggaagaagtacaacaccatgctgggctataagaggcacctggccctccatgcggccagcagtggggacctcacctgtggggtctgtgccctggagctagggagcaccgaggtgctactggaccacctcaaagcccatgcggaagagaagccccctagcggaaccaaggaaaagaagcaccagtgcgaccactgtgaaagatgcttctacacccggaaggatgtgcgacgccacctggtggtccacacaggatgcaaggacttcctgtgccagttctgtgcccagagatttgggcgcaaggatcacctcacccggcataccaagaagacccactcacaggagctgatgaaagagagcttgcagaccggagaccttctgagcaccttccacaccatctcgccttcattccaactgaaggctgctgccttgcctcctttccctttaggagcttctgcccagaacgggcttgcaagtagcttgccagctgaggtccatagcctcaccctcagtcccccagaacaagccgcccagcctatgcagccgctgccagagtccctggcctccctccacccctcggtatcccctggctctcctccgccaccccttcccaatcacaagtacaacaccacttctacctcatactccccacttgcaagcctgcccctcaaagcagatactaaaggtttttgcaatatcagtttgtttgaggacttgcctctgcaagagcctcagtcacctcaaaagctcaacccaggttttgatctggctaagggaaatgctggtaaagtaaacctgcccaaggagctgcctgcagatgctgtgaacctaacaatacctgcctctctggacctgtcccccctgttgggcttctggcagctgccccctcctgctacccaaaatacctttgggaatagcactcttgccctggggcctggggaatctttgccccacaggttaagctgtctggggcagcagcagcaagaacccccacttgccatgggcactgtgagcctgggccagctccccctgccccccatccctcatgtgttctcagctggcactggctctgccatcctgcctcatttccatcatgcattcagataattgatttttaaagtgtatttttcgtattctggaagatgttttaagaagcattttaaatgtcagttacaatatgagaaagatttggaaaacgagactgggactatggcttattcagtgatgactggcttgagatgataagagaattctcgaactgcatgtattgtgccaatctgtcctgagtgttcatgctttgtaccaaatttaatgaacgcgtgttctgtaatcaaactgcaaatattgtcataaccaacatccaaaatgacggctgctatatataagtgtttgtcatatggaatttaatcgtaagccatgatcataatgttaactaaataactttatgtggcactgcctagtaagggaactatggaaaggtttggatttctccaaatctgggagaattttcaaaataagaaaataacctttatatgatatactatgactaggctgtgtatttcttttcagggatttttctaccttcagggttggatgtagtttagttactattaccatagccaacctgtagttttacatatacattttcttgtggagcaatagagttctccattttacagaagcattttaaatgtagtttgaatattttccacaagatgctgcaatgtgagttatcacttcatttatcttaaagaaagactaaactggttgtcagttacatctgacagaaaaaaaaaaaaaaatcactgtgtaaccaggttaagtggtaaaataatccaggcgtcagtcaaaggcattttgctgactttaatattgattatatttttaacaggaatttaagaaaatattactggaattaaaaatatatatatattaaacaagaattttctttgctctgtctagcttaaactactactcaagctgcttaagttcttaagtattgtttgtaatcaccaataaataagtgcatttgtaattcatcagtcattattagcttttattaaaagaagattacgttttacaatgtaactataatctcttgaatttggtatcttattaatgagttttaaagatgtaaaacctaaccttttttaaagctccattgtcttatgtttttagaggcttttccgtaaacatatatcttacatataataaacttttcaaatcttgcaa

SEQ ID NO: 446903 - DNA, 4991 bp, Homo sapiens
gttagtttggcctattgcagcgtcccagcatctgtcgcgtttctcatgtgtgattgggctctggcggcccatcctggcggagacttcggctagcaggccccgctgcagaccccaggccggctcgggtctacctgcgccagcgctgtacctgggcgaccttggctttgcccccaccggtgacccggcccgcaggacgtgtgggtgccgctcagctccccccgcctcggccgccgacccccagctccccggcggggcctcctcctgccacgtgacgcccccgccaggggccccagcgccctcctcgcggccgcgccgttccggctcccgagccccgcctgcgcgcggcctcctcggcgcagccatcctcttggctgccgcgggcggcaaagcccacggcatctgccatttgtcattcagcccgtcggtaccgccccgagccttgatttagacacggctggggcgtgctctggcctcactctccgggcgggtgctggacggacggacggacggggcagccgtgctcacagctcagcagcgcggggccttggcgcgcggggcgcttccccgggtcgccgtcatggccgcggaggtggcacgcccgagcggcctcgcctgagctccgggggtcgtcgccccgcagggtaggtgtttgggtgctcgcggctgcggcgggcgggctgggggcagcggtggccgtgcattgccgcgctgcgaggacggcgctgggttcgcggccgcgaggagggtgtgcctttgccgcgccgcctacgtgcgggtccgggctccgcggggccgggtgcgggaccccgcagatcgtcacccgcaacccaggcagccccaccgcgagtgccgccggaccccctggacgccgctgccagaggcgttcgcgcctatctggtatgaggtccacagacccgattcttacaacctggcgctctaacctcgccaacgggccaggaaaaaaacagaacaaggaaaagaagaaaaagtctgttccaagtaataatgggactagacagtaactgtttgcactttcgtctcttatggaaaatatgattattttgatgctttagtattacagactgtatcagacatactcttaaaagtatttaaaaacgtggggtcctaaaaatttcctagatcgggacagctgataatgcgacttctgttagtctccgcatccaactttcagggcggaatggggatttctaccttttactgaatatactcctgtaattttgaatattttttctcatcaaatgtgttactttcatgttttaggaaaccaataaaaatcaaaaatagaaacacccagcttaggtcctccttcttccaggaatcctcctctaacccctccctcccaggcaggatcggaggcccctcccgggtgctttctggggcctcactgaggtcctggtcccctaagtcctcccccgcagcccctccgcgtattaacccaccggtctcgctgggctcagagattgcttacttagcacatggtaagtgattaatactgtttaatgaccgagggaaaagataaaatgttctctgatgtttcacgcttttcgctctgaagttaaatagtggtaaatttatatgcgcttagataagaacatttaacagttaaggatctggaaaagttgacgacgtccgatgtccgtgtttcctgatccagcagttgcacgcctgggtattcatccttaagaacaatgtttttcagaatttgaagtccattttagtgggtcgtaaagtcatttaaatggatgatcagaatttgtaaaacacagacggagaatagaacatcagtgtctctcaggtcataggggtgttcgctttatgaatctctctccccctcctcagtttcatacatacacaaatgtgtgtcatgatgtaaaacgtcattccttagtatgagtcatggacaaaaaagtttgaaagccactgccctagataaattttaatacatgtccacaagcagacgtgtacaagaaggttgactgtaatggcagaaaactggatgccgccttcatgcctacctgaaggagaaagataaattatacaccactcataaaaagggcacactgtacagtggccaatgaagtatttttgtgtttcaacacaaatgcctttcagtgttgaaccaaaaaaaaaaaaagttgccggagaatgctgtgtgatatcttctatgtaaaattcagaacctggtggagcaaagctgttgtttagggatgcatgtataggcattaaaagtagtaaagaaaaaaagtcaagctaatggtcatctcctagtggggaggagagggtcaggggctcagagatgctggaaatgctttatcgcctgacctgtgcaatggttacatgggtgtttgctttgtaactctttgttaaatgatacacactgggtttgaatgttacatttccccccaaatatgttaaaatatgggtgttgcaaactgaagaagcctgagtctagggctctccgtctgttattcttatttcctggcttctttttagaaaaaaaaaatcttgctcagggaggagtacctagggaatttatcagtaatgttttatttcataaattccatggtggacataccagtattcattaaattattctttatgtattcttataacttaatttataatatttcaaaaagcatttaggagaaaacatcatttggtgtgtttgctttcccaaaagtcacatttacatgttttgtacacaactggaatattttatatagtaattttagctaaaatcaaattttgttatgaaaaacgaaatactaaaaagtatataaaaatcacagaactttacagactttcagcgttttaaaatgctaacatattgtatttacctcaataatttctgttcctcagttctttcaggccacatttttagtgctcaatagcctcatatgactttaatattttattatattttattatgttatatattttacattatacattatagaacagaatatttccatcattgcagaaatttatattggaaaacattctggatacaaatatttgttatatacttgcagatattaaactgtagacattaatccttatgctttttgtcttaagatactctactattaatgaaatgtattctgaatatttttctaagaatttttaagtttatgttttgtccacattttgttctttaatttacctgagacatgtatatattgagatgtatatattttatgttatgagatcaagcttaattaattttcagattcccacatgaaaaggtaattgtcccaatatcagtgattagcagtgccacttctgtcacatacagtacccagatatgtttgggcttatttccaggctgttaatcctggtttatttgtcatttgaaaatactgcagattttcatttactgctgctttctatgtagtatattgttcagttctaagaatttaagattttttcattgtgatattttttcttcccctaagagatttgtagaaagtagtctagttccaatgtggaaggttttgtgagttatccttttgttactgatttctaatttgcactgtagttagcatacgtgtcaaggccaacaattctttgaaattcgagaattgctttatggttttaactgctccttgtatcatcaagaataatttgtactcacagacttttgaggcaatgtatgtaggtgtgtgtatatatataatatatacacatacactttatatatagattatatataatctctctgtagagtttatataaaaattaaatatatttatataaatgtatatatatatatgaataaaatctcctgtctctaaggtttatgtttcattaattcaggaaagttttgtcttttatctctttattttcacacatttttgtcctattctttaggagctatgattagacttctgttagacttcctcactctatcacccacatcttttaaggtagatttaatgtatttaatatattttttatccatgttgaattctacatatgttttttagttctataatttatgtacaacaaaaaaaagtgtgtagcttggtgaaatttacatatgtgtatacctttgtgattactacccagataaacatataaaacattttcattccttctgccccttcctatcaatggagccactcgcttcccccagtcaactactgtcccgatttctatgaccatgtattattttcaaatgtttttaaacttcatataaacggagtcatacagtttattcttttgttcacattgtattcatccatgttgcatgtataagaatttttgtttgttttttatttttgctttgtatcaagggttggcaaactatggcctgtgggccaattccaacccactgcatgtttctgtttataaaattttattgggctgtgttcacccaccactatgcctggataattttttgtatttttagtacagacggggtttcaccgcgttggccaggatggtcttgatctcctgacctcgtgatccacccgccttggcctcccaaagtgctgggattacaggtgtgagccaccgcgcccagcccactctcaagattttgaagacatttgcctttgttttcctccagaaactttatagttttagctgttggatctgtgattatcaccagttgatttttgtgtatggtgtgagggggggatcaagatttattttgtatatggacatccatctactctacacatttattgaaaaaaacaacacctttcttttcccattgaattgcgtggggactttgttaataaatgaatggtcatatatttgggtctgtttctggactctgttctttccacttggactaattatccattcttgcatcagtaccatacttttttaattactgtagtttatggtaagtcttgacatggtattgtaaaccctccagttttgttcttttaaacaaatgttttgactatttaagtgctttacatttccatataaattttcaaatgtgcttgtcaatgtccatt

SEQ ID NO: 446904 - DNA, 601 bp, Homo sapiens
gcggccgcccggacccgccggccggagctgacccagtgggccacgggctccggactccagaactttccaagcgggggaaacttggcggcgggattgctgtcacgtctaatgtggctgctgcctcgtgtcacatctgaaactcatctgtacctcacttagaaaggtaaatacgtctatgcggaaccctccaactcctgccccccagtgctcctgccatcagtcatggctctgtattcttattctctcctcgcattacagcacaaaccagagccttcgcctcctccatggtagaggggcttatgtcccagaaaagactttgtgagagaatttacatttgaggaacttcaggccttgagggggaaaataaggttgggggattaagatgtggacttaatgaaagcctgtttttcactctaaaaattcaagaggacacgctaagaacgatcattgctatttatctgtcttaaattagaaatcatgggcattgtacagttgatttttacttatcatgacttgctcactagaaacttcgtgatctctttctgttatattttaaaaagatgtttttaaatggttttatcttaaagaaatattaggaaaa

SEQ ID NO: 446905 - DNA, 663 bp, Homo sapiens
gcggccgcccggacccgccggccggagctgacccagtgggccacgggctccggactccagaactttccaagcgggggaaacttggcggcggtaatttttatttttgtttgcagattgttcctgcctgattcataaacatcgtgattggcttttgattgctgtcacgtctaatgtggctgctgcctcgtgtcacatctgaaactcatctgtacctcacttagaaaggtaaatacgtctatgcggaaccctccaactcctgccccccagtgctcctgccatcagtcatggctctgtattcttattctctcctcgcattacagcacaaaccagagccttcgcctcctccatggtagaggggcttatgtcccagaaaagactttgtgagagaatttacatttgaggaacttcaggccttgagggggaaaataaggttgggggattaagatgtggacttaatgaaagcctgtttttcactctaaaaattcaagaggacacgctaagaacgatcattgctatttatctgtcttaaattagaaatcatgggcattgtacagttgatttttacttatcatgacttgctcactagaaacttcgtgatctctttctgttatattttaaaaagatgtttttaaatggttttatcttaaagaaatattaggaaaa

SEQ ID NO: 446906 - DNA, 4462 bp, Homo sapiens
  misc_feature (1624)..(1624): n is a, c, g, or t
attttgtaatttctgcttgaggctgtatttttacttggggtctctgaaaaataaatacaaatacatgaatactccctgcttaccagacagtgtcaagcatttatctcaaattagtttatttaattctcaaaagggtcttgtgatgtgggtgtaatcgttatctccattttacaggacaggaagctgaggtagagagagaaaaccaattgcatgaggtctctaagtggctccaggtggcaccaagattggaatctaagctttctggcaccatactgtggtcttaaccacatcactgtatagcctctctaaaactaaagatcccttaaggactcaaatgggtgcctctggaatgctgggatatggcattatagcatagcatgtcgatggagagagatttttgacccctggtatccttgaactcatattctgattaggtaaatgtcagcattcatagtaccaatgtgttttttcttgatgctttttttttttttaaacttttgatattgtttttcctttaggattgctgtcacgtctaatgtggctgctgcctcgtgtcacatctgaaactcatctgtacctcacttagaaaggttgcagtcgacagaaacctaatgggaccattgaagaattccaaacaggcaagtgacaggaacatatttgcatgttagaagaatcagcctggcagcagcattgtgattagaatgaaggggaaccgtccaaaaacagactggggaaccaatatggatctgcctctagcatgcggaaatatctctctacactgacctaactgactcactaagcttgtggtttgtttaaaggaagccacatgaaaattgagtttgggccaatagagtgaactcgttctccattctctagcatccctccccatgcaaccaccctatccctgccaagtttctgggcaccacagattggaaagtagcctcctgtaggtatttgcccatgttaagtggtggggtctctttctgtcttcccttcttggtctcacctgtctggtgtgacaagggaagcatgtgccaaccaaggctagacccttgtgagaccagagcagccccactttcggtaaagcaagcaacctctgcttacttgcccaacacaccctagcttccgtgttccttgccttgtgagttatcttcttgggtacaatttaacacagcgttcccacctccttataactaaaatagctagagggggctttgtgcctcaaaccccaaggagaccatcttggcaatctctgcctctgcaacagggcacttgctccctgggcaactcctttcccaggtcatcttctcccttgacatgcccatcagatttaatagtgtgcctatttggcagaaaaatggggtcccttggttgctgattcttaggaatgtgaggttctcccagccagagctctcagcactaaaagttctagtctctgcgtaatggccggcatatctttggcgtatctaaaatcctcttcagtttccagcagggtctttataagcttcttctgaaggtctcagacattcagccacggaactcaagtggaatttgtttggataacgtgactgatttcaaagcccggaccccttagacgtgcccatttggtgctgcaagtactgancattactacaacatcttacagtcaacaaatttgacacattaaagatttatatcctttcttttgggttaggatcttctctcccctaaagcatctcagtttccagcatgcaatcatttccatcttatggaaatcagccatcccgctccgtgccagcatgctaccctgggaggcacatccaggcttgggaaacgggggtgtcctggatctcatgactccagcagcaccagctgctctctttcctcttccaagtagacttccgttccccccccacttgggtgtttttgtttgttttagcaattcagagctcaagataaagaccttaaagataactttgtgtgtctctccctttctaggtatttgcataggaatcagaggagttaatcttgtctcttctcacaggtttgaatcttcagacaaacttctgggaggactcggtccctgcctcgcagcagatgttccctgtcactcagtaggcatatggctacccattctccccagaaatctcaccagtgtgctcactgtgagaagacgttcaaccggaaagaccacctgaaaaaccacctccagacccacgaccccaacaaaatggcctttgggtgtgaggagtgtgggaagaagtacaacaccatgctgggctataagaggcacctggccctccatgcggccagcagtggggacctcacctgtggggtctgtgccctggagctagggagcaccgaggtgctactggaccacctcaaagcccatgcggaagagaagccccctagcggaaccaaggaaaagaagcaccagtgcgaccactgtgaaagatgcttctacacccggaaggatgtgcgacgccacctggtggtccacacaggatgcaaggacttcctgtgccagttctgtgcccagagatttgggcgcaaggatcacctcacccggcataccaagaagacccactcacaggagctgatgaaagagagcttgcagaccggagaccttctgagcaccttccacaccatctcgccttcattccaactgaaggctgctgccttgcctcctttccctttaggagcttctgcccagaacgggcttgcaagtagcttgccagctgaggtccatagcctcaccctcagtcccccagaacaagccgcccagcctatgcagccgctgccagagtccctggcctccctccacccctcggtatcccctggctctcctccgccaccccttcccaatcacaagtacaacaccacttctacctcatactccccacttgcaagcctgcccctcaaagcagatactaaaggtttttgcaatatcagtttgtttgaggacttgcctctgcaagagcctcagtcacctcaaaagctcaacccaggttttgatctggctaagggaaatgctggtaaagtaaacctgcccaaggagctgcctgcagatgctgtgaacctaacaatacctgcctctctggacctgtcccccctgttgggcttctggcagctgccccctcctgctacccaaaatacctttgggaatagcactcttgccctggggcctggggaatctttgccccacaggttaagctgtctggggcagcagcagcaagaacccccacttgccatgggcactgtgagcctgggccagctccccctgccccccatccctcatgtgttctcagctggcactggctctgccatcctgcctcatttccatcatgcattcagataattgatttttaaagtgtatttttcgtattctggaagatgttttaagaagcattttaaatgtcagttacaatatgagaaagatttggaaaacgagactgggactatggcttattcagtgatgactggcttgagatgataagagaattctcgaactgcatgtattgtgccaatctgtcctgagtgttcatgctttgtaccaaatttaatgaacgcgtgttctgtaatcaaactgcaaatattgtcataaccaacatccaaaatgacggctgctatatataagtgtttgtcatatggaatttaatcgtaagccatgatcataatgttaactaaataactttatgtggcactgcctagtaagggaactatggaaaggtttggatttctccaaatctgggagaattttcaaaataagaaaataacctttatatgatatactatgactaggctgtgtatttcttttcagggatttttctaccttcagggttggatgtagtttagttactattaccatagccaacctgtagttttacatatacattttcttgtggagcaatagagttctccattttacagaagcattttaaatgtagtttgaatattttccacaagatgctgcaatgtgagttatcacttcatttatcttaaagaaagactaaactggttgtcagttacatctgacagaaaaaaaaaaaaaaatcactgtgtaaccaggttaagtggtaaaataatccaggcgtcagtcaaaggcattttgctgactttaatattgattatatttttaacaggaatttaagaaaatattactggaattaaaaatatatatatattaaacaagaattttctttgctctgtctagcttaaactactactcaagctgcttaagttcttaagtattgtttgtaatcaccaataaataagtgcatttgtaattcatcagtcattattagcttttattaaaagaagattacgttttacaatgtaactataatctcttgaatttggtatcttattaatgagttttaaagatgtaaaacctaaccttttttaaagctccattgtcttatgtttttagaggcttttccgtaaacatatatcttacatataataaacttttcaaatcttgcaa

SEQ ID NO: 446907 - DNA, 3822 bp, Homo sapiens
  misc_feature (30)..(30): n is a, c, g, or t
cggcattttgggacaactgtttttaacgtnaataaatcacttaggcgagatataaattggctttgttccatagcagatttgcctttgtactagttaagaaaatcctgaaaagctttccctgtaagaggatcagttggttggaatagccttggtaggaagaagccaagtttgataattacttggtgaacggaaatgctggtttccaaatgctcatcagggttcagtggcacaaagctggctgtagacttggcttctgtagatttggtaaaaacgtaaattcctggggtcccagtgatgctgttttagtctgtactgatttgccctgtggccacccaggaatctgtatttttaaaagttttccatgctgattctaatgcatagccaggtttagtaaccatttaattcagtattcaacttagagacttcaaccttcttgcactgcaaatttgataaatctttgtttatatgaatctcctttgttgagtgccaactggttatttgctgactttctttcaattcagaatttgttttaggttctgttattgcatagatttgcatacctgttttatggtattttaatactgttggttttaaaaaataccatttcctctgagtgctgttctgaatatattatgtaagcaattttgtgtgttcttttttttccacttgcataaagcaggggaaaagttgagagtttttcttaatccagttgcaagtaggacaaaggatatgagtgtttaaagatcatctattaaaatgcatgaaaaaacactagaaaatctcctgtgcacatcgccagtcgtgtgtgtgctctagaagtgaagttcagggggtaacataatggaggaatgttttcctagcttcattccctgacgatgtacaaggtctcttctgtctcttctcacaggtttgaatcttcagacaaacttctgggaggactcggtccctgcctcgcagcagatgttccctgtcactcagtagccaatccgggggacccaggacatgccccagctatagtgatgcagattacctttctgctcctgaatcgcacctgtgcctcagactttctcccctcagcttgagactgcatgtaaactgggatgtgtgaaagcaggaagcaaagctagtgacagctgagaggtccatgtctgggtagaaccaggcccacgatgctgcctctcccgtggtctggagttcagctgcagggactctgctgatgtgcccagcaccatcgttctgtttgtgcttaaatggcacagcatttggtcagcacatctgaaaaggaaggtgtgagaagcaaagcccatggccacgttcccctgccagttatgtggcaagacgttcctcaccctggagaagttcacgattcacaattattcccactccagggagcggccgtacaagtgtgtgcagcctgactgtggcaaagcctttgtttccagatataaattgatgaggcatatggctacccattctccccagaaatctcaccagtgtgctcactgtgagaagacgttcaaccggaaagaccacctgaaaaaccacctccagacccacgaccccaacaaaatggcctttgggtgtgaggagtgtgggaagaagtacaacaccatgctgggctataagaggcacctggccctccatgcggccagcagtggggacctcacctgtggggtctgtgccctggagctagggagcaccgaggtgctactggaccacctcaaagcccatgcggaagagaagccccctagcggaaccaaggaaaagaagcaccagtgcgaccactgtgaaagatgcttctacacccggaaggatgtgcgacgccacctggtggtccacacaggatgcaaggacttcctgtgccagttctgtgcccagagatttgggcgcaaggatcacctcacccggcataccaagaagacccactcacaggagctgatgaaagagagcttgcagaccggagaccttctgagcaccttccacaccatctcgccttcattccaactgaaggctgctgccttgcctcctttccctttaggagcttctgcccagaacgggcttgcaagtagcttgccagctgaggtccatagcctcaccctcagtcccccagaacaagccgcccagcctatgcagccgctgccagagtccctggcctccctccacccctcggtatcccctggctctcctccgccaccccttcccaatcacaagtacaacaccacttctacctcatactccccacttgcaagcctgcccctcaaagcagatactaaaggtttttgcaatatcagtttgtttgaggacttgcctctgcaagagcctcagtcacctcaaaagctcaacccaggttttgatctggctaagggaaatgctggtaaagtaaacctgcccaaggagctgcctgcagatgctgtgaacctaacaatacctgcctctctggacctgtcccccctgttgggcttctggcagctgccccctcctgctacccaaaatacctttgggaatagcactcttgccctggggcctggggaatctttgccccacaggttaagctgtctggggcagcagcagcaagaacccccacttgccatgggcactgtgagcctgggccagctccccctgccccccatccctcatgtgttctcagctggcactggctctgccatcctgcctcatttccatcatgcattcagataattgatttttaaagtgtatttttcgtattctggaagatgttttaagaagcattttaaatgtcagttacaatatgagaaagatttggaaaacgagactgggactatggcttattcagtgatgactggcttgagatgataagagaattctcgaactgcatgtattgtgccaatctgtcctgagtgttcatgctttgtaccaaatttaatgaacgcgtgttctgtaatcaaactgcaaatattgtcataaccaacatccaaaatgacggctgctatatataagtgtttgtcatatggaatttaatcgtaagccatgatcataatgttaactaaataactttatgtggcactgcctagtaagggaactatggaaaggtttggatttctccaaatctgggagaattttcaaaataagaaaataacctttatatgatatactatgactaggctgtgtatttcttttcagggatttttctaccttcagggttggatgtagtttagttactattaccatagccaacctgtagttttacatatacattttcttgtggagcaatagagttctccattttacagaagcattttaaatgtagtttgaatattttccacaagatgctgcaatgtgagttatcacttcatttatcttaaagaaagactaaactggttgtcagttacatctgacagaaaaaaaaaaaaaaatcactgtgtaaccaggttaagtggtaaaataatccaggcgtcagtcaaaggcattttgctgactttaatattgattatatttttaacaggaatttaagaaaatattactggaattaaaaatatatatatattaaacaagaattttctttgctctgtctagcttaaactactactcaagctgcttaagttcttaagtattgtttgtaatcaccaataaataagtgcatttgtaattcatcagtcattattagcttttattaaaagaagattacgttttacaatgtaactataatctcttgaatttggtatcttattaatgagttttaaagatgtaaaacctaaccttttttaaagctccattgtcttatgtttttagaggcttttccgtaaacatatatcttacatataataaacttttcaaatcttgcaa

SEQ ID NO: 446908 - DNA, 3245 bp, Homo sapiens
gttagtttggcctattgcagcgtcccagcatctgtcgcgtttctcatgtgtgattgggctctggcggcccatcctggcggagacttcggctagcaggccccgctgcagaccccaggccggctcgggtctacctgcgccagcgctgtacctgggcgaccttggctttgcccccaccggtgacccggcccgcaggacgtgtgggtgccgctcagctccccccgcctcggccgccgacccccagctccccggcggggcctcctcctgccacgtgacgcccccgccaggggccccagcgccctcctcgcggccgcgccgttccggctcccgagccccgcctgcgcgcggcctcctcggcgcagccatcctcttggctgccgcgggcggcaaagcccacggcatctgccatttgtcattcagcccgtcggtaccgccccgagccttgatttagacacggctggggcgtgctctggcctcactctccgggcgggtgctggacggacggacggacggggcagccgtgctcacagctcagcagcgcggggccttggcgcgcggggcgcttccccgggtcgccgtcatggccgcggaggtggcacgcccgagcggcctcgcctgagctccgggggtcgtcgccccgcaggattgctgtcacgtctaatgtggctgctgcctcgtgtcacatctgaaactcatctgtacctcacttagaaaggttgcagtcgacagaaacctaatgggaccattgaagaattccaaacaggtatttgcataggaatcagaggagttaatcttgtctcttctcacaggtttgaatcttcagacaaacttctgggaggactcggtccctgcctcgcagcagatgttccctgtcactcagtaggcatatggctacccattctccccagaaatctcaccagtgtgctcactgtgagaagacgttcaaccggaaagaccacctgaaaaaccacctccagacccacgaccccaacaaaatggcctttgggtgtgaggagtgtgggaagaagtacaacaccatgctgggctataagaggcacctggccctccatgcggccagcagtggggacctcacctgtggggtctgtgccctggagctagggagcaccgaggtgctactggaccacctcaaagcccatgcggaagagaagccccctagcggaaccaaggaaaagaagcaccagtgcgaccactgtgaaagatgcttctacacccggaaggatgtgcgacgccacctggtggtccacacaggatgcaaggacttcctgtgccagttctgtgcccagagatttgggcgcaaggatcacctcacccggcataccaagaagacccactcacaggagctgatgaaagagagcttgcagaccggagaccttctgagcaccttccacaccatctcgccttcattccaactgaaggctgctgccttgcctcctttccctttaggagcttctgcccagaacgggcttgcaagtagcttgccagctgaggtccatagcctcaccctcagtcccccagaacaagccgcccagcctatgcagccgctgccagagtccctggcctccctccacccctcggtatcccctggctctcctccgccaccccttcccaatcacaagtacaacaccacttctacctcatactccccacttgcaagcctgcccctcaaagcagatactaaaggtttttgcaatatcagtttgtttgaggacttgcctctgcaagagcctcagtcacctcaaaagctcaacccaggttttgatctggctaagggaaatgctggtaaagtaaacctgcccaaggagctgcctgcagatgctgtgaacctaacaatacctgcctctctggacctgtcccccctgttgggcttctggcagctgccccctcctgctacccaaaatacctttgggaatagcactcttgccctggggcctggggaatctttgccccacaggttaagctgtctggggcagcagcagcaagaacccccacttgccatgggcactgtgagcctgggccagctccccctgccccccatccctcatgtgttctcagctggcactggctctgccatcctgcctcatttccatcatgcattcagataattgatttttaaagtgtatttttcgtattctggaagatgttttaagaagcattttaaatgtcagttacaatatgagaaagatttggaaaacgagactgggactatggcttattcagtgatgactggcttgagatgataagagaattctcgaactgcatgtattgtgccaatctgtcctgagtgttcatgctttgtaccaaatttaatgaacgcgtgttctgtaatcaaactgcaaatattgtcataaccaacatccaaaatgacggctgctatatataagtgtttgtcatatggaatttaatcgtaagccatgatcataatgttaactaaataactttatgtggcactgcctagtaagggaactatggaaaggtttggatttctccaaatctgggagaattttcaaaataagaaaataacctttatatgatatactatgactaggctgtgtatttcttttcagggatttttctaccttcagggttggatgtagtttagttactattaccatagccaacctgtagttttacatatacattttcttgtggagcaatagagttctccattttacagaagcattttaaatgtagtttgaatattttccacaagatgctgcaatgtgagttatcacttcatttatcttaaagaaagactaaactggttgtcagttacatctgacagaaaaaaaaaaaaaaatcactgtgtaaccaggttaagtggtaaaataatccaggcgtcagtcaaaggcattttgctgactttaatattgattatatttttaacaggaatttaagaaaatattactggaattaaaaatatatatatattaaacaagaattttctttgctctgtctagcttaaactactactcaagctgcttaagttcttaagtattgtttgtaatcaccaataaataagtgcatttgtaattcatcagtcattattagcttttattaaaagaagattacgttttacaatgtaactataatctcttgaatttggtatcttattaatgagttttaaagatgtaaaacctaaccttttttaaagctccattgtcttatgtttttagaggcttttccgtaaacatatatcttacatataataaacttttcaaatcttgcaa

SEQ ID NO: 446909 - DNA, 3378 bp, Homo sapiens
  misc_feature (30)..(30): n is a, c, g, or t
cggcattttgggacaactgtttttaacgtnaataaatcacttaggcgagatataaattggctttgttccatagcagatttgcctttgtactagttaagaaaatcctgaaaagctttccctgtaagaggatcagttggttggaatagccttggtaggaagaagccaagtttgataattacttggtgaacggaaatgctggtttccaaatgctcatcagggttcagtggcacaaagctggctgtagacttggcttctgtagatttggtaaaaacgtaaattcctggggtcccagtgatgctgttttagtctgtactgatttgccctgtggccacccaggaatctgtatttttaaaagttttccatgctgattctaatgcatagccaggtttagtaaccatttaattcagtattcaacttagagacttcaaccttcttgcactgcaaatttgataaatctttgtttatatgaatctcctttgttgagtgccaactggttatttgctgactttctttcaattcagaatttgttttaggttctgttattgcatagatttgcatacctgttttatggtattttaatactgttggttttaaaaaataccatttcctctgagtgctgttctgaatatattatgtaagcaattttgtgtgttcttttttttccacttgcataaagcaggggaaaagttgagagtttttcttaatccagttgcaagtaggacaaaggatatgagtgtttaaagatcatctattaaaatgcatgaaaaaacactagaaaatctcctgtgcacatcgccagtcgtgtgtgtgctctagaagtgaagttcagggggtaacataatggaggaatgttttcctagcttcattccctgacgatgtacaaggtctcttctgtctcttctcacaggtttgaatcttcagacaaacttctgggaggactcggtccctgcctcgcagcagatgttccctgtcactcagtagccaatccgggggacccaggacatgccccagctatagtgatgcagattacctttctgctcctgaatcgcacctgtgcctcagactttctcccctcagcttgagactgcatgtaaactgggatgtgtgaaagcaggaagcaaagctagtgacagctgagaggtccatgtctgggtagaaccaggcccacgatgctgcctctcccgtggtctggagttcagctgcagggactctgctgatgtgcccagcaccatcgttctgtttgtgcttaaatggcacagcatttggtcagcacatctgaaaaggaaggtgtgagaagcaaagcccatggccacgttcccctgccagttatgtggcaagacgttcctcaccctggagaagttcacgattcacaattattcccactccagggagcggccgtacaagtgtgtgcagcctgactgtggcaaagcctttgtttccagatataaattgatgaggcatatggctacccattctccccagaaatctcaccagtgtgctcactgtgagaagacgttcaaccggaaagaccacctgaaaaaccacctccagacccacgaccccaacaaaatggcctttgggtgtgaggagtgtgggaagaagtacaacaccatgctgggctataagaggcacctggccctccatgcggccagcagtggggacctcacctgtggggtctgtgccctggagctagggagcaccgaggtgctactggaccacctcaaagcccatgcggaagagaagccccctagcggaaccaaggaaaagaagcaccagtgcgaccactgtgaaagatgcttctacacccggaaggatgtgcgacgccacctggtggtccacacaggatgcaaggacttcctgtgccagttctgtgcccagagatttgggcgcaaggatcacctcacccggcataccaagaagacccactcacaggagctgatgaaagagagcttgcagaccggagaccttctgagcaccttccacaccatctcgccttcattccaactgaaggctgctgccttgcctcctttccctttaggagcttctgcccagaacgggcttgcaagtagcttgccagctgaggtccatagcctcaccctcagtcccccagaacaagccgcccagcctatgcagccgctgccagagtccctggcctccctccacccctcggtatcccctggctctcctccgccaccccttcccaatcacaagtacaacaccacttctacctcatactccccacttgcaagcctgcccctcaaagcagatactaaaggtttttgcaatatcagtttgtttgaggacttgcctctgcaagagcctcagtcacctcaaaagctcaacccaggttttgatctggctaagggaaatgctggtaaagtaaacctgcccaaggagctgcctgcagatgctgtgaacctaacaatacctgcctctctggacctgtcccccctgttgggcttctggcagctgccccctcctgctacccaaaatacctttgggaatagcactcttgccctggggcctggggaatctttgccccacaggttaagctgtctggggcagcagcagcaagaacccccacttgccatgggcactgtgagcctgggccagctccccctgccccccatccctcatgtgttctcagctggcactggctctgccatcctgcctcatttccatcatgcattcagataattgatttttaaagtgtatttttcgtattctggaagatgttttaagaagcattttaaatgtcagttacaatatgagaaagatttggaaaacgagactgggactatggcttattcagtgatgactggcttgagatgataagagaattctcgaactgcatgtattgtgccaatctgtcctgagtgttcatgctttgtaccaaatttaatgaacgcgtgttctgtaatcaaactgcaaatattgtcataaccaacatccaaaatgacggctgctatatataagtgtttgtcatatggaatttaatcgtaagccatgatcataatgttaactaaataactttatgtggcactgcctagtaagggaactatggaaaggtttggatttctccaaatctgggagaattttcaaaataagaaaataacctttatatgatatactatgactaggctgtgtatttcttttcagggatttttctaccttcagggttggatgtagtttagttactattaccatagccaacctgtagttttacatatacattttcttgtggagcaatagagttctccattttacagaagcattttaaatgtagtttgaatattttccacaagatgctgcaatgtgagttatcacttcatttatcttaaagaaagactaaactggttgtcagttacatctgacaga

SEQ ID NO: 446910 - DNA, 4436 bp, Homo sapiens
  misc_feature (30)..(30): n is a, c, g, or t
cggcattttgggacaactgtttttaacgtnaataaatcacttaggcgagatataaattggctttgttccatagcagatttgcctttgtactagttaagaaaatcctgaaaagctttccctgtaagaggatcagttggttggaatagccttggtaggaagaagccaagtttgataattacttggtgaacggaaatgctggtttccaaatgctcatcagggttcagtggcacaaagctggctgtagacttggcttctgtagatttggtaaaaacgtaaattcctggggtcccagtgatgctgttttagtctgtactgatttgccctgtggccacccaggaatctgtatttttaaaagttttccatgctgattctaatgcatagccaggtttagtaaccatttaattcagtattcaacttagagacttcaaccttcttgcactgcaaatttgataaatctttgtttatatgaatctcctttgttgagtgccaactggttatttgctgactttctttcaattcagaatttgttttaggttctgttattgcatagatttgcatacctgttttatggtattttaatactgttggttttaaaaaataccatttcctctgagtgctgttctgaatatattatgtaagcaattttgtgtgttcttttttttccacttgcataaagcaggggaaaagttgagagtttttcttaatccagttgcaagtaggacaaaggatatgagtgtttaaagatcatctattaaaatgcatgaaaaaacactagaaaatctcctgtgcacatcgccagtcgtgtgtgtgctctagaagtgaagttcagggggtaacataatggaggaatgttttcctagcttcattccctgacgatgtacaaggtctcttctgtctcttctcacaggtttgaatcttcagacaaacttctgggaggactcggtccctgcctcgcagcagatgttccctgtcactcagtagccaatccgggggacccaggacatgccccagctatagtgatgcagattacctttctgctcctgaatcgcacctgtgcctcagactttctcccctcagcttgagactgcatgtaaactgggatgtgtgaaagcaggaagcaaagctagtgacagctgagaggtccatgtctgggtagaaccaggcccacgatgctgcctctcccgtggtctggagttcagctgcagggactctgctgatgtgcccagcaccatcgttctgtttgtgcttaaatggcacagcatttggtcagcacatctgaaaaggaaggtgtgagaagcaaagcccatggccacgttcccctgccagttatgtggcaagacgttcctcaccctggagaagttcacgattcacaattattcccactccagggagcggccgtacaagtgtgtgcagcctgactgtggcaaagcctttgtttccagatataaattgatgaggcatatggctacccattctccccagaaatctcaccagtgtgctcactgtgagaagacgttcaaccggaaagaccacctgaaaaaccacctccagacccacgaccccaacaaaatggcctttgggtgtgaggagtgtgggaagaagtacaacaccatgctgggctataagaggcacctggccctccatgcggccagcagtggggacctcacctgtggggtctgtgccctggagctagggagcaccgaggtgctactggaccacctcaaagcccatgcggaagagaagccccctagcggaaccaaggaaaagaagcaccagtgcgaccactgtgaaagatgcttctacacccggaaggatgtgcgacgccacctggtggtccacacaggatgcaaggacttcctgtgccagttctgtgcccagagatttgggcgcaaggatcacctcacccggcataccaagaagacccactcacaggagctgatgaaagagagcttgcagaccggagaccttctgagcaccttccacaccatctcgccttcattccaactgaaggctgctgccttgcctcctttccctttaggagcttctgcccagaacgggcttgcaagtagcttgccagctgaggtccatagcctcaccctcagtcccccagaacaagccgcccagcctatgcagccgctgccagagtccctggcctccctccacccctcggtatcccctggctctcctccgccaccccttcccaatcacaagtacaacaccacttctacctcatactccccacttgcaagcctgcccctcaaagcagatactaaaggtttttgcaatatcagtttgtttgaggacttgcctctgcaagagcctcagtcacctcaaaagctcaacccaggttttgatctggctaagggaaatgctggtaaagtaaacctgcccaaggagctgcctgcagatgctgtgaacctaacaatacctgcctctctggacctgtcccccctgttgggcttctggcagctgccccctcctgctacccaaaatacctttgggaatagcactcttgccctggggcctggggaatctttgccccacaggttaagctgtctggggcagcagcagcaagaacccccacttgccatgggcactgtgagcctgggccagctccccctgccccccatccctcatgtgttctcagctggcactggctctgccatcctgcctcatttccatcatgcattcagataattgatttttaaagtgtatttttcgtattctggaagatgttttaagaagcattttaaatgtcagttacaatatgagaaagatttggaaaacgagactgggactatggcttattcagtgatgactggcttgagatgataagagaattctcgaactgcatgtattgtgccaatctgtcctgagtgttcatgctttgtaccaaatttaatgaacgcgtgttctgtaatcaaactgcaaatattgtcataaccaacatccaaaatgacggctgctatatataagtgtttgtcatatggaatttaatcgtaagccatgatcataatgttaactaaataactttatgtggcactgcctagtaagggaactatggaaaggtttggatttctccaaatctgggagaattttcaaaataagaaaataacctttatatgatatactatgactaggctgtgtatttcttttcagggatttttctaccttcagggttggatgtagtttagttactattaccatagccaacctgtagttttacatatacattttcttgtggagcaatagagttctccattttacagaagcattttaaatgtagtttgaatattttccacaagatgctgcaatgtgagttatcacttcatttatcttaaagaaagactaaactggttgtcagttacatctgacagaaaaaaaaaaaaaaatcactgtgtaaccaggttaagtggtaaaataatccaggcgtcagtcaaaggcattttgctgactttaatattgattatatttttaacaggaatttaagaaaatattactggaattaaaaatatatatatattaaacaagaattttctttgctctgtctagcttaaactactactcaagctgcttaagttcttaagtattgtttgtaatcaccaataaataagtgcatttgtaattcatcagtcattattagcttttattaaaagaagattacgttttacaatgtaactataatctcttgaatttggtatcttattaatgagttttaaagatgtaaaacctaaccttttttaaagctccattgtcttatgtttttagaggcttttccgtaaacatatatcttacatataataaacttttcaaatcttgcaaaaaaaaaaaaaaaaaaaaaaaaaaaaaaaaaaaaaaaaaaaaaaaaaaaaaaaaaaaaaaaaaaaaaaaaaaaaaaaatgaccaaagataaacaaataaaaacattggcaaaaaccaagacgtctcccattattaaaccttatgaagcttgatctcccatttccccttttgcgggctgtcataaaaaggcccgaggccgaaacctttcgcaattgtaagcaattctcaatgctgaatgcaaattgaaattgttaagctttggataaaatttgaattaccgttcgattctttctgatcatcttttaacctatagcccatagtccggaaaagtccattatcctttataggtaataacaccttaacggatttagggttgtatcgagttagaaacctgaattccacttgttaattatcgagggaacttcgacgtctaaaggtcaaagatccgaatattatggtcaagtccaactccctatacccttaaccctttccctatattaatgtggttcagacgtcctatatgcgtcttaaaatctgaaacctttaaagcgaagacggccgccttaaaaatttacacgttgaagctccattaacacttggtcctgaatcgagtg

SEQ ID NO: 446911 - DNA, 1227 bp, Homo sapiens
aactctgaactttttattggcctcctgctccccaaagggtaccctgcttctgctggcactggctctgccatcctgcctcatttccatcatgcattcagataattgatttttaaagtgtatttttcgtattctggaagatgttttaagaagcattttaaatgtcagttacaatatgagaaagatttggaaaacgagactgggactatggcttattcagtgatgactggcttgagatgataagagaattctcgaactgcatgtattgtgccaatctgtcctgagtgttcatgctttgtaccaaatttaatgaacgcgtgttctgtaatcaaactgcaaatattgtcataaccaacatccaaaatgacggctgctatatataagtgtttgtcatatggaatttaatcgtaagccatgatcataatgttaactaaataactttatgtggcactgcctagtaagggaactatggaaaggtttggatttctccaaatctgggagaattttcaaaataagaaaataacctttatatgatatactatgactaggctgtgtatttcttttcagggatttttctaccttcagggttggatgtagtttagttactattaccatagccaacctgtagttttacatatacattttcttgtggagcaatagagttctccattttacagaagcattttaaatgtagtttgaatattttccacaagatgctgcaatgtgagttatcacttcatttatcttaaagaaagactaaactggttgtcagttacatctgacagaaaaaaaaaaaaaaatcactgtgtaaccaggttaagtggtaaaataatccaggcgtcagtcaaaggcattttgctgactttaatattgattatatttttaacaggaatttaagaaaatattactggaattaaaaatatatatatattaaacaagaattttctttgctctgtctagcttaaactactactcaagctgcttaagttcttaagtattgtttgtaatcaccaataaataagtgcatttgtaattcatcagtcattattagcttttattaaaagaagattacgttttacaatgtaactataatctcttgaatttggtatcttattaatgagttttaaagatgtaaaacctaaccttttttaaagctccattgtcttatgtttttagaggcttttccgtaaacatatatcttacatataataaacttttcaaatcttgcaa

SEQ ID NO: 446912 - DNA, 1059 bp, Homo sapiens
  misc_feature (30)..(30): n is a, c, g, or t
cggcattttgggacaactgtttttaacgtnaataaatcacttaggcgagatataaattggctttgttccatagcagatttgcctttgtactagttaagaaaatcctgaaaagctttccctgtaagaggatcagttggttggaatagccttggtaggaagaagccaagtttgataattacttggtgaacggaaatgctggtttccaaatgctcatcagggttcagtggcacaaagctggctgtagacttggcttctgtagatttggtaaaaacgtaaattcctggggtcccagtgatgctgttttagtctgtactgatttgccctgtggccacccaggaatctgtatttttaaaagttttccatgctgattctaatgcatagccaggtttagtaaccatttaattcagtattcaacttagagacttcaaccttcttgcactgcaaatttgataaatctttgtttatatgaatctcctttgttgagtgccaactggttatttgctgactttctttcaattcagaatttgttttaggttctgttattgcatagatttgcatacctgttttatggtattttaatactgttggttttaaaaaataccatttcctctgagtgctgttctgaatatattatgtaagcaattttgtgtgttcttttttttccacttgcataaagcaggggaaaagttgagagtttttcttaatccagttgcaagtaggacaaaggatatgagtgtttaaagatcatctattaaaatgcatgaaaaaacactagaaaatctcctgtgcacatcgccagtcgtgtgtgtgctctagaagtgaagttcagggggtaacataatggaggaatgttttcctagcttcattccctgacgatgtacaaggtctcttctgtctcttctcacaggtttgaatcttcagacaaacttctgggaggactcggtccctgcctcgcagcagatgttccctgtcactcagtagccaatccgggtggacccaggtacatgccccagcccacgtgcttcagcagtcctcgggctaccgtagctcgcaacttcg

SEQ ID NO: 446913 - DNA, 404 bp, Homo sapiens
tatcaatggagccactcgcttcccccagtcaactactgtcccgatttctatgaccatgtattattttcaaatgtttttaaacttcatataaacggagtcatacagtttattcttttgttcacattgtattcatccatgttgcatgtataagaatttttgtttgttttttatttttgctttgtatcaagggttggcaaactatggcctgtgggccaattccaacccactgcatgtttctgtttataaaattttattgggctgtgttccatggctcctgtctataattccagccagtcaagaggctgaggcaggagaatctcttgagctcaggagttcgagcttacagtgaactacgatcatgccactgcactgcagcctgggtgacagtgagatgaccccatctt

SEQ ID NO: 446914 - DNA, 3998 bp, Homo sapiens
gttagtttggcctattgcagcgtcccagcatctgtcgcgtttctcatgtgtgattgggctctggcggcccatcctggcggagacttcggctagcaggccccgctgcagaccccaggccggctcgggtctacctgcgccagcgctgtacctgggcgaccttggctttgcccccaccggtgacccggcccgcaggacgtgtgggtgccgctcagctccccccgcctcggccgccgacccccagctccccggcggggcctcctcctgccacgtgacgcccccgccaggggccccagcgccctcctcgcggccgcgccgttccggctcccgagccccgcctgcgcgcggcctcctcggcgcagccatcctcttggctgccgcgggcggcaaagcccacggcatctgccatttgtcattcagcccgtcggtaccgccccgagccttgatttagacacggctggggcgtgctctggcctcactctccgggcgggtgctggacggacggacggacggggcagccgtgctcacagctcagcagcgcggggccttggcgcgcggggcgcttccccgggtcgccgtcatggccgcggaggtggcacgcccgagcggcctcgcctgagctccgggggtcgtcgccccgcagattgttcctgcctgattcataaacatcgtgattggcttttgattgctgtcacgtctaatgtggctgctgcctcgtgtcacatctgaaactcatctgtacctcacttagaaagtttctttctataacacaagcctgaacatattgctctcctgattaacaactttcagtggttctgattagacaagacttttcgttgcagtcgacagaaacctaatgggaccattgaagaattccaaacagggtctttataagcttcttctgaaggtctcagacattcagccacggaactcaagtggaatttgtttggataacgtgactgatttcaaagcccggaccccttagacgtgcccatttggtgctgcaagtatttgcataggaatcagaggagttaatcttcttcattccctgacgatgtacaaggtctcttctgtctcttctcacaggtttgaatcttcagacaaacttctgggaggactcggtccctgcctcgcagcagatgttccctgtcactcagtagccaatccgggggacccaggacatgccccagctatagtgatgcagattacctttctgctcctgaatcgcacctgtgcctcagactttctcccctcagcttgagactgcatgtaaactgggatgtgtgaaagcaggaagcaaagctagtgacagctgagaggtccatgtctgggtagaaccaggcccacgatgctgcctctcccgtggtctggagttcagctgcagggactctgctgatgtgcccagcaccatcgttctgtttgtgcttaaatggcacagcatttggtcagcacatctgaaaaggaaggtgtgagaagcaaagcccatggccacgttcccctgccagttatgtggcaagacgttcctcaccctggagaagttcacgattcacaattattcccactccagggagcggccgtacaagtgtgtgcagcctgactgtggcaaagcctttgtttccagatataaattgatgaggcatatggctacccattctccccagaaatctcaccagtgtgctcactgtgagaagacgttcaaccggaaagaccacctgaaaaaccacctccagacccacgaccccaacaaaatggcctttgggtgtgaggagtgtgggaagaagtacaacaccatgctgggctataagaggcacctggccctccatgcggccagcagtggggacctcacctgtggggtctgtgccctggagctagggagcaccgaggtgctactggaccacctcaaagcccatgcggaagagaagccccctagcggaaccaaggaaaagaagcaccagtgcgaccactgtgaaagatgcttctacacccggaaggatgtgcgacgccacctggtggtccacacaggatgcaaggacttcctgtgccagttctgtgcccagagatttgggcgcaaggatcacctcacccggcataccaagaagacccactcacaggagctgatgaaagagagcttgcagaccggagaccttctgagcaccttccacaccatctcgccttcattccaactgaaggctgctgccttgcctcctttccctttaggagcttctgcccagaacgggcttgcaagtagcttgccagctgaggtccatagcctcaccctcagtcccccagaacaagccgcccagcctatgcagccgctgccagagtccctggcctccctccacccctcggtatcccctggctctcctccgccaccccttcccaatcacaagtacaacaccacttctacctcatactccccacttgcaagcctgcccctcaaagcagatactaaaggtttttgcaatatcagtttgtttgaggacttgcctctgcaagagcctcagtcacctcaaaagctcaacccaggttttgatctggctaagggaaatgctggtaaagtaaacctgcccaaggagctgcctgcagatgctgtgaacctaacaatacctgcctctctggacctgtcccccctgttgggcttctggcagctgccccctcctgctacccaaaatacctttgggaatagcactcttgccctggggcctggggaatctttgccccacaggttaagctgtctggggcagcagcagcaagaacccccacttgccatgggcactgtgagcctgggccagctccccctgccccccatccctcatgtgttctcagctggcactggctctgccatcctgcctcatttccatcatgcattcagataattgatttttaaagtgtatttttcgtattctggaagatgttttaagaagcattttaaatgtcagttacaatatgagaaagatttggaaaacgagactgggactatggcttattcagtgatgactggcttgagatgataagagaattctcgaactgcatgtattgtgccaatctgtcctgagtgttcatgctttgtaccaaatttaatgaacgcgtgttctgtaatcaaactgcaaatattgtcataaccaacatccaaaatgacggctgctatatataagtgtttgtcatatggaatttaatcgtaagccatgatcataatgttaactaaataactttatgtggcactgcctagtaagggaactatggaaaggtttggatttctccaaatctgggagaattttcaaaataagaaaataacctttatatgatatactatgactaggctgtgtatttcttttcagggatttttctaccttcagggttggatgtagtttagttactattaccatagccaacctgtagttttacatatacattttcttgtggagcaatagagttctccattttacagaagcattttaaatgtagtttgaatattttccacaagatgctgcaatgtgagttatcacttcatttatcttaaagaaagactaaactggttgtcagttacatctgacagaaaaaaaaaaaaaaatcactgtgtaaccaggttaagtggtaaaataatccaggcgtcagtcaaaggcattttgctgactttaatattgattatatttttaacaggaatttaagaaaatattactggaattaaaaatatatatatattaaacaagaattttctttgctctgtctagcttaaactactactcaagctgcttaagttcttaagtattgtttgtaatcaccaataaataagtgcatttgtaattcatcagtcattattagcttttattaaaagaagattacgttttacaatgtaactataatctcttgaatttggtatcttattaatgagttttaaagatgtaaaacctaaccttttttaaagctccattgtcttatgtttttagaggcttttccgtaaacatatatcttacatataataaacttttcaaatcttgcaa

SEQ ID NO: 446915 - DNA, 4542 bp, Homo sapiens
  misc_feature (1704)..(1704): n is a, c, g, or t
attttgtaatttctgcttgaggctgtatttttacttggggtctctgaaaaataaatacaaatacatgaatactccctgcttaccagacagtgtcaagcatttatctcaaattagtttatttaattctcaaaagggtcttgtgatgtgggtgtaatcgttatctccattttacaggacaggaagctgaggtagagagagaaaaccaattgcatgaggtctctaagtggctccaggtggcaccaagattggaatctaagctttctggcaccatactgtggtcttaaccacatcactgtatagcctctctaaaactaaagatcccttaaggactcaaatgggtgcctctggaatgctgggatatggcattatagcatagcatgtcgatggagagagatttttgacccctggtatccttgaactcatattctgattaggtaaatgtcagcattcatagtaccaatgtgttttttcttgatgctttttttttttttaaacttttgatattgtttttcctttaggattgctgtcacgtctaatgtggctgctgcctcgtgtcacatctgaaactcatctgtacctcacttagaaagtttctttctataacacaagcctgaacatattgctctcctgattaacaactttcagtggttctgattagacaagacttttcgttgcagtcgacagaaacctaatgggaccattgaagaattccaaacaggcaagtgacaggaacatatttgcatgttagaagaatcagcctggcagcagcattgtgattagaatgaaggggaaccgtccaaaaacagactggggaaccaatatggatctgcctctagcatgcggaaatatctctctacactgacctaactgactcactaagcttgtggtttgtttaaaggaagccacatgaaaattgagtttgggccaatagagtgaactcgttctccattctctagcatccctccccatgcaaccaccctatccctgccaagtttctgggcaccacagattggaaagtagcctcctgtaggtatttgcccatgttaagtggtggggtctctttctgtcttcccttcttggtctcacctgtctggtgtgacaagggaagcatgtgccaaccaaggctagacccttgtgagaccagagcagccccactttcggtaaagcaagcaacctctgcttacttgcccaacacaccctagcttccgtgttccttgccttgtgagttatcttcttgggtacaatttaacacagcgttcccacctccttataactaaaatagctagagggggctttgtgcctcaaaccccaaggagaccatcttggcaatctctgcctctgcaacagggcacttgctccctgggcaactcctttcccaggtcatcttctcccttgacatgcccatcagatttaatagtgtgcctatttggcagaaaaatggggtcccttggttgctgattcttaggaatgtgaggttctcccagccagagctctcagcactaaaagttctagtctctgcgtaatggccggcatatctttggcgtatctaaaatcctcttcagtttccagcagggtctttataagcttcttctgaaggtctcagacattcagccacggaactcaagtggaatttgtttggataacgtgactgatttcaaagcccggaccccttagacgtgcccatttggtgctgcaagtactgancattactacaacatcttacagtcaacaaatttgacacattaaagatttatatcctttcttttgggttaggatcttctctcccctaaagcatctcagtttccagcatgcaatcatttccatcttatggaaatcagccatcccgctccgtgccagcatgctaccctgggaggcacatccaggcttgggaaacgggggtgtcctggatctcatgactccagcagcaccagctgctctctttcctcttccaagtagacttccgttccccccccacttgggtgtttttgtttgttttagcaattcagagctcaagataaagaccttaaagataactttgtgtgtctctccctttctaggtatttgcataggaatcagaggagttaatcttgtctcttctcacaggtttgaatcttcagacaaacttctgggaggactcggtccctgcctcgcagcagatgttccctgtcactcagtaggcatatggctacccattctccccagaaatctcaccagtgtgctcactgtgagaagacgttcaaccggaaagaccacctgaaaaaccacctccagacccacgaccccaacaaaatggcctttgggtgtgaggagtgtgggaagaagtacaacaccatgctgggctataagaggcacctggccctccatgcggccagcagtggggacctcacctgtggggtctgtgccctggagctagggagcaccgaggtgctactggaccacctcaaagcccatgcggaagagaagccccctagcggaaccaaggaaaagaagcaccagtgcgaccactgtgaaagatgcttctacacccggaaggatgtgcgacgccacctggtggtccacacaggatgcaaggacttcctgtgccagttctgtgcccagagatttgggcgcaaggatcacctcacccggcataccaagaagacccactcacaggagctgatgaaagagagcttgcagaccggagaccttctgagcaccttccacaccatctcgccttcattccaactgaaggctgctgccttgcctcctttccctttaggagcttctgcccagaacgggcttgcaagtagcttgccagctgaggtccatagcctcaccctcagtcccccagaacaagccgcccagcctatgcagccgctgccagagtccctggcctccctccacccctcggtatcccctggctctcctccgccaccccttcccaatcacaagtacaacaccacttctacctcatactccccacttgcaagcctgcccctcaaagcagatactaaaggtttttgcaatatcagtttgtttgaggacttgcctctgcaagagcctcagtcacctcaaaagctcaacccaggttttgatctggctaagggaaatgctggtaaagtaaacctgcccaaggagctgcctgcagatgctgtgaacctaacaatacctgcctctctggacctgtcccccctgttgggcttctggcagctgccccctcctgctacccaaaatacctttgggaatagcactcttgccctggggcctggggaatctttgccccacaggttaagctgtctggggcagcagcagcaagaacccccacttgccatgggcactgtgagcctgggccagctccccctgccccccatccctcatgtgttctcagctggcactggctctgccatcctgcctcatttccatcatgcattcagataattgatttttaaagtgtatttttcgtattctggaagatgttttaagaagcattttaaatgtcagttacaatatgagaaagatttggaaaacgagactgggactatggcttattcagtgatgactggcttgagatgataagagaattctcgaactgcatgtattgtgccaatctgtcctgagtgttcatgctttgtaccaaatttaatgaacgcgtgttctgtaatcaaactgcaaatattgtcataaccaacatccaaaatgacggctgctatatataagtgtttgtcatatggaatttaatcgtaagccatgatcataatgttaactaaataactttatgtggcactgcctagtaagggaactatggaaaggtttggatttctccaaatctgggagaattttcaaaataagaaaataacctttatatgatatactatgactaggctgtgtatttcttttcagggatttttctaccttcagggttggatgtagtttagttactattaccatagccaacctgtagttttacatatacattttcttgtggagcaatagagttctccattttacagaagcattttaaatgtagtttgaatattttccacaagatgctgcaatgtgagttatcacttcatttatcttaaagaaagactaaactggttgtcagttacatctgacagaaaaaaaaaaaaaaatcactgtgtaaccaggttaagtggtaaaataatccaggcgtcagtcaaaggcattttgctgactttaatattgattatatttttaacaggaatttaagaaaatattactggaattaaaaatatatatatattaaacaagaattttctttgctctgtctagcttaaactactactcaagctgcttaagttcttaagtattgtttgtaatcaccaataaataagtgcatttgtaattcatcagtcattattagcttttattaaaagaagattacgttttacaatgtaactataatctcttgaatttggtatcttattaatgagttttaaagatgtaaaacctaaccttttttaaagctccattgtcttatgtttttagaggcttttccgtaaacatatatcttacatataataaacttttcaaatcttgcaa

SEQ ID NO: 446916 - DNA, 4459 bp, Homo sapiens
  misc_feature (1621)..(1621): n is a, c, g, or t
gttaaatattaaaattagaaaagaaaataatttctctatcaatgtttaaaatgctagaaattatgcatgcttatactataacaaagaatactttatttggggaataacttaattgatccatgatgtggcatttaccaaggtaatttttccctttttgttccagcagtaggaattagaggtggttcataaaacacacaatcaccatgtaaattgaaaccgcattaagatcatagtcatcttatgttgtttccctaaaatggttctcatttgccccacatattcaaatcagagtgcacaaagatgttgtgctgagtcagggaagatttagaatgctctgtgaacagttttatactgaacttcagagttcagttattgtacttattttttggtgtgtgtgtgtgcacagttgggttttttgtttgttttgctatttgaattactgtttggccattttaatgtatataactgataaatccaggaggataatctgtatgtctgctctctcagtttctttctataacacaagcctgaacatattgctctcctgattaacaactttcagtggttctgattagacaagacttttcgttgcagtcgacagaaacctaatgggaccattgaagaattccaaacaggcaagtgacaggaacatatttgcatgttagaagaatcagcctggcagcagcattgtgattagaatgaaggggaaccgtccaaaaacagactggggaaccaatatggatctgcctctagcatgcggaaatatctctctacactgacctaactgactcactaagcttgtggtttgtttaaaggaagccacatgaaaattgagtttgggccaatagagtgaactcgttctccattctctagcatccctccccatgcaaccaccctatccctgccaagtttctgggcaccacagattggaaagtagcctcctgtaggtatttgcccatgttaagtggtggggtctctttctgtcttcccttcttggtctcacctgtctggtgtgacaagggaagcatgtgccaaccaaggctagacccttgtgagaccagagcagccccactttcggtaaagcaagcaacctctgcttacttgcccaacacaccctagcttccgtgttccttgccttgtgagttatcttcttgggtacaatttaacacagcgttcccacctccttataactaaaatagctagagggggctttgtgcctcaaaccccaaggagaccatcttggcaatctctgcctctgcaacagggcacttgctccctgggcaactcctttcccaggtcatcttctcccttgacatgcccatcagatttaatagtgtgcctatttggcagaaaaatggggtcccttggttgctgattcttaggaatgtgaggttctcccagccagagctctcagcactaaaagttctagtctctgcgtaatggccggcatatctttggcgtatctaaaatcctcttcagtttccagcagggtctttataagcttcttctgaaggtctcagacattcagccacggaactcaagtggaatttgtttggataacgtgactgatttcaaagcccggaccccttagacgtgcccatttggtgctgcaagtactgancattactacaacatcttacagtcaacaaatttgacacattaaagatttatatcctttcttttgggttaggatcttctctcccctaaagcatctcagtttccagcatgcaatcatttccatcttatggaaatcagccatcccgctccgtgccagcatgctaccctgggaggcacatccaggcttgggaaacgggggtgtcctggatctcatgactccagcagcaccagctgctctctttcctcttccaagtagacttccgttccccccccacttgggtgtttttgtttgttttagcaattcagagctcaagataaagaccttaaagataactttgtgtgtctctccctttctaggtatttgcataggaatcagaggagttaatcttgtctcttctcacaggtttgaatcttcagacaaacttctgggaggactcggtccctgcctcgcagcagatgttccctgtcactcagtaggcatatggctacccattctccccagaaatctcaccagtgtgctcactgtgagaagacgttcaaccggaaagaccacctgaaaaaccacctccagacccacgaccccaacaaaatggcctttgggtgtgaggagtgtgggaagaagtacaacaccatgctgggctataagaggcacctggccctccatgcggccagcagtggggacctcacctgtggggtctgtgccctggagctagggagcaccgaggtgctactggaccacctcaaagcccatgcggaagagaagccccctagcggaaccaaggaaaagaagcaccagtgcgaccactgtgaaagatgcttctacacccggaaggatgtgcgacgccacctggtggtccacacaggatgcaaggacttcctgtgccagttctgtgcccagagatttgggcgcaaggatcacctcacccggcataccaagaagacccactcacaggagctgatgaaagagagcttgcagaccggagaccttctgagcaccttccacaccatctcgccttcattccaactgaaggctgctgccttgcctcctttccctttaggagcttctgcccagaacgggcttgcaagtagcttgccagctgaggtccatagcctcaccctcagtcccccagaacaagccgcccagcctatgcagccgctgccagagtccctggcctccctccacccctcggtatcccctggctctcctccgccaccccttcccaatcacaagtacaacaccacttctacctcatactccccacttgcaagcctgcccctcaaagcagatactaaaggtttttgcaatatcagtttgtttgaggacttgcctctgcaagagcctcagtcacctcaaaagctcaacccaggttttgatctggctaagggaaatgctggtaaagtaaacctgcccaaggagctgcctgcagatgctgtgaacctaacaatacctgcctctctggacctgtcccccctgttgggcttctggcagctgccccctcctgctacccaaaatacctttgggaatagcactcttgccctggggcctggggaatctttgccccacaggttaagctgtctggggcagcagcagcaagaacccccacttgccatgggcactgtgagcctgggccagctccccctgccccccatccctcatgtgttctcagctggcactggctctgccatcctgcctcatttccatcatgcattcagataattgatttttaaagtgtatttttcgtattctggaagatgttttaagaagcattttaaatgtcagttacaatatgagaaagatttggaaaacgagactgggactatggcttattcagtgatgactggcttgagatgataagagaattctcgaactgcatgtattgtgccaatctgtcctgagtgttcatgctttgtaccaaatttaatgaacgcgtgttctgtaatcaaactgcaaatattgtcataaccaacatccaaaatgacggctgctatatataagtgtttgtcatatggaatttaatcgtaagccatgatcataatgttaactaaataactttatgtggcactgcctagtaagggaactatggaaaggtttggatttctccaaatctgggagaattttcaaaataagaaaataacctttatatgatatactatgactaggctgtgtatttcttttcagggatttttctaccttcagggttggatgtagtttagttactattaccatagccaacctgtagttttacatatacattttcttgtggagcaatagagttctccattttacagaagcattttaaatgtagtttgaatattttccacaagatgctgcaatgtgagttatcacttcatttatcttaaagaaagactaaactggttgtcagttacatctgacagaaaaaaaaaaaaaaatcactgtgtaaccaggttaagtggtaaaataatccaggcgtcagtcaaaggcattttgctgactttaatattgattatatttttaacaggaatttaagaaaatattactggaattaaaaatatatatatattaaacaagaattttctttgctctgtctagcttaaactactactcaagctgcttaagttcttaagtattgtttgtaatcaccaataaataagtgcatttgtaattcatcagtcattattagcttttattaaaagaagattacgttttacaatgtaactataatctcttgaatttggtatcttattaatgagttttaaagatgtaaaacctaaccttttttaaagctccattgtcttatgtttttagaggcttttccgtaaacatatatcttacatataataaacttttcaaatcttgcaa

SEQ ID NO: 446917 - DNA, 3768 bp, Homo sapiens
  misc_feature (30)..(30): n is a, c, g, or t
cggcattttgggacaactgtttttaacgtnaataaatcacttaggcgagatataaattggctttgttccatagcagatttgcctttgtactagttaagaaaatcctgaaaagctttccctgtaagaggatcagttggttggaatagccttggtaggaagaagccaagtttgataattacttggtgaacggaaatgctggtttccaaatgctcatcagggttcagtggcacaaagctggctgtagacttggcttctgtagatttggtaaaaacgtaaattcctggggtcccagtgatgctgttttagtctgtactgatttgccctgtggccacccaggaatctgtatttttaaaagttttccatgctgattctaatgcatagccaggtttagtaaccatttaattcagtattcaacttagagacttcaaccttcttgcactgcaaatttgataaatctttgtttatatgaatctcctttgttgagtgccaactggttatttgctgactttctttcaattcagaatttgttttaggttctgttattgcatagatttgcatacctgttttatggtattttaatactgttggttttaaaaaataccatttcctctgagtgctgttctgaatatattatgtaagcaattttgtgtgttcttttttttccacttgcataaagcaggggaaaagttgagagtttttcttaatccagttgcaagtaggacaaaggatatgagtgtttaaagatcatctattaaaatgcatgaaaaaacactagaaaatctcctgtgcacatcgccagtcgtgtgtgtgctctagaagtgaagttcagggggtaacataatggaggaatgttttcctagcttcattccctgacgatgtacaaggtctcttctgtctcttctcacaggtttgaatcttcagacaaacttctgggaggactcggtccctgcctcgcagcagatgttccctgtcactcagtagccaatccgggggacccaggacatgccccagctatagtgatgcagattacctttctgctcctgaatcgcacctgtgcctcagactttctcccctcagcttgagactgcatgtaaactgggatgtgtgaaagcaggaagcaaagctagtgacagctgagaggtccatgtctgggtagaaccaggcccacgatgctgcctctcccgtggtctggagttcagctgcagggactctgctgatgtgcccagcaccatcgttctgtttgtgcttaaatggcacagcatttggtcagcacatctgaaaaggaaggtgtgagaagcaaagcccatggccacgttcccctgccagttatgtggcaagacgttcctcaccctggagaagttcacgattcacaattattcccactccagggagcggccgtacaagtgtgtgcagcctgactgtggcaaagcctttgtttccagatataaattgatgaggcatatggctacccattctccccagaaatctcaccagtgtgctcactgtgagaagacgttcaaccggaaagaccacctgaaaaaccacctccagacccacgaccccaacaaaatggcctttgggtgtgaggagtgtgggaagaagtacaacaccatgctgggctataagaggcacctggccctccatgcggccagcagtggggacctcacctgtggggtctgtgccctggagctagggagcaccgaggtgctactggaccacctcaaagcccatgcggaagagaagccccctagcggaaccaaggaaaagaagcaccagtgcgaccactgtgaaagatgcttctacacccggaaggatgtgcgacgccacctggtggtccacacaggatgcaaggacttcctgtgccagttctgtgcccagagatttgggcgcaaggatcacctcacccggcataccaagaagacccactcacaggagctgatgaaagagagcttgcagaccggagaccttctgagcaccttccacaccatctcgccttcattccaactgaaggctgctgccttgcctcctttccctttaggagcttctgcccagaacgggcttgcaagtagcttgccagctgaggtccatagcctcaccctcagtcccccagaacaagccgcccagcctatgcagccgctgccagagtccctggcctccctccacccctcggtatcccctggctctcctccgccaccccttcccaatcacaagtacaacaccacttctacctcatactccccacttgcaagcctgcccctcaaagcagatactaaaggtttttgcaatatcagtttgtttgaggacttgcctctgcaagagcctcagtcacctcaaaagctcaacccaggttttgatctggctaagggaaatgctggtaaagtaaacctgcccaaggagctgcctgcagatgctgtgaacctaacaatacctgcctctctggacctgtcccccctgttgggcttctggcagctgccccctcctgctacccaaaatacctttgggaatagcactcttgccctggggcctggggaatctttgccccacaggttaagctgtctggggcagcagcagcaagaacccccacttgccatgggcactgtgagcctgggccagctccccctgccccccatccctcatgtgttctcagctggcactggctctgccatcctgcctcatttccatcatgcattcagataattgatttttaaagtgtatttttcgtattctggaagatgttttaagaagcattttaaatgtcagttacaatatgagaaagatttggaaaacgagactgggactatggcttattcagtgatgactggcttgagatgataagagaattctcgaactgcatgtattgtgccaatctgtcctgagtgttcatgctttgtaccaaatttaatgaacgcgtgttctgtaatcaaactgcaaatattgtcataaccaacatccatgatcataatgttaactaaataactttatgtggcactgcctagtaagggaactatggaaaggtttggatttctccaaatctgggagaattttcaaaataagaaaataacctttatatgatatactatgactaggctgtgtatttcttttcagggatttttctaccttcagggttggatgtagtttagttactattaccatagccaacctgtagttttacatatacattttcttgtggagcaatagagttctccattttacagaagcattttaaatgtagtttgaatattttccacaagatgctgcaatgtgagttatcacttcatttatcttaaagaaagactaaactggttgtcagttacatctgacagaaaaaaaaaaaaaaatcactgtgtaaccaggttaagtggtaaaataatccaggcgtcagtcaaaggcattttgctgactttaatattgattatatttttaacaggaatttaagaaaatattactggaattaaaaatatatatatattaaacaagaattttctttgctctgtctagcttaaactactactcaagctgcttaagttcttaagtattgtttgtaatcaccaataaataagtgcatttgtaattcatcagtcattattagcttttattaaaagaagattacgttttacaatgtaactataatctcttgaatttggtatcttattaatgagttttaaagatgtaaaacctaaccttttttaaagctccattgtcttatgtttttagaggcttttccgtaaacatatatcttacatataataaacttttcaaatcttgcaa

SEQ ID NO: 446918 - DNA, 4148 bp, Homo sapiens
  misc_feature (30)..(30): n is a, c, g, or t
cggcattttgggacaactgtttttaacgtnaataaatcacttaggcgagatataaattggctttgttccatagcagatttgcctttgtactagttaagaaaatcctgaaaagctttccctgtaagaggatcagttggttggaatagccttggtaggaagaagccaagtttgataattacttggtgaacggaaatgctggtttccaaatgctcatcagggttcagtggcacaaagctggctgtagacttggcttctgtagatttggtaaaaacgtaaattcctggggtcccagtgatgctgttttagtctgtactgatttgccctgtggccacccaggaatctgtatttttaaaagttttccatgctgattctaatgcatagccaggtttagtaaccatttaattcagtattcaacttagagacttcaaccttcttgcactgcaaatttgataaatctttgtttatatgaatctcctttgttgagtgccaactggttatttgctgactttctttcaattcagaatttgttttaggttctgttattgcatagatttgcatacctgttttatggtattttaatactgttggttttaaaaaataccatttcctctgagtgctgttctgaatatattatgtaagcaattttgtgtgttcttttttttccacttgcataaagcaggggaaaagttgagagtttttcttaatccagttgcaagtaggacaaaggatatgagtgtttaaagatcatctattaaaatgcatgaaaaaacactagaaaatctcctgtgcacatcgccagtcgtgtgtgtgctctagaagtgaagttcagggggtaacataatggaggaatgttttcctagcttcattccctgacgatgtacaaggtctcttctgtctcttctcacaggtttgaatcttcagacaaacttctgggaggactcggtccctgcctcgcagcagatgttccctgtcactcagtagccaatccgggggacccaggacatgccccagctatagtgatgcagattacctttctgctcctgaatcgcacctgtgcctcagactttctcccctcagcttgagactgcatgtaaactgggatgtgtgaaagcaggaagcaaagctagtgacagctgagaggtccatgtctgggtagaaccaggcccacgatgctgcctctcccgtggtctggagttcagctgcagggactctgctgatgtgcccagcaccatcgttctgtttgtgcttaaatggcacagcatttggtcagcacatctgaaaaggaaggtgtgagaagcaaagcccatggccacgttcccctgccagttatgtggcaagacgttcctcaccctggagaagttcacgattcacaattattcccactccagggagcggccgtacaagtgtgtgcagcctgactgtggcaaagcctttgtttccagatataaattgatgaggcatatggctacccattctccccagaaatctcaccagtgtgctcactgtgagaagacgttcaaccggaaagaccacctgaaaaaccacctccagacccacgaccccaacaaaatggcctttgggtgtgaggagtgtgggaagaagtacaacaccatgctgggctataagaggcacctggccctccatgcggccagcagtggggacctcacctgtggggtctgtgccctggagctagggagcaccgaggtgctactggaccacctcaaagcccatgcggaagagaagccccctagcggaaccaaggaaaagaagcaccagtgcgaccactgtgaaagatgcttctacacccggaaggatgtgcgacgccacctggtggtccacacaggatgcaaggacttcctgtgccagttctgtgcccagagatttgggcgcaaggatcacctcacccggcataccaagaagacccactcacaggagctgatgaaagagagcttgcagaccggagaccttctgagcaccttccacaccatctcgccttcattccaactgaaggctgctgccttgcctcctttccctttaggagcttctgcccagaacgggcttgcaagtagcttgccagctgaggtccatagcctcaccctcagtcccccagaacaagccgcccagcctatgcagccgctgccagagtccctggcctccctccacccctcggtatcccctggctctcctccgccaccccttcccaatcacaagtacaacaccacttctacctcatactccccacttgcaagcctgcccctcaaagcagatactaaaggtttttgcaatatcagtttgtttgaggacttgcctctgcaagagcctcagtcacctcaaaagctcaacccaggttttgatctggctaagggaaatgctggtaaagtaaacctgcccaaggagctgcctgcagatgctgtgaacctaacaatacctgcctctctggacctgtcccccctgttgggcttctggcagctgccccctcctgctacccaaaatacctttgggaatagcactcttgccctggggcctggggaatctttgccccacaggttaagctgtctggggcagcagcagcaagaacccccacttgccatgggcactgtgagcctgggccagctccccctgccccccatccctcatgtgttctcagctggcactggctctgccatcctgcctcatttccatcatgcattcagataattgatttttaaagtgtatttttcgtattctggaagatgttttaagaagcattttaaatgtcagttacaatatgagaaagatttggaaaacgagactgggactatggcttattcagtgatgactggcttgagatgataagagaattctcgaactgcatgtattgtgccaatctgtcctgagtgttcatgctttgtaccaaatttaatgaacgcgtgttctgtaatcaaactgcaaatattgtcataaccaacatccaaaatgacggctgctatatataagtgtttgtcatatggaatttaatcgtaagccatgatcataatgttaactaaataactttatgtggcactgcctagtaagggaactatggaaaggtttggatttctccaaatctgggagaattttcaaaataagaaaataacctttatatgatatactatgactaggctgtgtatttcttttcagggatttttctaccttcagggttggatgtagtttagttactattaccatagccaacctgtagttttacatatacattttcttgtggagcaatagagttctccattttacagaagcattttaaatgtagtttgaatattttccacaagatgctgcaatgtgagttatcacttcatttatcttaaagaaagactaaactggttgtcagttacatctgacagaaaaaaaaaaaaaaatcactgtgtaaccaggttaagtggtaaaataatccaggcgtcagtcaaaggcattttgctgactttaatattgattatatttttaacaggaatttaagaaaatattactggaattaaaaatatatatatattaaacaagaattttctttgctctgtctagcttaaactactactcaagctgcttaagttcttaagtattgtttgtaatcaccaataaataagtgcatttgtaattcatcagtcattattagcttttattaaaagaagattacgttttacaatgtaactataatctcttgaatttggtatcttattaatgagttttaaagatgtaaaacctaaccttttttaaagctccattgtcttatgtttttagaggcttttccgtaaacatatatcttacatataataaacttttcaaatcttgcaatttggcttgattaatttttcatacagctccacctgtgtcaacaacatgaactacatacactcagatcaagacagaaaacacttccggctccacctggctccctcatgccccctcctggtcattacttcccccacagaaaccactgttttgacctctactgagcatctattagaaacttcactttttttgagtaaaataattatgacttaagatggaagcttgtatgcgtccattaaattcacagcactaagagcttattatttctaaaaatgcaatatttaaatcattctataatgtgacataatttatttctaatgtatagatca

SEQ ID NO: 446919 - DNA, 1746 bp, Homo sapiens
ggtgactctaaggatccctcataggttcgcaggacaactactccgtcagcaagaaccaagccacatcaaacctgcctgtccacaccacttacttccctgttcacctctcctccgccaccccttcccaatcacaagtacaacaccacttctacctcatactccccacttgcaagcctgcccctcaaagcagatactaaaggtttttgcaatatcagtttgtttgaggacttgcctctgcaagagcctcagtcacctcaaaagctcaacccaggttttgatctggctaagggaaatgctggtaaagtaaacctgcccaaggagctgcctgcagatgctgtgaacctaacaatacctgcctctctggacctgtcccccctgttgggcttctggcagctgccccctcctgctacccaaaatacctttgggaatagcactcttgccctggggcctggggaatctttgccccacaggttaagctgtctggggcagcagcagcaagaacccccacttgccatgggcactgtgagcctgggccagctccccctgccccccatccctcatgtgttctcagctggcactggctctgccatcctgcctcatttccatcatgcattcagataattgatttttaaagtgtatttttcgtattctggaagatgttttaagaagcattttaaatgtcagttacaatatgagaaagatttggaaaacgagactgggactatggcttattcagtgatgactggcttgagatgataagagaattctcgaactgcatgtattgtgccaatctgtcctgagtgttcatgctttgtaccaaatttaatgaacgcgtgttctgtaatcaaactgcaaatattgtcataaccaacatccaaaatgacggctgctatatataagtgtttgtcatatggaatttaatcgtaagccatgatcataatgttaactaaataactttatgtggcactgcctagtaagggaactatggaaaggtttggatttctccaaatctgggagaattttcaaaataagaaaataacctttatatgatatactatgactaggctgtgtatttcttttcagggatttttctaccttcagggttggatgtagtttagttactattaccatagccaacctgtagttttacatatacattttcttgtggagcaatagagttctccattttacagaagcattttaaatgtagtttgaatattttccacaagatgctgcaatgtgagttatcacttcatttatcttaaagaaagactaaactggttgtcagttacatctgacagaaaaaaaaaaaaaaatcactgtgtaaccaggttaagtggtaaaataatccaggcgtcagtcaaaggcattttgctgactttaatattgattatatttttaacaggaatttaagaaaatattactggaattaaaaatatatatatattaaacaagaattttctttgctctgtctagcttaaactactactcaagctgcttaagttcttaagtattgtttgtaatcaccaataaataagtgcatttgtaattcatcagtcattattagcttttattaaaagaagattacgttttacaatgtaactataatctcttgaatttggtatcttattaatgagttttaaagatgtaaaacctaaccttttttaaagctccattgtcttatgtttttagaggcttttccgtaaacatatatcttacatataataaacttttcaaatcttgcaa

SEQ ID NO: 446920 - DNA, 1970 bp, Homo sapiens
cgcccgcccgcgcctggcggcggtggcggcagtggcagcagtggcagccgcgcagccccgcggaatggagcggcgccggggctgagccgggcgcgcacgggccgccgcatgtgccgcgcggggagcggctgccgagcgggcggagagcgagcgcgagaggccccgtcggagcggccgccggagcagcgccggagatgggagaacagcccatcttcaccacccgagcgcatgtcttccagattgaccccaacaccaagaagaactggatgcctgcgagcaagcaggcggtcaccgtttcctacttctatgatgtcacaaggaacagctatcggatcatcagtgtggacggagccaaggtgatcataaacagcacaatcacaccgaatatgaccttcaccaaaacgtcacagaagtttgggcagtgggccgacagcagagccaacacagtgtttggtttggggttttcctctgagcagcagctgacaaagtttgcagagaaattccaggaggtgaaagaagctgccaagatagccaaagacaagacgcaggagaaaatcgagacctcaagtaatcattcccaagcatccagtgtcaacgggacggacgatgaaaaggcctctcacgccggtccagccaacacacacctgaagtctgagaatgacaagctgaagattgccttgacgcagagcgcagccaacgtgaagaagtgggagatcgagctgcagacccttcgggagagcaatgcacggctgaccacagcactgcaggagtcggcagccagtgtggagcagtggaagaggcagttctccatctgccgtgatgagaatgaccggctccgcaacaagattgatgagctggaagaacaatgcagtgagatcaacagagagaaggagaagaacacgcagctgaagaggaggatcgaggagctggaggcagagctccgagaaaaggagacagagctgaaagatctccgaaaacaaagtgaaatcatacctcagctcatgtcagagtgcgaatatgtctctgagaagctagaggcggcagagagagacaatcaaaacctggaagacaaagtgcgttccttaaagacagacattgaggagagcaaataccgacagcgccacctgaaggtggagttgaagagcttcctggaggtgctggacgggaagattgacgacctgcatgacttccgccgagggctctccaagctgggcaccgataactagggctggccgaggcccaggccccgcccgtgagtcccaagcgtgtgtgcgagaccagatagctctaggacgttcttctgtgtgcattgcttctgtaaatgcaggcgcagtttgtcgtgtttccaaaccagttgtgccgtccactcactccttttcagaatagaaatctcctctcgcttctctggccttgtgaggttgtggacaactggaagattctgactcaggaatccagaactaggtctaccttcaacatttatgcagtcagggcagggatgtttatatctttcataagggctgttgcaaccatatgaactgaaaaaacacgcattttgtaatccaaatattgatattctttacaccaagccatcaggctccttttatcaaatagcattcagagtatttgaatgtccaccagacaccagccccggggggcacagagagaacaacattcctctctgtcaacatcgagaggctttaaaacaactgtttagtggaaactttctgagagatggaaaacaagcttctggtgggtgcattttctggcccggagttgcctgcatccacgctactgccccctgccccccgcccccccagtttgtacggttgcaacagtgttccttttcttggttttaatttctgagcagatgattgtgctgtgggaacagcacacagtgagggtgcctagcacaatgtctggcacaaagtaggtgcttaataaatatttgttcaattaaatgtgaaaaaaaa

SEQ ID NO: 446921 - DNA, 1935 bp, Homo sapiens
cgcccgcccgcgcctggcggcggtggcggcagtggcagcagtggcagccgcgcagccccgcggaatggagcggcgccggggctgagccgggcgcgcacgggccgccgcatgtgccgcgcggggagcggctgccgagcgggcggagagcgagcgcgagaggccccgtcggagcggccgccggagcagcgccggagatgggagaacagcccatcttcaccacccgagcgcatgtcttccagattgaccccaacaccaagaagaactggatgcctgcgagcaagcaggcggtcaccgtttcctacttctatgatgtcacaaggaacagctatcggatcatcagtgtggacggagccaaggtgatcataaacagcacaatcacaccgaatatgaccttcaccaaaacgtcacagaagtttgggcagtgggccgacagcagagccaacacagtgtttggtttggggttttcctctgagcagcagctgacaaagtttgcagagaaattccaggaggtgaaagaagctgccaagatagccaaagacaagacgcaggagaaaatcgagacctcaagtaatcattcccaagcatccagtgtcaacgggacggacgatgaaaaggcctctcacgccggtccagccaacacacacctgaagtctgagaatgacaagctgaagattgccttgacgcagagcgcagccaacgtgaagaagtgggagatcgagctgcagacccttcgggagagcaatgcacggctgaccacagcactgcaggagtcggcagccagtgtggagcagtggaagaggcagttctccatctgccgtgatgagaatgaccggctccgcaacaagattgatgagctggaagaacaatgcagtgagatcaacagagagaaggagaagaacacgcagctgaagaggaggatcgaggagctggaggcagagctccgagaaaaggagacagagctgaaagatctccgaaaacaaagtgaaatcatacctcagctcatgtcagagtgcgaatatgtctctgagaagctagaggcggcagagagagacaatcaaaacctggaagacaaagtgcgttccttaaagacagacattgaggagagcaaataccgacagcgccacctgaaggtggagttgaagagcttcctggaggtgctggacgggaagattgacgacctgcatgacttccgccgagggctctccaagctgggcaccgataactagggctggccgaggcccaggccccgcccgtgagtcccaagcgtgtgtgcattgcttctgtaaatgcaggcgcagtttgtcgtgtttccaaaccagttgtgccgtccactcactccttttcagaatagaaatctcctctcgcttctctggccttgtgaggttgtggacaactggaagattctgactcaggaatccagaactaggtctaccttcaacatttatgcagtcagggcagggatgtttatatctttcataagggctgttgcaaccatatgaactgaaaaaacacgcattttgtaatccaaatattgatattctttacaccaagccatcaggctccttttatcaaatagcattcagagtatttgaatgtccaccagacaccagccccggggggcacagagagaacaacattcctctctgtcaacatcgagaggctttaaaacaactgtttagtggaaactttctgagagatggaaaacaagcttctggtgggtgcattttctggcccggagttgcctgcatccacgctactgccccctgccccccgcccccccagtttgtacggttgcaacagtgttccttttcttggttttaatttctgagcagatgattgtgctgtgggaacagcacacagtgagggtgcctagcacaatgtctggcacaaagtaggtgcttaataaatatttgttcaattaaatgtgaaaaaaaa

SEQ ID NO: 446922 - DNA, 1813 bp, Homo sapiens
cgcccgcccgcgcctggcggcggtggcggcagtggcagcagtggcagccgcgcagccccgcggaatggagcggcgccggggctgagccgggcgcgcacgggccgccgcatgtgccgcgcggggagcggctgccgagcgggcggagagcgagcgcgagaggccccgtcggagcggccgccggagcagcgccggagatgggagaacagcccatcttcaccacccgagcgcatgtcttccagattgaccccaacaccaagaagaactggatgcctgcgagcaagcaggcggtcaccgtttcctacttctatgatgtcacaaggaacagctatcggatcatcagtgtggacggagccaaggtgatcataaacagcacaatcacaccgaatatgaccttcaccaaaacgtcacagaagtttgggcagtgggccgacagcagagccaacacagtgtttggtttggggttttcctctgagcagcagctgacaaagtttgcagagaaattccaggaggtgaaagaagctgccaagatagccaaagacaagacgcaggagaaaatcgagacctcaagtaatcattcccaagcatccagtgtcaacgggacggacgatgaaaaggcctctcacgccggtccagccaacacacacctgaagtctgagaatgacaagctgaagattgccttgacgcagagattgatgagctggaagaacaatgcagtgagatcaacagagagaaggagaagaacacgcagctgaagaggaggatcgaggagctggaggcagagctccgagaaaaggagacagagctgaaagatctccgaaaacaaagtgaaatcatacctcagctcatgtcagagtgcgaatatgtctctgagaagctagaggcggcagagagagacaatcaaaacctggaagacaaagtgcgttccttaaagacagacattgaggagagcaaataccgacagcgccacctgaaggtggagttgaagagcttcctggaggtgctggacgggaagattgacgacctgcatgacttccgccgagggctctccaagctgggcaccgataactagggctggccgaggcccaggccccgcccgtgagtcccaagcgtgtgtgcgagaccagatagctctaggacgttcttctgtgtgcattgcttctgtaaatgcaggcgcagtttgtcgtgtttccaaaccagttgtgccgtccactcactccttttcagaatagaaatctcctctcgcttctctggccttgtgaggttgtggacaactggaagattctgactcaggaatccagaactaggtctaccttcaacatttatgcagtcagggcagggatgtttatatctttcataagggctgttgcaaccatatgaactgaaaaaacacgcattttgtaatccaaatattgatattctttacaccaagccatcaggctccttttatcaaatagcattcagagtatttgaatgtccaccagacaccagccccggggggcacagagagaacaacattcctctctgtcaacatcgagaggctttaaaacaactgtttagtggaaactttctgagagatggaaaacaagcttctggtgggtgcattttctggcccggagttgcctgcatccacgctactgccccctgccccccgcccccccagtttgtacggttgcaacagtgttccttttcttggttttaatttctgagcagatgattgtgctgtgggaacagcacacagtgagggtgcctagcacaatgtctggcacaaagtaggtgcttaataaatatttgttcaattaaatgtgaaaaaaaa

SEQ ID NO: 446923 - DNA, 1881 bp, Homo sapiens
cgcccgcccgcgcctggcggcggtggcggcagtggcagcagtggcagccgcgcagccccgcggaatggagcggcgccggggctgagccgggcgcgcacgggccgccgcatgtgccgcgcggggagcggctgccgagcgggcggagagcgagcgcgagaggccccgtcggagcggccgccggagcagcgccggagatgggagaacagcccatcttcaccacccgagcgcatgtcttccagattgaccccaacaccaagaagaactggatgcctgcgagcaagcaggcggtcaccgtttcctacttctatgatgtcacaaggaacagctatcggatcatcagtgtggacggagccaaggtgatcataaacagcacaatcacaccgaatatgaccttcaccaaaacgtcacagaagtttgggcagtgggccgacagcagagccaacacagtgtttggtttggggttttcctctgagcagcagctgacaaagtttgcagagaaattccaggaggtgaaagaagctgccaagatagccaaagacaagacgcaggagaaaatcgagacctcaagtaatcattcccaagcatccagtgtcaacgggacggacgatgaaaaggcctctcacgccggtccagccaacacacacctgaagtctgagaatgacaagctgaagattgccttgacgcagagcgcagccaacgtgaagaagtgggagatcgagctgcagacccttcgggagagcaatgcacggctgaccacagcactgcaggagtcggcagccagtgtggagcagtggaagaggcagttctccatctgccgtgatgagaatgaccggctccgcaacaagattgatgagctggaagaacaatgcagtgagatcaacagagagaaggagaagaacacgcagctgaagaggaggatcgaggagctggaggcagagctccgagaaaaggagacagagctgaaagatctccgaaaacaaagtgaaatcatacctcagctcatgtcagagtgcgaatatgtctctgagaagctagaggcggcagagagagacaatcaaaacctggaagacaaagtgcgttccttaaagacagacattgaggagagcaaataccgacagcgccacctgaaggtggagttgaagagcttcctggaggtgctggacgggaagattgacgacctgcatgacttccgccgagggctctccaagctgggcaccgataactagggctggccgaggcccaggccccgcccgtgagtcccaagcgtgtgtgcattgcttctgtaaatgcaggcgcagtttgtcgtgtttccaaaccagttgtgccgtccactcactccttttcagaatagaaatctcctctcgcttctctggccttgtgaggttgtggacaactggaagattctgactcaggaatccagaactaggtctaccttcaacatttatgcagtcagggcagggatgtttatatctttcataagggctgttgcaaccatatgaactgaaaaaacacgcattttgtaatccaaatattgatattctttacaccaagccatcaggctccttttatcaaatagcattcagagtatttgaatgtccaccagacaccagccccggggggcacagagagaacaacattcctctctgtcaacatcgagaggctttaaaacaactgtttagtggaaactttctgagagatggtactgccccctgccccccgcccccccagtttgtacggttgcaacagtgttccttttcttggttttaatttctgagcagatgattgtgctgtgggaacagcacacagtgagggtgcctagcacaatgtctggcacaaagtaggtgcttaataaatatttgttcaattaaatgtgaaaaaaaa

SEQ ID NO: 446924 - DNA, 1338 bp, Homo sapiens
cgcccgcccgcgcctggcggcggtggcggcagtggcagcagtggcagccgcgcagccccgcggaatggagcggcgccggggctgagccgggcgcgcacgggccgccgcatgtgccgcgcggggagcggctgccgagcgggcggagagcgagcgcgagaggccccgtcggagcggccgccggagcagcgccggagatgggagaacagcccatcttcaccacccgagcgcatgtcttccagattgaccccaacaccaagaagaactggatgcctgcgagcaagcaggcggtcaccgtttcctacttctatgatgtcacaaggaacagctatcggatcatcagtgtggacggagccaaggtgatcataaacagcacaatcacaccgaatatgaccttcaccaaaacgtcacagaagtttgggcagtgggccgacagcagagccaacacagtgtttggtttggggttttcctctgagcagcagctgacaaagtttgcagagaaattccaggaggtgaaagaagctgccaagatagccaaagacaagacgcaggagaaaatcgagacctcaagtaatcattcccaagcatccagtgtcaacgggacggacgatgaaaaggcctctcacgccggtccagccaacacacacctgaagtctgagaatgacaagctgaagattgccttgacgcagagaatgcaggcgcagtttgtcgtgtttccaaaccagttgtgccgtccactcactccttttcagaatagaaatctcctctcgcttctctggccttgtgaggttgtggacaactggaagattctgactcaggaatccagaactaggtctaccttcaacatttatgcagtcagggcagggatgtttatatctttcataagggctgttgcaaccatatgaactgaaaaaacacgcattttgtaatccaaatattgatattctttacaccaagccatcaggctccttttatcaaatagcattcagagtatttgaatgtccaccagacaccagccccggggggcacagagagaacaacattcctctctgtcaacatcgagaggctttaaaacaactgtttagtggaaactttctgagagatggaaaacaagcttctggtgggtgcattttctggcccggagttgcctgcatccacgctactgccccctgccccccgcccccccagtttgtacggttgcaacagtgttccttttcttggttttaatttctgagcagatgattgtgctgtgggaacagcacacagtgagggtgcctagcacaatgtctggcacaaagtaggtgcttaataaatatttgttcaattaaatgtgaaaaaaaa

SEQ ID NO: 446925 - DNA, 2003 bp, Homo sapiens
cgcccgcccgcgcctggcggcggtggcggcagtggcagcagtggcagccgcgcagccccgcggaatggagcggcgccggggctgagccgggcgcgcacgggccgccgcatgtgccgcgcggggagcggctgccgagcgggcggagagcgagcgcgagaggccccgtcggagcggccgccggagcagcgccggagatgggagaacagcccatcttcaccacccgagcgcatgtcttccagattgaccccaacaccaagaagaactggatgcctgcgagcaagcaggcggtcaccgtttcctacttctatgatgtcacaaggaacagctatcggatcatcagtgtggacggagccaaggtgatcataaacagcacaatcacaccgaatatgaccttcaccaaaacgtcacagaagtttgggcagtgggccgacagcagagccaacacagtgtttggtttggggttttcctctgagcagcagctgacaaagtttgcagagaaattccaggaggtgaaagaagctgccaagatagccaaagacaagacgcaggagaaaatcgagacctcaagtaatcattcccaagaatctgggcgtgaaaccccatcttctactcaggcatccagtgtcaacgggacggacgatgaaaaggcctctcacgccggtccagccaacacacacctgaagtctgagaatgacaagctgaagattgccttgacgcagagcgcagccaacgtgaagaagtgggagatcgagctgcagacccttcgggagagcaatgcacggctgaccacagcactgcaggagtcggcagccagtgtggagcagtggaagaggcagttctccatctgccgtgatgagaatgaccggctccgcaacaagattgatgagctggaagaacaatgcagtgagatcaacagagagaaggagaagaacacgcagctgaagaggaggatcgaggagctggaggcagagctccgagaaaaggagacagagctgaaagatctccgaaaacaaagtgaaatcatacctcagctcatgtcagagtgcgaatatgtctctgagaagctagaggcggcagagagagacaatcaaaacctggaagacaaagtgcgttccttaaagacagacattgaggagagcaaataccgacagcgccacctgaaggtggagttgaagagcttcctggaggtgctggacgggaagattgacgacctgcatgacttccgccgagggctctccaagctgggcaccgataactagggctggccgaggcccaggccccgcccgtgagtcccaagcgtgtgtgcgagaccagatagctctaggacgttcttctgtgtgcattgcttctgtaaatgcaggcgcagtttgtcgtgtttccaaaccagttgtgccgtccactcactccttttcagaatagaaatctcctctcgcttctctggccttgtgaggttgtggacaactggaagattctgactcaggaatccagaactaggtctaccttcaacatttatgcagtcagggcagggatgtttatatctttcataagggctgttgcaaccatatgaactgaaaaaacacgcattttgtaatccaaatattgatattctttacaccaagccatcaggctccttttatcaaatagcattcagagtatttgaatgtccaccagacaccagccccggggggcacagagagaacaacattcctctctgtcaacatcgagaggctttaaaacaactgtttagtggaaactttctgagagatggaaaacaagcttctggtgggtgcattttctggcccggagttgcctgcatccacgctactgccccctgccccccgcccccccagtttgtacggttgcaacagtgttccttttcttggttttaatttctgagcagatgattgtgctgtgggaacagcacacagtgagggtgcctagcacaatgtctggcacaaagtaggtgcttaataaatatttgttcaattaaatgtgaaaaaaaa

SEQ ID NO: 446926 - DNA, 1835 bp, Homo sapiens
atatttgaaatttactctctgaacattgaacatcaaaggaaggagaataaatttggatatgaagagaacagcccatcttcaccacccgagcgcatgtcttccagattgaccccaacaccaagaagaactggatgcctgcgagcaagcaggcggtcaccgtttcctacttctatgatgtcacaaggaacagctatcggatcatcagtgtggacggagccaaggtgatcataaacagcacaatcacaccgaatatgaccttcaccaaaacgtcacagaagtttgggcagtgggccgacagcagagccaacacagtgtttggtttggggttttcctctgagcagcagctgacaaagtttgcagagaaattccaggaggtgaaagaagctgccaagatagccaaagacaagacgcaggagaaaatcgagacctcaagtaatcattcccaagcatccagtgtcaacgggacggacgatgaaaaggcctctcacgccggtccagccaacacacacctgaagtctgagaatgacaagctgaagattgccttgacgcagagcgcagccaacgtgaagaagtgggagatcgagctgcagacccttcgggagagcaatgcacggctgaccacagcactgcaggagtcggcagccagtgtggagcagtggaagaggcagttctccatctgccgtgatgagaatgaccggctccgcaacaagattgatgagctggaagaacaatgcagtgagatcaacagagagaaggagaagaacacgcagctgaagaggaggatcgaggagctggaggcagagctccgagaaaaggagacagagctgaaagatctccgaaaacaaagtgaaatcatacctcagctcatgtcagagtgcgaatatgtctctgagaagctagaggcggcagagagagacaatcaaaacctggaagacaaagtgcgttccttaaagacagacattgaggagagcaaataccgacagcgccacctgaaggtggagttgaagagcttcctggaggtgctggacgggaagattgacgacctgcatgacttccgccgagggctctccaagctgggcaccgataactagggctggccgaggcccaggccccgcccgtgagtcccaagcgtgtgtgcgagaccagatagctctaggacgttcttctgtgtgcattgcttctgtaaatgcaggcgcagtttgtcgtgtttccaaaccagttgtgccgtccactcactccttttcagaatagaaatctcctctcgcttctctggccttgtgaggttgtggacaactggaagattctgactcaggaatccagaactaggtctaccttcaacatttatgcagtcagggcagggatgtttatatctttcataagggctgttgcaaccatatgaactgaaaaaacacgcattttgtaatccaaatattgatattctttacaccaagccatcaggctccttttatcaaatagcattcagagtatttgaatgtccaccagacaccagccccggggggcacagagagaacaacattcctctctgtcaacatcgagaggctttaaaacaactgtttagtggaaactttctgagagatggaaaacaagcttctggtgggtgcattttctggcccggagttgcctgcatccacgctactgccccctgccccccgcccccccagtttgtacggttgcaacagtgttccttttcttggttttaatttctgagcagatgattgtgctgtgggaacagcacacagtgagggtgcctagcacaatgtctggcacaaagtaggtgcttaataaatatttgttcaattaaatgtgaaaaaaaa

SEQ ID NO: 446927 - DNA, 1846 bp, Homo sapiens
cgcccgcccgcgcctggcggcggtggcggcagtggcagcagtggcagccgcgcagccccgcggaatggagcggcgccggggctgagccgggcgcgcacgggccgccgcatgtgccgcgcggggagcggctgccgagcgggcggagagcgagcgcgagaggccccgtcggagcggccgccggagcagcgccggagatgggagaacagcccatcttcaccacccgagcgcatgtcttccagattgaccccaacaccaagaagaactggatgcctgcgagcaagcaggcggtcaccgtttcctacttctatgatgtcacaaggaacagctatcggatcatcagtgtggacggagccaaggtgatcataaacagcacaatcacaccgaatatgaccttcaccaaaacgtcacagaagtttgggcagtgggccgacagcagagccaacacagtgtttggtttggggttttcctctgagcagcagctgacaaagtttgcagagaaattccaggaggtgaaagaagctgccaagatagccaaagacaagacgcaggagaaaatcgagacctcaagtaatcattcccaagaatctgggcgtgaaaccccatcttctactcaggcatccagtgtcaacgggacggacgatgaaaaggcctctcacgccggtccagccaacacacacctgaagtctgagaatgacaagctgaagattgccttgacgcagagattgatgagctggaagaacaatgcagtgagatcaacagagagaaggagaagaacacgcagctgaagaggaggatcgaggagctggaggcagagctccgagaaaaggagacagagctgaaagatctccgaaaacaaagtgaaatcatacctcagctcatgtcagagtgcgaatatgtctctgagaagctagaggcggcagagagagacaatcaaaacctggaagacaaagtgcgttccttaaagacagacattgaggagagcaaataccgacagcgccacctgaaggtggagttgaagagcttcctggaggtgctggacgggaagattgacgacctgcatgacttccgccgagggctctccaagctgggcaccgataactagggctggccgaggcccaggccccgcccgtgagtcccaagcgtgtgtgcgagaccagatagctctaggacgttcttctgtgtgcattgcttctgtaaatgcaggcgcagtttgtcgtgtttccaaaccagttgtgccgtccactcactccttttcagaatagaaatctcctctcgcttctctggccttgtgaggttgtggacaactggaagattctgactcaggaatccagaactaggtctaccttcaacatttatgcagtcagggcagggatgtttatatctttcataagggctgttgcaaccatatgaactgaaaaaacacgcattttgtaatccaaatattgatattctttacaccaagccatcaggctccttttatcaaatagcattcagagtatttgaatgtccaccagacaccagccccggggggcacagagagaacaacattcctctctgtcaacatcgagaggctttaaaacaactgtttagtggaaactttctgagagatggaaaacaagcttctggtgggtgcattttctggcccggagttgcctgcatccacgctactgccccctgccccccgcccccccagtttgtacggttgcaacagtgttccttttcttggttttaatttctgagcagatgattgtgctgtgggaacagcacacagtgagggtgcctagcacaatgtctggcacaaagtaggtgcttaataaatatttgttcaattaaatgtgaaaaaaaa

SEQ ID NO: 446928 - DNA, 450 bp, Homo sapiens
cagattgaccccaacaccaagaagaactggatgcctgcgagcaagcaggcggtcaccgtttcctacttctatgatgtcacaaggaacagctatcggatcatcagtgtggacggagccaaggtaccaccccctcagctgattttaatactcccagttgcttatctttcatccaagatgcacccaaaatcctgccgtcttaacacataagttattgttataatgtctgtataacatattctgttctttttgcatttaaacttacggtaaatggggaagaaaaatatttctctgttaccactgtcttcataactaacattttaatgcctgtataataattctgccgacggcctataatgctcttaatttccccccgtggttggatatttaagtggcttccaatgttttgctattataaataatgagcatcttcatgtaccaaatatcctcaat

SEQ ID NO: 446929 - DNA, 6434 bp, Homo sapiens
agcgggggctacgtgcgcgcggcgagcgccgggcgtacttttgcgtggttgctccaccccctcagccttgccttcgccgccgttggggctggaagttcccgccaggtccgtgccgggcgagagagatgctgcccggcccgcctcggctttgaggcgagagaagtgtcccagacccatttcgccttgctgacggcgtcgagccctggccagacatgtccacagggttctccttcgggtccgggactctgggctccaccaccgtggccgccggcgggaccagcacaggcggcgttttctccttcggaacgggaacgtctagcaacccttctgtggggctcaattttggaaatcttggaagtacttcaactccagcaactacatctgctccttcaagtggttttggaaccgggctctttggatctaaacctgccactgggttcactctaggaggaacaaatacaggaatagcaacaactataactacaggattaactctgggaacgccagccactacatctgcagctacaacaggcttcagtttaggattcaataaacctgcagcatctgccacaccatttgctctacctattacctctacctcagctagcggtctgactctttcgtctgctctgacatcaactccagcagcatccacaggatttactctaaataatttgggtgggacaacagccacaactacaactgcatcaacaggcctctctttagggggagccttagctggtttgggaggttcacttttccagagtacaaacacaggaacatcaggacttggacagaatgctttagggttgactttgggaactacagcagctacttcaactgcaggcaatgaaggccttggtggtatagatttcagtagctcctcagataaaaagagtgataaaacgggaacaagaccagaggatagtaaagctctgaaggatgaaaatctacctcctgtcatctgccaggatgttgaaaatctccagaaatttgtgaaggagcagaaacaagttcaagaagaaattagtagaatgtcttcaaaagcaatgcttaaggtacaagaagatattaaagctctgaagcagctcctgtcgttggctgccaatggaatacagagaaacactctcaacattgacaaattgaaaatagaaactgctcaggagttgaagaatgctgaaatagctttaagaacccagaagacaccacctggacttcaacatgaatatgcagctcctgctgactacttcagaatcttggttcagcaatttgaggtacagcttcagcagtacaggcagcagattgaagaactagaaaaccatcttgccactcaagcaaataattcacatataacccctcaagatttgtcaatggctatgcagaaaatttatcaaacatttgtagctttagcggcacaacttcagtctattcatgaaaatgtaaaggttctgaaagaacagtaccttggctacaggaaaatgttcttgggagatgctgttgatgtgtttgaaacaaggcgagcagaagccaagaagtggcagaacacacccagagttactactggacccactcctttcagcaccatgccaaacgcagcagccgttgccatggctgcaacacttacacagcagcaacagcctgctacaggtctgaacgcattcaagttatagcttcttactgttccaatgcagaacatttatgtgcgtttttataagtcttccatttgtgtgagcactgaagaaatttctatgagtagctgttccaatacaatctaaaattgtgatggacacgattataaacatacctgataaaaaaggcagggtagtcttagcaataattatacatcaattagatattgaatattgtgaatctacttaatgttatttgctgtaatgctataaatgccctttagaacatggtgtttcactagtgaattacatttaagaataacattagattctgaaatcatgactgtaccatttattgttttaaagtcagagatcatccatccattctttgaatttttcatatatgatactgataggtggtgcattctcattttcctcatacatagtgattacaaagtacccacattcaggatgaagtatgcttttattgactgaaggtatgttgaagatcaataggcttgtttgtatgtatgttgactgtaaacagaatacaagccctctaaaccaaattttgaagatgatacatgctagaattgtacctttccaaggtgaacagaacagcaagagcaggaaaaagatgttttgagatgtggattgcacattaaggagcaactgggaagttgaacagatgaaaataattggtgacatggaaagcagattgttttatttcttggtttagttacacttctaattagagaaacattttttgtggtcattctacagtgttttatttggtcctgtgtctttcggaggttaatagttatcttaatcctgccatcccttttgtcaggtttgaagcttgacatggaaaaatagtcttaatcgatattgatttttttattttaatcattcataaatttcttagtaatgcttactattcaatagcatgtgtctttctgagagttccatatagtccagtagtacattataatacacacaaattaatacatatttagattgcattcaagctacctatactagggaagcattctctggttttcactattggcagtttaaaaaattgttcttcacatttggagatgacagaattgacttgccataagtaaagggttgatgatagatttatgccaaatcctccatatcccgtggctggacccatgtgaatagtggctcgcacgagcactgtctggtagctctctagctggctggagtgtaggattgcgttgttaagttatggagggaaaaagtcattatgggattgattcctttgaggattgatatttcttcttaaaaggattcaatcccataattatgaccatcagctctcatgattacctaaccagttaatcaaaccaaccatagtactagtttactttttagagccagtattaatcctaaagtagataagtgtagatttggttaagtgttctttaaacatagtgaatttccattctattaaatagaacttgagaaatgtcagttatataaaaagttatgttgtaagtgaatatattctatgataaatacctaaacttgaagcaaaatctcctgtcaagggtttgtgtgtgtgtgtgtgtttaactttcttatctatagattattattttgagaaattcataggttttcacttatacattttgagcttgtggacatatggagatgtgtgttcattctctaaatgagtgcctactatgtgctgggctcgaggaatacaaaggtagacaatatagattttgtctttgccctctgtggtggttgacaatgttagcttaatctggagtattcttgaggagccttttgctcataggctttaattttgtctgtgacttttgccaggctttggggaaattgactgccttcactcttccctgaaactttgaagtccacataagggctttctcatcagatggcagaaattataatttattaacctaaacaaccttacagtgttttcgctttgaattgtatgaattcttagaactgagaagctaaacaacagtgataacaattttacattatcttttctttctccttttgtttctctaaaggtctcccaggccttcccagtcaaaattttcgttatttttagtcatgtcaccatgatgtgagatttctgagctctgttagatacatttagaaatgtccctatttatcaaatggtgttttgtaccccataagttatcccttatgccctgtgacttctgtgaaatctttgtttttaagtgccagtaacaaattttagaccatctagatgagggtagagagagcttatgcattgtttttatacatcactgttgatctatacaagatttgagttatcagaagggttttgcttttatttgcatatgaaatttttattaacatgaatatgggcacagagcaaatagcttcttagactgctgccttctgaaggtggcttctgtatctttctcagaggaggaggaatagacttaaacgacttctttgtcctccttcaattttttttttaatgaaaaagtatactagggcttaggcatgtgtgatttacagttatttgttctgaaggctgcagagaattgaaaatccagcaggctatttgtgtatgaaatcatgagcatcgataacgtggataacgtagttccatgttggcagaacttgacacttgtctataagtgcttcccaagcctcctgaaaaactgaagacatttacattaggcttttcagtataattttaatttaggataggttttttagcaatgtatctgggattgagttttgctattgtgttttgacactttaagagttcttgatgtttacataataagactttcttatgtgacttagctgctgttttaaggagagccaagacgttttgttaggaattcctaatttttagcttagtgtaggtttggacatttaaggtgtagtgttaaataggaaacattaagtatttcatcttagtttcttgtggttttgtgattttgttgtatttaataaccaaaggaacattccccattaaatcagtaagagtaaaatttttcaaactggggaaaacgcattttaggttttttaaagaaaaattattttaaaatgtgacttagaaataaccatactaattacattaggcatttggggtgatcatggaaaattataaaatatttttagcactttagtcctttttctgttaatgcagttttacttttaagaaagtaaaatttattctggaaaatatgaattacagcgctaaacctggttttgttgtgtgtgaatatattatatggtaacttttgtaaaatgttactctacatgaagatttcactttggccagtcattggtatatatcactacaaacttaattttatttatggaaataagaacctctcattggatgactattcaaatttcaaagcagacttcttgaattgtttacgtaacttttgcctgaaggatttagactgctttctaatagtgaaactaatatatatggtggccagagtgtaatatatgctaatactttggcatgggagatatttatcatgagtttttactattaaaaaatgttatacatttgcctacgagttttataaatgatgttgccttcagaatttgtgtgaaggtacaaaactaaaaatatcatgtatctgatgtgcaatggaaagtcttgtcatcattagatatgagttcttgattatattctgaatattgatgattagaaaaatcttatgttctgttgctcttaacaacagacccacacacaacaaaaagcatgctatttgagtaactcttacgacttacaaggctgagggctgtggtgtgcattattctttagggtcttccaccagcagtgcctcctattaacctgtgacaaacaagtctctcaatgttaaagaactggacatgtgttttttatgttttttgttaggaatcagaaagtataataatatgcttggtttctttttcctatagtaacattttacaaaagagctgctaggcaggtattttattctcaaagtgatctcaaactggatgtaaaattttaaattatttttttaatagtagtataagaattctggctgctattagttattgtttgttttctgggttagaagctattcgaaaagtccagtttctgtcccagtgtagcaaaatgtagttcctcggttgtttttctttaaatgctttataattttacactacctttttaatatacaaacctcattcttcattggataacttgaaggctttgatttctttaaaaatttaaattttagtgtgtatattactttgacagttccctcatctttgagatgcactgatcactgtgcttgaaaaagacaatactgaagattgtactatgaagtttattgaataattttcataaattatttatccaaatgagagatttttagatttttgtattctgcttagttttaaaaaaaaaaaatagtagtttaaaagagaggctagtaagtttgatgctattcttgccaaacaaactcagccaaaatctttaaagtaacaagagggaaaaggatgactaatcgttctgcttctgagtacattttccaaaacgttggaaagaaacttctgaattgaaatcttgaatgtattgaatctgtcaaggtacacagcggtgcctttgtaaatgttcattactttatttaatcaggtgataagtggtgtaatgtagcagagcttaagaatagaactcaattatcactttttgtgaacaagttggaattgtcatgttactgtgtaattgatttgctttacaatgaacaataaatttaataaaataaaaaaatg

SEQ ID NO: 446930 - DNA, 4284 bp, Homo sapiens
agcgggggctacgtgcgcgcggcgagcgccgggcgtacttttgcgtggttgctccaccccctcagccttgccttcgccgccgttggggctggaagttcccgccaggtccgtgccgggcgagagagatgctgcccggcccgcctcggctttgaggcgagagaagtgtcccagacccatttcgccttgctgacggcgtcgagccctggccagacatgtccacagggttctccttcgggtccgggactctgggctccaccaccgtggccgccggcgggaccagcacaggcggcgttttctccttcggaacgggaacgtctagcaacccttctgtggggctcaattttggaaatcttggaagtacttcaactccagcaactacatctgctccttcaagtggttttggaaccgggctctttggatctaaacctgccactgggttcactctaggaggaacaaatacaggaatagcaacaactataactacaggattaactctgggaacgccagccactacatctgcagctacaacaggcttcagtttaggattcaataaacctgcagcatctgccacaccatttgctctacctattacctctacctcagctagcggtctgactctttcgtctgctctgacatcaactccagcagcatccacaggatttactctaaataatttgggtgggacaacagccacaactacaactgcatcaacaggcctctctttagggggagccttagctggtttgggaggttcacttttccagagtacaaacacaggaacatcaggacttggacagaatgctttagggttgactttgggaactacagcagctacttcaactgcaggcaatgaaggccttggtggtatagatttcagtagctcctcagataaaaagagtgataaaacgggaacaagaccagaggatagtaaagctctgaaggatgaaaatctacctcctgtcatctgccaggatgttgaaaatctccagaaatttgtgaaggagcagaaacaagttcaagaagaaattagtagaatgtcttcaaaagcaatgcttaaggtacaagaagatattaaagctctgaagcagctcctgtcgttggctgccaatggaatacagagaaacactctcaacattgacaaattgaaaatagaaactgctcaggagttgaagaatgctgaaatagctttaagaacccagaagacaccacctggacttcaacatgaatatgcagctcctgctgactacttcagaatcttggttcagcaatttgaggtacagcttcagcagtacaggcagcagattgaagaactagaaaaccatcttgccactcaagcaaataattcacatataacccctcaagatttgtcaatggctatgcagaaaatttatcaaacatttgtagctttagcggcacaacttcagtctattcatgaaaatgtaaaggttctgaaagaacagtaccttggctacaggaaaatgttcttgggagatgctgttgatgtgtttgaaacaaggcgagcagaagccaagaagtggcagaacacacccagagttactactggacccactcctttcagcaccatgccaaacgcagcagccgttgccatggctgcaacacttacacagcagcaacagcctgctacagggccacagccatctctgggagttagttttggaacgccattcggctcaggtattggcactggcttgcaatcaagtggcttaggttcttcaaaccttggaggatttggaactagctctggttttggatgcagcaccacaggggcctccacatttggatttggaacaacaaataaaccctcaggaagtcttagtgcaggctttggcagctcaagtacatctgggtttaacttcagcaatcctggcatcacggcatcagctggtttgacttttggggtgtccaatcctgcctctgcaggttttggaacaggaggacaactccttcagttgaagaaacctccagctggaaacaaaagaggaaaaagataaacatgggttgatgtgttgagagaatccatagcagcaccgttcattctatgagtctatttttctaatgatgcagtaattaaattgcatcccaggagatttataaagttttgatatttttccctactctggaatttgaactttcttcatgtttgccatactgaacatcttttttcttgtggaatttaaagtccagctgtgttttctttttaatttgattctcagtgtaagaaatgttctgattacatcactgattggtaatggttagaaaccattaacctaaaacttactatttaacctagtgtttttgttgatgaggtttacattatgtgaatacatgcacatttgtttcttatacaggtggtgtgaactctagggcctatactagaatcaatttgttccttgttaaaggccttttgaattatactgcagggcatcttgtgaatatgtatgtaaatatatacagaataatacacacagttgtgtgtgcatataaaatacatatttacgccaggcgtggtggctcacgcctgtaatcccagcactttgggaggccgaggcaggcggatcacctgaggtcaggagtttgagaccagcctgacatggtgaaaccccatctctacgaaaaatacaaaaattagctgggcatagtggcgggtacctataatcccagctactcgggaggctgaggcacgagaatcacttgaagccgggaggtgggggttgcagtgagccgagatcacaccactgcactccagcctgggcaacaagagcaaaactccgtctcaaaaaagatgaaaataaaataaaatatatatttacaggcctacaacttttgcctcagactgttccccttttctaagggtattcaagttttcaccttttaagcttcatatcctcagtgcttgtagaatgatgagcttagaggtaccaggtcattgcagttgtttgcttaaagacttattgaaatggttactggcgtaaatacttggccaactcaactttattgcccctgatcttttccatttttgtttccaccttaacctatagcagctcctccaaatgaggaatgctgtaagtaagactcatcaaacagattttaaccattttattatcctgtgtgtccttacattgcttctgtgagatgtttttttcttatctgagatgaactttcaggagcctatttgaactccagactggtgttctggggcaaagagctattagccaaactgattctatgcaggtgaaggatgcactaaagttctcactttagtgagaacttttctagctattccaatacagagttctttcttatagggctattgatattgacaccaaatggagtggcttctcagcctcttaatgtcttaagtaagtgcttaatttggaatagagaaaccagtatattttaaaaaagaaaaatattctttgtagcaactgtaaattctcccattataacagtgaacagagctccaggtaataacgcataggcatgtcaggttgcatctgtatatttgactacattagtattagtgacatcaggtggatataaaagaaaacccttggaaagagaactgccttagccatgatttcgttagtagacctatttatgattcaattgcaattttcagataggatgtgaacatggaatttcattgaaaatagtttaattttttatataaaaggttttgtatataatgtgtgtcagtgactattttcaaaatcattttcatcaagacaccttttttctaaaataggcattgcatacacatatgcacacgtatgtgcacgtgccacacattttttgtataatgttgggtttgattataaaagtgttgtcaaatgttttatttatctgcatatagcagtggttggcttttttgaattgaaatttttgcgcattgatgcattgaaataaggaaaattatttatctctgagcactaaacttatttttgcatatttctgtaatattgcagtccccagatccagaacatgggaagttagggaaaatgtgtgattttgtgttttgaattactgtcagaattacatacacaattacaacaaactttttttaaaagacatttcattgtactgcaaaaatctgaatatttatatttcttgtttttttctttatatgttttgcattttaatatgttgagccactggaaatttgtaacagattaatttgttataggagtttaaatgtgttgtcattgtctccattgtctttgtccagagcctattattatggaaacaataaaatttattgtgtca

SEQ ID NO: 446931 - DNA, 4148 bp, Homo sapiens
agcgggggctacgtgcgcgcggcgagcgccgggcgtacttttgcgtggttgctccaccccctcagccttgccttcgccgccgttggggctggaagttcccgccaggtccgtgccgggcgagagagatgctgcccggcccgcctcggctttgaggcgagagaagtgtcccagacccatttcgccttgctgacggcgtcgagccctggccagacatgtccacagggttctccttcgggtccgggactctgggctccaccaccgtggccgccggcgggaccagcacaggcggcgttttctccttcggaacgggaacgtctagcaacccttctgtggggctcaattttggaaatcttggaagtacttcaactccagcaactacatctgctccttcaagtggttttggaaccgggctctttggatctaaacctgccactgggttcactctaggaggaacaaatacaggaatagcaacaactataactacaggattaactctgggaacgccagccactacatctgcagctacaacaggcttcagtttaggattcaataaacctgcagcatctgccacaccatttgctctacctattacctctacctcagctagcggtctgactctttcgtctgctctgacatcaactccagcagcatccacaggatttactctaaataatttgggtgggacaacagccacaactacaactgcatcaacaggcctctctttagggggagccttagctggtttgggaggttcacttttccagagtacaaacacaggaacatcagggatagtaaagctctgaaggatgaaaatctacctcctgtcatctgccaggatgttgaaaatctccagaaatttgtgaaggagcagaaacaagttcaagaagaaattagtagaatgtcttcaaaagcaatgcttaaggtacaagaagatattaaagctctgaagcagctcctgtcgttggctgccaatggaatacagagaaacactctcaacattgacaaattgaaaatagaaactgctcaggagttgaagaatgctgaaatagctttaagaacccagaagacaccacctggacttcaacatgaatatgcagctcctgctgactacttcagaatcttggttcagcaatttgaggtacagcttcagcagtacaggcagcagattgaagaactagaaaaccatcttgccactcaagcaaataattcacatataacccctcaagatttgtcaatggctatgcagaaaatttatcaaacatttgtagctttagcggcacaacttcagtctattcatgaaaatgtaaaggttctgaaagaacagtaccttggctacaggaaaatgttcttgggagatgctgttgatgtgtttgaaacaaggcgagcagaagccaagaagtggcagaacacacccagagttactactggacccactcctttcagcaccatgccaaacgcagcagccgttgccatggctgcaacacttacacagcagcaacagcctgctacagggccacagccatctctgggagttagttttggaacgccattcggctcaggtattggcactggcttgcaatcaagtggcttaggttcttcaaaccttggaggatttggaactagctctggttttggatgcagcaccacaggggcctccacatttggatttggaacaacaaataaaccctcaggaagtcttagtgcaggctttggcagctcaagtacatctgggtttaacttcagcaatcctggcatcacggcatcagctggtttgacttttggggtgtccaatcctgcctctgcaggttttggaacaggaggacaactccttcagttgaagaaacctccagctggaaacaaaagaggaaaaagataaacatgggttgatgtgttgagagaatccatagcagcaccgttcattctatgagtctatttttctaatgatgcagtaattaaattgcatcccaggagatttataaagttttgatatttttccctactctggaatttgaactttcttcatgtttgccatactgaacatcttttttcttgtggaatttaaagtccagctgtgttttctttttaatttgattctcagtgtaagaaatgttctgattacatcactgattggtaatggttagaaaccattaacctaaaacttactatttaacctagtgtttttgttgatgaggtttacattatgtgaatacatgcacatttgtttcttatacaggtggtgtgaactctagggcctatactagaatcaatttgttccttgttaaaggccttttgaattatactgcagggcatcttgtgaatatgtatgtaaatatatacagaataatacacacagttgtgtgtgcatataaaatacatatttacgccaggcgtggtggctcacgcctgtaatcccagcactttgggaggccgaggcaggcggatcacctgaggtcaggagtttgagaccagcctgacatggtgaaaccccatctctacgaaaaatacaaaaattagctgggcatagtggcgggtacctataatcccagctactcgggaggctgaggcacgagaatcacttgaagccgggaggtgggggttgcagtgagccgagatcacaccactgcactccagcctgggcaacaagagcaaaactccgtctcaaaaaagatgaaaataaaataaaatatatatttacaggcctacaacttttgcctcagactgttccccttttctaagggtattcaagttttcaccttttaagcttcatatcctcagtgcttgtagaatgatgagcttagaggtaccaggtcattgcagttgtttgcttaaagacttattgaaatggttactggcgtaaatacttggccaactcaactttattgcccctgatcttttccatttttgtttccaccttaacctatagcagctcctccaaatgaggaatgctgtaagtaagactcatcaaacagattttaaccattttattatcctgtgtgtccttacattgcttctgtgagatgtttttttcttatctgagatgaactttcaggagcctatttgaactccagactggtgttctggggcaaagagctattagccaaactgattctatgcaggtgaaggatgcactaaagttctcactttagtgagaacttttctagctattccaatacagagttctttcttatagggctattgatattgacaccaaatggagtggcttctcagcctcttaatgtcttaagtaagtgcttaatttggaatagagaaaccagtatattttaaaaaagaaaaatattctttgtagcaactgtaaattctcccattataacagtgaacagagctccaggtaataacgcataggcatgtcaggttgcatctgtatatttgactacattagtattagtgacatcaggtggatataaaagaaaacccttggaaagagaactgccttagccatgatttcgttagtagacctatttatgattcaattgcaattttcagataggatgtgaacatggaatttcattgaaaatagtttaattttttatataaaaggttttgtatataatgtgtgtcagtgactattttcaaaatcattttcatcaagacaccttttttctaaaataggcattgcatacacatatgcacacgtatgtgcacgtgccacacattttttgtataatgttgggtttgattataaaagtgttgtcaaatgttttatttatctgcatatagcagtggttggcttttttgaattgaaatttttgcgcattgatgcattgaaataaggaaaattatttatctctgagcactaaacttatttttgcatatttctgtaatattgcagtccccagatccagaacatgggaagttagggaaaatgtgtgattttgtgttttgaattactgtcagaattacatacacaattacaacaaactttttttaaaagacatttcattgtactgcaaaaatctgaatatttatatttcttgtttttttctttatatgttttgcattttaatatgttgagccactggaaatttgtaacagattaatttgttataggagtttaaatgtgttgtcattgtctccattgtctttgtccagagcctattattatggaaacaataaaatttattgtgtca

SEQ ID NO: 446932 - DNA, 4248 bp, Homo sapiens
agcgggggctacgtgcgcgcggcgagcgccgggcgtacttttgcgtggttgctccaccccctcagccttgccttcgccgccgttggggctggaagttcccgccaggtccgtgccgggcgagagagatgctgcccggcccgcctcggctttgaggcgagagaagtgtcccagacccatttcgccttgctgacggcgtcgagccctggccagacatgtccacagggttctccttcgggtccgggactctgggctccaccaccgtggccgccggcgggaccagcacaggcggcgttttctccttcggaacgggaacgtctagcaacccttctgtggggctcaattttggaaatcttggaagtacttcaactccagcaactacatctgctccttcaagtggttttggaaccgggctctttggatctaaacctgccactgggttcactctaggaggaacaaatacaggaacgccagccactacatctgcagctacaacaggcttcagtttaggattcaataaacctgcagcatctgccacaccatttgctctacctattacctctacctcagctagcggtctgactctttcgtctgctctgacatcaactccagcagcatccacaggatttactctaaataatttgggtgggacaacagccacaactacaactgcatcaacaggcctctctttagggggagccttagctggtttgggaggttcacttttccagagtacaaacacaggaacatcaggacttggacagaatgctttagggttgactttgggaactacagcagctacttcaactgcaggcaatgaaggccttggtggtatagatttcagtagctcctcagataaaaagagtgataaaacgggaacaagaccagaggatagtaaagctctgaaggatgaaaatctacctcctgtcatctgccaggatgttgaaaatctccagaaatttgtgaaggagcagaaacaagttcaagaagaaattagtagaatgtcttcaaaagcaatgcttaaggtacaagaagatattaaagctctgaagcagctcctgtcgttggctgccaatggaatacagagaaacactctcaacattgacaaattgaaaatagaaactgctcaggagttgaagaatgctgaaatagctttaagaacccagaagacaccacctggacttcaacatgaatatgcagctcctgctgactacttcagaatcttggttcagcaatttgaggtacagcttcagcagtacaggcagcagattgaagaactagaaaaccatcttgccactcaagcaaataattcacatataacccctcaagatttgtcaatggctatgcagaaaatttatcaaacatttgtagctttagcggcacaacttcagtctattcatgaaaatgtaaaggttctgaaagaacagtaccttggctacaggaaaatgttcttgggagatgctgttgatgtgtttgaaacaaggcgagcagaagccaagaagtggcagaacacacccagagttactactggacccactcctttcagcaccatgccaaacgcagcagccgttgccatggctgcaacacttacacagcagcaacagcctgctacagggccacagccatctctgggagttagttttggaacgccattcggctcaggtattggcactggcttgcaatcaagtggcttaggttcttcaaaccttggaggatttggaactagctctggttttggatgcagcaccacaggggcctccacatttggatttggaacaacaaataaaccctcaggaagtcttagtgcaggctttggcagctcaagtacatctgggtttaacttcagcaatcctggcatcacggcatcagctggtttgacttttggggtgtccaatcctgcctctgcaggttttggaacaggaggacaactccttcagttgaagaaacctccagctggaaacaaaagaggaaaaagataaacatgggttgatgtgttgagagaatccatagcagcaccgttcattctatgagtctatttttctaatgatgcagtaattaaattgcatcccaggagatttataaagttttgatatttttccctactctggaatttgaactttcttcatgtttgccatactgaacatcttttttcttgtggaatttaaagtccagctgtgttttctttttaatttgattctcagtgtaagaaatgttctgattacatcactgattggtaatggttagaaaccattaacctaaaacttactatttaacctagtgtttttgttgatgaggtttacattatgtgaatacatgcacatttgtttcttatacaggtggtgtgaactctagggcctatactagaatcaatttgttccttgttaaaggccttttgaattatactgcagggcatcttgtgaatatgtatgtaaatatatacagaataatacacacagttgtgtgtgcatataaaatacatatttacgccaggcgtggtggctcacgcctgtaatcccagcactttgggaggccgaggcaggcggatcacctgaggtcaggagtttgagaccagcctgacatggtgaaaccccatctctacgaaaaatacaaaaattagctgggcatagtggcgggtacctataatcccagctactcgggaggctgaggcacgagaatcacttgaagccgggaggtgggggttgcagtgagccgagatcacaccactgcactccagcctgggcaacaagagcaaaactccgtctcaaaaaagatgaaaataaaataaaatatatatttacaggcctacaacttttgcctcagactgttccccttttctaagggtattcaagttttcaccttttaagcttcatatcctcagtgcttgtagaatgatgagcttagaggtaccaggtcattgcagttgtttgcttaaagacttattgaaatggttactggcgtaaatacttggccaactcaactttattgcccctgatcttttccatttttgtttccaccttaacctatagcagctcctccaaatgaggaatgctgtaagtaagactcatcaaacagattttaaccattttattatcctgtgtgtccttacattgcttctgtgagatgtttttttcttatctgagatgaactttcaggagcctatttgaactccagactggtgttctggggcaaagagctattagccaaactgattctatgcaggtgaaggatgcactaaagttctcactttagtgagaacttttctagctattccaatacagagttctttcttatagggctattgatattgacaccaaatggagtggcttctcagcctcttaatgtcttaagtaagtgcttaatttggaatagagaaaccagtatattttaaaaaagaaaaatattctttgtagcaactgtaaattctcccattataacagtgaacagagctccaggtaataacgcataggcatgtcaggttgcatctgtatatttgactacattagtattagtgacatcaggtggatataaaagaaaacccttggaaagagaactgccttagccatgatttcgttagtagacctatttatgattcaattgcaattttcagataggatgtgaacatggaatttcattgaaaatagtttaattttttatataaaaggttttgtatataatgtgtgtcagtgactattttcaaaatcattttcatcaagacaccttttttctaaaataggcattgcatacacatatgcacacgtatgtgcacgtgccacacattttttgtataatgttgggtttgattataaaagtgttgtcaaatgttttatttatctgcatatagcagtggttggcttttttgaattgaaatttttgcgcattgatgcattgaaataaggaaaattatttatctctgagcactaaacttatttttgcatatttctgtaatattgcagtccccagatccagaacatgggaagttagggaaaatgtgtgattttgtgttttgaattactgtcagaattacatacacaattacaacaaactttttttaaaagacatttcattgtactgcaaaaatctgaatatttatatttcttgtttttttctttatatgttttgcattttaatatgttgagccactggaaatttgtaacagattaatttgttataggagtttaaatgtgttgtcattgtctccattgtctttgtccagagcctattattatggaaacaataaaatttattgtgtca

SEQ ID NO: 446933 - DNA, 4348 bp, Homo sapiens
  misc_feature (4326)..(4326): n is a, c, g, or t
  misc_feature (4335)..(4335): n is a, c, g, or t
agcgggggctacgtgcgcgcggcgagcgccgggcgtacttttgcgtggttgctccaccccctcagccttgccttcgccgccgttggggctggaagttcccgccaggtccgtgccgggcgagagagatgctgcccggcccgcctcggctttgaggcgagagaagtgtcccagacccatttcgccttgctgacggcgtcgagccctggccagacatgtccacagggttctccttcgggtccgggactctgggctccaccaccgtggccgccggcgggaccagcacaggcggcgttttctccttcggaacgggaacgtctagcaacccttctgtggggctcaattttggaaatcttggaagtacttcaactccagcaactacatctgctccttcaagtggttttggaaccgggctctttggatctaaacctgccactgggttcactctaggaggaacaaatacaggaatagcaacaactataactacaggattaactctgggaacgccagccactacatctgcagctacaacaggcttcagtttaggattcaataaacctgcagcatctgccacaccatttgctctacctattacctctacctcagctagcggtctgactctttcgtctgctctgacatcaactccagcagcatccacaggatttactctaaataatttgggtgggacaacagccacaactacaactgcatcaacaggcctctctttagggggagccttagctggtttgggaggttcacttttccagagtacaaacacaggaacatcaggacttggacagaatgctttagggttgactttgggaactacagcagctacttcaactgcaggcaatgaaggccttggtggtatagatttcagtagctcctcagataaaaagagtgataaaacgggaacaagaccagaggatagtaaagctctgaaggatgaaaatctacctcctgtcatctgccaggatgttgaaaatctccagaaatttgtgaaggagcagaaacaagttcaagaagaaattagtagaatgtcttcaaaagcaatgcttaaggtacaagaagatattaaagctctgaagcagctcctgtcgttggctgccaatggaatacagagaaacactctcaacattgacaaattgaaaatagaaactgctcaggagttgaagaatgctgaaatagctttaagaacccagaagacaccacctggacttcaacatgaatatgcagctcctgctgactacttcagaatcttggttcagcaatttgaggtacagcttcagcagtacaggcagcagattgaagaactagaaaaccatcttgccactcaagcaaataattcacatataacccctcaagatttgtcaatggctatgcagaaaatttatcaaacatttgtagctttagcggcacaacttcagtctattcatgaaaatgtaaaggttctgaaagaacagtaccttggctacaggaaaatgttcttgggagatgctgttgatgtgtttgaaacaaggcgagcagaagccaagaagtggcagaacacacccagagttactactggacccactcctttcagcaccatgccaaacgcagcagccgttgccatggctgcaacacttacacagcagcaacagcctgctacagggccacagccatctctgggagttagttttggaacgccattcggctcaggtattggcactggcttgcaatcaagtggcttaggttcttcaaaccttggaggatttggaactagctctggttttggatgcagcaccacaggggcctccacatttggatttggaacaacaaataaaccctcaggaagtcttagtgcaggctttggcagctcaagtacatctgggtttaacttcagcaatcctggcatcacggcatcagctggtttgacttttggggtgtccaatcctgcctctgcaggttttggaacaggaggacaactccttcagttgaagaaacctccagctggaaacaaaagaggaaaaagataaacatgggttgatgtgttgagagaatccatagcagcaccgttcattctatgagtctatttttctaatgatgcagtaattaaattgcatcccaggagatttataaagttttgatatttttccctactctggaatttgaactttcttcatgtttgccatactgaacatcttttttcttgtggaatttaaagtccagctgtgttttctttttaatttgattctcagtgtaagaaatgttctgattacatcactgattggtaatggttagaaaccattaacctaaaacttactatttaacctagtgtttttgttgatgaggtttacattatgtgaatacatgcacatttgtttcttatacaggtggtgtgaactctagggcctatactagaatcaatttgttccttgttaaaggccttttgaattatactgcagggcatcttgtgaatatgtatgtaaatatatacagaataatacacacagttgtgtgtgcatataaaatacatatttacgccaggcgtggtggctcacgcctgtaatcccagcactttgggaggccgaggcaggcggatcacctgaggtcaggagtttgagaccagcctgacatggtgaaaccccatctctacgaaaaatacaaaaattagctgggcatagtggcgggtacctataatcccagctactcgggaggctgaggcacgagaatcacttgaagccgggaggtgggggttgcagtgagccgagatcacaccactgcactccagcctgggcaacaagagcaaaactccgtctcaaaaaagatgaaaataaaataaaatatatatttacaggcctacaacttttgcctcagactgttccccttttctaagggtattcaagttttcaccttttaagcttcatatcctcagtgcttgtagaatgatgagcttagaggtaccaggtcattgcagttgtttgcttaaagacttattgaaatggttactggcgtaaatacttggccaactcaactttattgcccctgatcttttccatttttgtttccaccttaacctatagcagctcctccaaatgaggaatgctgtaagtaagactcatcaaacagattttaaccattttattatcctgtgtgtccttacattgcttctgtgagatgtttttttcttatctgagatgaactttcaggagcctatttgaactccagactggtgttctggggcaaagagctattagccaaactgattctatgcaggtgaaggatgcactaaagttctcactttagtgagaacttttctagctattccaatacagagttctttcttatagggctattgatattgacaccaaatggagtggcttctcagcctcttaatgtcttaagtaagtgcttaatttggaatagagaaaccagtatattttaaaaaagaaaaatattctttgtagcaactgtaaattctcccattataacagtgaacagagctccaggtaataacgcataggcatgtcaggttgcatctgtatatttgactacattagtattagtgacatcaggtggatataaaagaaaacccttggaaagagaactgccttagccatgatttcgttagtagacctatttatgattcaattgcaattttcagataggatgtgaacatggaatttcattgaaaatagtttaattttttatataaaaggttttgtatataatgtgtgtcagtgactattttcaaaatcattttcatcaagacaccttttttctaaaataggcattgcatacacatatgcacacgtatgtgcacgtgccacacattttttgtataatgttgggtttgattataaaagtgttgtcaaatgttttatttatctgcatatagcagtggttggcttttttgaattgaaatttttgcgcattgatgcattgaaataaggaaaattatttatctctgagcactaaacttatttttgcatatttctgtaatattgcagtccccagatccagaacatgggaagttagggaaaatgtgtgattttgtgttttgaattactgtcagaattacatacacaattacaacaaactttttttaaaagacatttcattgtactgcaaaaatctgaatatttatatttcttgtttttttctttatatgttttgcattttaatatgttgagccactggaaatttgtaacagattaatttgttataggagtttaaatgtgttgtcattgtctccattgtctttgtccagagcctattattatggaaacaataaaatttattgtgtcaaaaaaaaaaaaacaaaaaagaaataaaaaataatagaaagangaaaaacanaaaaaaaaagaaa

SEQ ID NO: 446934 - DNA, 3551 bp, Homo sapiens
gggaaattgttgtagtcttttgatggaatttataagctatgttttatttataggacttggacagaatgctttagggttgactttgggaactacagcagctacttcaactgcaggcaatgaaggccttggtggtatagatttcagtagctcctcagataaaaagagtgataaaacgggaacaagaccagaggatagtaaagctctgaaggatgaaaatctacctcctgtcatctgccaggatgttgaaaatctccagaaatttgtgaaggagcagaaacaagttcaagaagaaattagtagaatgtcttcaaaagcaatgcttaaggtacaagaagatattaaagctctgaagcagctcctgtcgttggctgccaatggaatacagagaaacactctcaacattgacaaattgaaaatagaaactgctcaggagttgaagaatgctgaaatagctttaagaacccagaagacaccacctggacttcaacatgaatatgcagctcctgctgactacttcagaatcttggttcagcaatttgaggtacagcttcagcagtacaggcagcagattgaagaactagaaaaccatcttgccactcaagcaaataattcacatataacccctcaagatttgtcaatggctatgcagaaaatttatcaaacatttgtagctttagcggcacaacttcagtctattcatgaaaatgtaaaggttctgaaagaacagtaccttggctacaggaaaatgttcttgggagatgctgttgatgtgtttgaaacaaggcgagcagaagccaagaagtggcagaacacacccagagttactactggacccactcctttcagcaccatgccaaacgcagcagccgttgccatggctgcaacacttacacagcagcaacagcctgctacagggccacagccatctctgggagttagttttggaacgccattcggctcaggtattggcactggcttgcaatcaagtggcttaggttcttcaaaccttggaggatttggaactagctctggttttggatgcagcaccacaggggcctccacatttggatttggaacaacaaataaaccctcaggaagtcttagtgcaggctttggcagctcaagtacatctgggtttaacttcagcaatcctggcatcacggcatcagctggtttgacttttggggtgtccaatcctgcctctgcaggttttggaacaggaggacaactccttcagttgaagaaacctccagctggaaacaaaagaggaaaaagataaacatgggttgatgtgttgagagaatccatagcagcaccgttcattctatgagtctatttttctaatgatgcagtaattaaattgcatcccaggagatttataaagttttgatatttttccctactctggaatttgaactttcttcatgtttgccatactgaacatcttttttcttgtggaatttaaagtccagctgtgttttctttttaatttgattctcagtgtaagaaatgttctgattacatcactgattggtaatggttagaaaccattaacctaaaacttactatttaacctagtgtttttgttgatgaggtttacattatgtgaatacatgcacatttgtttcttatacaggtggtgtgaactctagggcctatactagaatcaatttgttccttgttaaaggccttttgaattatactgcagggcatcttgtgaatatgtatgtaaatatatacagaataatacacacagttgtgtgtgcatataaaatacatatttacgccaggcgtggtggctcacgcctgtaatcccagcactttgggaggccgaggcaggcggatcacctgaggtcaggagtttgagaccagcctgacatggtgaaaccccatctctacgaaaaatacaaaaattagctgggcatagtggcgggtacctataatcccagctactcgggaggctgaggcacgagaatcacttgaagccgggaggtgggggttgcagtgagccgagatcacaccactgcactccagcctgggcaacaagagcaaaactccgtctcaaaaaagatgaaaataaaataaaatatatatttacaggcctacaacttttgcctcagactgttccccttttctaagggtattcaagttttcaccttttaagcttcatatcctcagtgcttgtagaatgatgagcttagaggtaccaggtcattgcagttgtttgcttaaagacttattgaaatggttactggcgtaaatacttggccaactcaactttattgcccctgatcttttccatttttgtttccaccttaacctatagcagctcctccaaatgaggaatgctgtaagtaagactcatcaaacagattttaaccattttattatcctgtgtgtccttacattgcttctgtgagatgtttttttcttatctgagatgaactttcaggagcctatttgaactccagactggtgttctggggcaaagagctattagccaaactgattctatgcaggtgaaggatgcactaaagttctcactttagtgagaacttttctagctattccaatacagagttctttcttatagggctattgatattgacaccaaatggagtggcttctcagcctcttaatgtcttaagtaagtgcttaatttggaatagagaaaccagtatattttaaaaaagaaaaatattctttgtagcaactgtaaattctcccattataacagtgaacagagctccaggtaataacgcataggcatgtcaggttgcatctgtatatttgactacattagtattagtgacatcaggtggatataaaagaaaacccttggaaagagaactgccttagccatgatttcgttagtagacctatttatgattcaattgcaattttcagataggatgtgaacatggaatttcattgaaaatagtttaattttttatataaaaggttttgtatataatgtgtgtcagtgactattttcaaaatcattttcatcaagacaccttttttctaaaataggcattgcatacacatatgcacacgtatgtgcacgtgccacacattttttgtataatgttgggtttgattataaaagtgttgtcaaatgttttatttatctgcatatagcagtggttggcttttttgaattgaaatttttgcgcattgatgcattgaaataaggaaaattatttatctctgagcactaaacttatttttgcatatttctgtaatattgcagtccccagatccagaacatgggaagttagggaaaatgtgtgattttgtgttttgaattactgtcagaattacatacacaattacaacaaactttttttaaaagacatttcattgtactgcaaaaatctgaatatttatatttcttgtttttttctttatatgttttgcattttaatatgttgagccactggaaatttgtaacagattaatttgttataggagtttaaatgtgttgtcattgtctccattgtctttgtccagagcctattattatggaaacaataaaatttattgtgtca

SEQ ID NO: 446935 - DNA, 2082 bp, Homo sapiens
agcgggggctacgtgcgcgcggcgagcgccgggcgtacttttgcgtggttgctccaccccctcagccttgccttcgccgccgttggggctggaagttcccgccaggtccgtgccgggcgagagagatgctgcccggcccgcctcggctttgaggcgagagaagtgtcccagacccatttcgccttgctgacggcgtcgagccctggccagacatgtccacagggttctccttcgggtccgggactctgggctccaccaccgtggccgccggcgggaccagcacaggcggcgttttctccttcggaacgggaacgtctagcaacccttctgtggggctcaattttggaaatcttggaagtacttcaactccagcaactacatctgctccttcaagtggttttggaaccgggctctttggatctaaacctgccactgggttcactctaggaggaacaaatacaggaatagcaacaactataactacaggattaactctgggaacgccagccactacatctgcagctacaacaggcttcagtttaggattcaataaacctgcagcatctgccacaccatttgctctacctattacctctacctcagctagcggtctgactctttcgtctgctctgacatcaactccagcagcatccacaggatttactctaaataatttgggtgggacaacagccacaactacaactgcatcaacaggcctctctttagggggagccttagctggtttgggaggttcacttttccagagtacaaacacaggaacatcaggacttggacagaatgctttagggttgactttgggaactacagcagctacttcaactgcaggcaatgaaggccttggtggtatagatttcagtagctcctcagataaaaagagtgataaaacgggaacaagaccagaggatagtaaagctctgaaggatgaaaatctacctcctgtcatctgccaggatgttgaaaatctccagaaatttgtgaaggagcagaaacaagttcaagaagaaattagtagaatgtcttcaaaagcaatgcttaaggtacaagaagatattaaagctctgaagcagctcctgtcgttggctgccaatggaatacagagaaacactctcaacattgacaaattgaaaatagaaactgctcaggagttgaagaatgctgaaatagctttaagaacccagaagacaccacctggacttcaacatgaatatgcagctcctgctgactacttcagaatcttggttcagcaatttgaggtacagcttcagcagtacaggcagcagattgaagaactagaaaaccatcttgccactcaagcaaataattcacatataacccctcaagatttgtcaatggctatgcagaaaatttatcaaacatttgtagctttagcggcacaacttcagtctattcatgaaaatgtaaaggttctgaaagaacagtaccttggctacaggaaaatgttcttgggagatgctgttgatgtgtttgaaacaaggcgagcagaagccaagaagtggcagaacacacccagagttactactggacccactcctttcagcaccatgccaaacgcagcagccgttgccatggctgcaacacttacacagcagcaacagcctgctacagggccacagccatctctgggagttagttttggaacgccattcggctcaggtattggcactggcttgcaatcaagtggcttaggttcttcaaaccttggaggatttggaactagctctggttttggatgcagcaccacaggggcctccacatttggatttggaacaacaaataaaccctcaggaagtcttagtgcaggcaacaaatcacaggttttaactgaatttcgaaaacccagtgttacagaaaccaatgaaataggaagaaaaatacagttctgagcagtccttgaatcaacaaatatctacctttaaggaacttctaattctcattttgtaaatcccattattcaagaaaagcacattaagcttagagtaggtttgatcaagatgtttagaattaaggaaataaaacttgcctttggtgtttaaggacaat

SEQ ID NO: 446936 - DNA, 1787 bp, Homo sapiens
agcgggggctacgtgcgcgcggcgagcgccgggcgtacttttgcgtggttgctccaccccctcagccttgccttcgccgccgttggggctggaagttcccgccaggtccgtgccgggcgagagagatgctgcccggcccgcctcggctttgaggcgagagaagtgtcccagacccatttcgccttgctgacggcgtcgagccctggccagacatgtccacagggttctccttcgggtccgggactctgggctccaccaccgtggccgccggcgggaccagcacaggcggcgttttctccttcggaacgggaacgtctagcaacccttctgtggggctcaattttggaaatcttggaagtacttcaactccagcaactacatctgctccttcaagtggttttggaaccgggctctttggatctaaacctgccactgggttcactctaggaggaacaaatacaggaatagcaacaactataactacaggattaactctgggaacgccagccactacatctgcagctacaacaggcttcagtttaggattcaataaacctgcagcatctgccacaccatttgctctacctattacctctacctcagctagcggtctgactctttcgtctgctctgacatcaactccagcagcatccacaggatttactctaaataatttgggtgggacaacagccacaactacaactgcatcaacaggcctctctttagggggagccttagctggtttgggaggttcacttttccagagtacaaacacaggaacatcaggacttggacagaatgctttagggttgactttgggaactacagcagctacttcaactgcaggcaatgaaggccttggtggtatagatttcagtagctcctcagataaaaagagtgataaaacgggaacaagaccagaggatagtaaagctctgaaggatgaaaatctacctcctgtcatctgccaggatgttgaaaatctccagaaatttgtgaaggagcagaaacaagttcaagaagaaattagtagaatgtcttcaaaagcaatgcttaaggtacaagaagatattaaagctctgaagcagctcctgtcgttggctgccaatggaatacagagaaacactctcaacattgacaaattgaaaatagaaactgctcaggagttgaagaatgctgaaatagctttaagaacccagaagacaccacctggacttcaacatgaatatgcagctcctgctgactacttcagaatcttggttcagcaatttgaggtacagcttcagcagtacaggcagcagattgaagaactagaaaaccatcttgccactcaagcaaataattcacatataacccctcaagatttgtcaatggctatgcagaaaatttatcaaacatttgtagctttagcggcacaacttcagtctattcatgaaaatgtaaaggttctgaaagaacagtaccttggctacaggaaaatgttcttgggagatgctgttgatgtgtttgaaacaaggcgagcagaagccaagaagtggcagaacacacccagagttactactggacccactcctttcagcaccatgccaaacgcagcagccgttgccatggctgcaacacttacacagcagcaacagcctgctacagggccacagccatctctgggagttagttttggaacgccattcggctcaggtattggcactggcttgcaatcaagtggcttaggttcttcaaaccttggaggatttggactagctctgtactccagggcaccacagggggga

SEQ ID NO: 446937 - DNA, 3052 bp, Homo sapiens
cgaggatccaaataccatggagctgacaatgttagcttaatctggagtattcttgaggagccttttgctcataggctttaattttgtctgtgacttttgccaggctttggggaaattgactgccttcactcttccctgaaactttgaagtccacataagggctttctcatcagatggcagaaattataatttattaacctaaacaaccttacagtgttttcgctttgaattgtatgaattcttagaactgagaagctaaacaacagtgataacaattttacattatcttttctttctccttttgtttctctaaaggtctcccaggccttcccagtcaaaattttcgttatttttagtcatgtcaccatgatgtgagatttctgagctctgttagatacatttagaaatgtccctatttatcaaatggtgttttgtaccccataagttatcccttatgccctgtgacttctgtgaaatctttgtttttaagtgccagtaacaaattttagaccatctagatgagggtagagagagcttatgcattgtttttatacatcactgttgatctatacaagatttgagttatcagaagggttttgcttttatttgcatatgaaatttttattaacatgaatatgggcacagagcaaatagcttcttagactgctgccttctgaaggtggcttctgtatctttctcagaggaggaggaatagacttaaacgacttctttgtcctccttcaattttttttttaatgaaaaagtatactagggcttaggcatgtgtgatttacagttatttgttctgaaggctgcagagaattgaaaatccagcaggctatttgtgtatgaaatcatgagcatcgataacgtggataacgtagttccatgttggcagaacttgacacttgtctataagtgcttcccaagcctcctgaaaaactgaagacatttacattaggcttttcagtataattttaatttaggataggttttttagcaatgtatctgggattgagttttgctattgtgttttgacactttaagagttcttgatgtttacataataagactttcttatgtgacttagctgctgttttaaggagagccaagacgttttgttaggaattcctaatttttagcttagtgtaggtttggacatttaaggtgtagtgttaaataggaaacattaagtatttcatcttagtttcttgtggttttgtgattttgttgtatttaataaccaaaggaacattccccattaaatcagtaagagtaaaatttttcaaactggggaaaacgcattttaggttttttaaagaaaaattattttaaaatgtgacttagaaataaccatactaattacattaggcatttggggtgatcatggaaaattataaaatatttttagcactttagtcctttttctgttaatgcagttttacttttaagaaagtaaaatttattctggaaaatatgaattacagcgctaaacctggttttgttgtgtgtgaatatattatatggtaacttttgtaaaatgttactctacatgaagatttcactttggccagtcattggtatatatcactacaaacttaattttatttatggaaataagaacctctcattggatgactattcaaatttcaaagcagacttcttgaattgtttacgtaacttttgcctgaaggatttagactgctttctaatagtgaaactaatatatatggtggccagagtgtaatatatgctaatactttggcatgggagatatttatcatgagtttttactattaaaaaatgttatacatttgcctacgagttttataaatgatgttgccttcagaatttgtgtgaaggtacaaaactaaaaatatcatgtatctgatgtgcaatggaaagtcttgtcatcattagatatgagttcttgattatattctgaatattgatgattagaaaaatcttatgttctgttgctcttaacaacagacccacacacaacaaaaagcatgctatttgagtaactcttacgacttacaaggctgagggctgtggtgtgcattattctttagggtcttccaccagcagtgcctcctattaacctgtgacaaacaagtctctcaatgttaaagaactggacatgtgttttttatgttttttgttaggaatcagaaagtataataatatgcttggtttctttttcctatagtaacattttacaaaagagctgctaggcaggtattttattctcaaagtgatctcaaactggatgtaaaattttaaattatttttttaatagtagtataagaattctggctgctattagttattgtttgttttctgggttagaagctattcgaaaagtccagtttctgtcccagtgtagcaaaatgtagttcctcggttgtttttctttaaatgctttataattttacactacctttttaatatacaaacctcattcttcattggataacttgaaggctttgatttctttaaaaatttaaattttagtgtgtatattactttgacagttccctcatctttgagatgcactgatcactgtgcttgaaaaagacaatactgaagattgtactatgaagtttattgaataattttcataaattatttatccaaatgagagatttttagatttttgtattctgcttagttttaaaaaaaaaaaatagtagtttaaaagagaggctagtaagtttgatgctattcttgccaaacaaactcagccaaaatctttaaagtaacaagagggaaaaggatgactaatcgttctgcttctgagtacattttccaaaacgttggaaagaaacttctgaattgaaatcttgaatgtattgaatctgtcaaggtacacagcggtgcctttgtaaatgttcattactttatttaatcaggtgataagtggtgtaatgtagcagagcttaagaatagaactcaattatcactttttgtgaacaagttggaattgtcatgttactgtgtaattgatttgctttacaatgaacaataaatttaataaaataaaaaaatg

SEQ ID NO: 446938 - DNA, 371 bp, Homo sapiens
gggctctttggatctaaacctgccactgggttcactctaggaggaacaaatacaggtgaggaggatctgatcacattgtcagagagtaggcttgggatattctttcctaaattgtgtcctgtatctctctttacaaggatcatcactggtagtagaccttaaaaaatggtaaatgctaagatgaaaagaaatgcaaggaattggaattaagggctagtgataggcccaatcattgactgtcatctactctgatataacgaaggaaaacatacaaatattaatttaaatttttggattatataatgtagtgtttttccttagtggagattgtggtttaagccagctttatcaatttggaacattaacatacg

SEQ ID NO: 446939 - DNA, 294 bp, Homo sapiens
caatcttcttagataagaaatcttcatgtcagatgaattgttaaaattattttatagatcctatttacaataaatttatgttttttataaagagctttgaaatcatccagagaagccatacgtgcttttttgctatattttcttgtgtcttaatactctaatactctattaaaactcagctgtcaactttttaaaatctcaatgaccttaatacatgttttgcatttttcttagggatagtaaagctctgaaggatgaaaatctacctcctgtcatctgccaggatgttgaaaa

SEQ ID NO: 446940 - DNA, 4311 bp, Homo sapiens
agcgggggctacgtgcgcgcggcgagcgccgggcgtacttttgcgtggttgctccaccccctcagccttgccttcgccgccgttggggctggaagttcccgccaggtccgtgccgggcgagagagatgctgcccggcccgcctcggctttgaggcgagagaagtgtcccagacccatttcgccttgctgacggcgtcgagccctggccagacatgtccacagggttctccttcgggtccgggactctgggctccaccaccgtggccgccggcgggaccagcacaggcggcgttttctccttcggaacgggaacgtctagcaacccttctgtggggctcaattttggaaatcttggaagtacttcaactccagcaactacatctgctccttcaagtggttttggaaccgggctctttggatctaaacctgccactgggttcactctaggaggaacaaatacaggaatagcaacaactataactacaggattaactctgggaacgccagccactacatctgcagctacaacaggcttcagtttaggattcaataaacctgcagcatctgccacaccatttgctctacctattacctctacctcagctagcggtctgactctttcgtctgctctgacatcaactccagcagcatccacaggatttactctaaataatttgggtgggacaacagccacaactacaactgcatcaacaggcctctctttagggggagccttagctggtttgggaggttcacttttccagagtacaaacacaggaacatcaggacttggacagaatgctttagggttgactttgggaactacagcagctacttcaactgcaggcaatgaaggccttggtggtatagatttcagtagctcctcagataaaaagagtgataaaacgggaacaagaccagaggatagtaaagctctgaaggatgaaaatctacctcctgtcatctgccaggatgttgaaaatctccagaaatttgtgaaggagcagaaacaagttcaagaagaaattagtagaatgtcttcaaaagcaatgcttaaggtacaagaagatattaaagctctgaagcagctcctgtcgttggctgccaatggaatacagagaaacactctcaacattgacaaattgaaaatagaaactgctcaggagttgaagaatgctgaaatagctttaagaacccagaagacaccacctggacttcaacatgaatatgcagctcctgctgactacttcagaatcttggttcagcaatttgaggtacagcttcagcagtacaggcagcagattgaagaactagaaaaccatcttgccactcaagcaaataattcacatataacccctcaagatttgtcaatggctatgcagaaaatttatcaaacatttgtagctttagcggcacaacttcagtctattcatgaaaatgtaaaggttctgaaagaacagtaccttggctacaggaaaatgttcttgggagatgctgttgatgtgtttgaaacaaggcgagcagaagccaagaagtggcagaacacacccagagttactactggacccactcctttcagcaccatgccaaacgcagcagccgttgccatggctgcaacacttacacagcagcaacagcctgctacagggccacagccatctctgggagttagttttggaacgccattcggctcaggtattggcactggcttgcaatcaagtggcttaggttcttcaaaccttggaggatttggaactagctctggttttggatgcagcaccacaggggcctccacatttggatttggaacaacaaataaaccctcaggaagtcttagtgcaggctttggcagctcaagtacatctgggtttaacttcagcaatcctggcatcacggcatcagctggtttgacttttggggtgtccaatcctgcctctgcaggttttggaacaggaggacaactccttcagttgaagaaacctccagctggaaacaaaagaggaaaaagataaacatgggttgatgtgttgagagaatccatagcagcaccgttcattctatgagtctatttttctaatgatgcagtaattaaattgcatcccaggagatttataaagttttgatatttttccctactctggaatttgaactttcttcatgtttgccatactgaacatcttttttcttgtggaatttaaagtccagctgtgttttctttttaatttgattctcagtgtaagaaatgttctgattacatcactgattggtaatggttagaaaccattaacctaaaacttactatttaacctagtgtttttgttgatgaggtttacattatgtgaatacatgcacatttgtttcttatacaggtggtgtgaactctagggcctatactagaatcaatttgttccttgttaaaggccttttgaattatactgcagggcatcttgtgaatatgtatgtaaatatatacagaataatacacacagttgtgtgtgcatataaaatacatatttacgccaggcgtggtggctcacgcctgtaatcccagcactttgggaggccgaggcaggcggatcacctgaggtcaggagtttgagaccagcctgacatggtgaaaccccatctctacgaaaaatacaaaaattagctgggcatagtggcgggtacctataatcccagctactcgggaggctgaggcacgagaatcacttgaagccgggaggtgggggttgcagtgagccgagatcacaccactgcactccagcctgggcaacaagagcaaaactccgtctcaaaaaagatgaaaataaaataaaatatatatttacaggcctacaacttttgcctcagactgttccccttttctaagggtattcaagttttcaccttttaagcttcatatcctcagtgcttgtagaatgatgagcttagaggtaccaggtcattgcagttgtttgcttaaagacttattgaaatggttactggcgtaaatacttggccaactcaactttattgcccctgatcttttccatttttgtttccaccttaacctatagcagctcctccaaatgaggaatgctgtaagtaagactcatcaaacagattttaaccattttattatcctgtgtgtccttacattgcttctgtgagatgtttttttcttatctgagatgaactttcaggagcctatttgaactccagactggtgttctggggcaaagagctattagccaaactgattctatgcaggtgaaggatgcactaaagttctcactttagtgagaacttttctagctattccaatacagagttctttcttatagggctattgatattgacaccaaatggagtggcttctcagcctcttaatgtcttaagtaagtgcttaatttggaatagagaaaccagtatattttaaaaaagaaaaatattctttgtagcaactgtaaattctcccattataacagtgaacagagctccaggtaataacgcataggcatgtcaggttgcatctgtatatttgactacattagtattagtgacatcaggtggatataaaagaaaacccttggaaagagaactgccttagccatgatttcgttagtagacctatttatgattcaattgcaattttcagataggatgtgaacatggaatttcattgaaaatagtttaattttttatataaaaggttttgtatataatgtgtgtcagtgactattttcaaaatcattttcatcaagacaccttttttctaaaataggcattgcatacacatatgcacacgtatgtgcacgtgccacacattttttgtataatgttgggtttgattataaaagtgttgtcaaatgttttatttatctgcatatagcagtggttggcttttttgaattgaaatttttgcgcattgatgcattgaaataaggaaaattatttatctctgagcactaaacttatttttgcatatttctgtaatattgcagtccccagatccagaacatgggaagttagggaaaatgtgtgattttgtgttttgaattactgtcagaattacatacacaattacaacaaactttttttaaaagacatttcattgtactgcaaaaatctgaatatttatatttcttgtttttttctttatatgttttgcattttaatatgttgagccactggaaatttgtaacagattaatttgttataggagtttaaatgtgttgtcattgtctccattgtctttgtccagagcctattattatggaaacaataaaatttattgtgtcaactgattgggatcctctagatggcgtc

SEQ ID NO: 446941 - DNA, 4213 bp, Homo sapiens
agcggggatcctccctccccatccgttccgcgcgagagaaatgctgaccggctgtgtttcgctttgactgcatgatgacctgtccttatcaccctattctctgccttgcttgacggttctgtcgtatgtccctggccagacatgtccacagggttctccttcgggtccgggactctgggctccaccaccgtggccgccggcgggaccagcacaggcggcgttttctccttcggaacgggaacgtctagcaacccttctgtggggctcaattttggaaatcttggaagtacttcaactccagcaactacatctgctccttcaagtggttttggaaccgggctctttggatctaaacctgccactgggttcactctaggaggaacaaatacaggaatagcaacaactataactacaggattaactctgggaacgccagccactacatctgcagctacaacaggcttcagtttaggattcaataaacctgcagcatctgccacaccatttgctctacctattacctctacctcagctagcggtctgactctttcgtctgctctgacatcaactccagcagcatccacaggatttactctaaataatttgggtgggacaacagccacaactacaactgcatcaacaggcctctctttagggggagccttagctggtttgggaggttcacttttccagagtacaaacacaggaacatcaggacttggacagaatgctttagggttgactttgggaactacagcagctacttcaactgcaggcaatgaaggccttggtggtatagatttcagtagctcctcagataaaaagagtgataaaacgggaacaagaccagaggatagtaaagctctgaaggatgaaaatctacctcctgtcatctgccaggatgttgaaaatctccagaaatttgtgaaggagcagaaacaagttcaagaagaaattagtagaatgtcttcaaaagcaatgcttaaggtacaagaagatattaaagctctgaagcagctcctgtcgttggctgccaatggaatacagagaaacactctcaacattgacaaattgaaaatagaaactgctcaggagttgaagaatgctgaaatagctttaagaacccagaagacaccacctggacttcaacatgaatatgcagctcctgctgactacttcagaatcttggttcagcaatttgaggtacagcttcagcagtacaggcagcagattgaagaactagaaaaccatcttgccactcaagcaaataattcacatataacccctcaagatttgtcaatggctatgcagaaaatttatcaaacatttgtagctttagcggcacaacttcagtctattcatgaaaatgtaaaggttctgaaagaacagtaccttggctacaggaaaatgttcttgggagatgctgttgatgtgtttgaaacaaggcgagcagaagccaagaagtggcagaacacacccagagttactactggacccactcctttcagcaccatgccaaacgcagcagccgttgccatggctgcaacacttacacagcagcaacagcctgctacagggccacagccatctctgggagttagttttggaacgccattcggctcaggtattggcactggcttgcaatcaagtggcttaggttcttcaaaccttggaggatttggaactagctctggttttggatgcagcaccacaggggcctccacatttggatttggaacaacaaataaaccctcaggaagtcttagtgcaggctttggcagctcaagtacatctgggtttaacttcagcaatcctggcatcacggcatcagctggtttgacttttggggtgtccaatcctgcctctgcaggttttggaacaggaggacaactccttcagttgaagaaacctccagctggaaacaaaagaggaaaaagataaacatgggttgatgtgttgagagaatccatagcagcaccgttcattctatgagtctatttttctaatgatgcagtaattaaattgcatcccaggagatttataaagttttgatatttttccctactctggaatttgaactttcttcatgtttgccatactgaacatcttttttcttgtggaatttaaagtccagctgtgttttctttttaatttgattctcagtgtaagaaatgttctgattacatcactgattggtaatggttagaaaccattaacctaaaacttactatttaacctagtgtttttgttgatgaggtttacattatgtgaatacatgcacatttgtttcttatacaggtggtgtgaactctagggcctatactagaatcaatttgttccttgttaaaggccttttgaattatactgcagggcatcttgtgaatatgtatgtaaatatatacagaataatacacacagttgtgtgtgcatataaaatacatatttacgccaggcgtggtggctcacgcctgtaatcccagcactttgggaggccgaggcaggcggatcacctgaggtcaggagtttgagaccagcctgacatggtgaaaccccatctctacgaaaaatacaaaaattagctgggcatagtggcgggtacctataatcccagctactcgggaggctgaggcacgagaatcacttgaagccgggaggtgggggttgcagtgagccgagatcacaccactgcactccagcctgggcaacaagagcaaaactccgtctcaaaaaagatgaaaataaaataaaatatatatttacaggcctacaacttttgcctcagactgttccccttttctaagggtattcaagttttcaccttttaagcttcatatcctcagtgcttgtagaatgatgagcttagaggtaccaggtcattgcagttgtttgcttaaagacttattgaaatggttactggcgtaaatacttggccaactcaactttattgcccctgatcttttccatttttgtttccaccttaacctatagcagctcctccaaatgaggaatgctgtaagtaagactcatcaaacagattttaaccattttattatcctgtgtgtccttacattgcttctgtgagatgtttttttcttatctgagatgaactttcaggagcctatttgaactccagactggtgttctggggcaaagagctattagccaaactgattctatgcaggtgaaggatgcactaaagttctcactttagtgagaacttttctagctattccaatacagagttctttcttatagggctattgatattgacaccaaatggagtggcttctcagcctcttaatgtcttaagtaagtgcttaatttggaatagagaaaccagtatattttaaaaaagaaaaatattctttgtagcaactgtaaattctcccattataacagtgaacagagctccaggtaataacgcataggcatgtcaggttgcatctgtatatttgactacattagtattagtgacatcaggtggatataaaagaaaacccttggaaagagaactgccttagccatgatttcgttagtagacctatttatgattcaattgcaattttcagataggatgtgaacatggaatttcattgaaaatagtttaattttttatataaaaggttttgtatataatgtgtgtcagtgactattttcaaaatcattttcatcaagacaccttttttctaaaataggcattgcatacacatatgcacacgtatgtgcacgtgccacacattttttgtataatgttgggtttgattataaaagtgttgtcaaatgttttatttatctgcatatagcagtggttggcttttttgaattgaaatttttgcgcattgatgcattgaaataaggaaaattatttatctctgagcactaaacttatttttgcatatttctgtaatattgcagtccccagatccagaacatgggaagttagggaaaatgtgtgattttgtgttttgaattactgtcagaattacatacacaattacaacaaactttttttaaaagacatttcattgtactgcaaaaatctgaatatttatatttcttgtttttttctttatatgttttgcattttaatatgttgagccactggaaatttgtaacagattaatttgttataggagtttaaatgtgttgtcattgtctccattgtctttgtccagagcctattattatggaaacaataaaatttattgtgtca

SEQ ID NO: 446942 - DNA, 4370 bp, Homo sapiens
  misc_feature (4348)..(4348): n is a, c, g, or t
  misc_feature (4357)..(4357): n is a, c, g, or t
agcgggggctacgtgcgcgcggcgagcgccgggcgtacttttgcgtggttgctccaccccctcagccttgccttcgccgccgttggggctggaagttcccgccaggtccgtgccgggcgagagagatgctgcccggcccgcctcggctttgaggcgagagaagtgtcccagacccatttcgccttgctgacggcgtcgagccctggccagacatgtccacagggttctccttcgggtccgggactctgggctccaccaccgtggccgccggcgggaccagcacaggcggcgttttctccttcggaacgggaacgtctagcaacccttctgtggggctcaattttggaaatcttggaagtacttcaactccagcaactacatctgctccttcaagtggttttggaaccgggctctttggatctaaacctgccactgggttcactctaggaggaacaaatacaggaatagcaacaactataactacaggattaactctgggaacgccagccactacatctgcagctacaacaggcttcagtttaggattcaataaacctgcagcatctgccacaccatttgctctacctattacctctacctcagctagcggtctgactctttcgtctgctctgacatcaactccagcagcatccacaggatttactctaaataatttgggtgggacaacagccacaactacaactgcatcaacaggcctctctttagggggagccttagctggtttgggaggttcacttttccagagtacaaacacaggaacatcaggacttggacagaatgctttagggttgactttgggaactacagcagctacttcaactgcaggcaatgaaggccttggtggtatagatttcagtagctcctcagataaaaagagtgataaaacgggaacaagaccagaggatagtaaagctctgaaggatgaaaatctacctcctgtcatctgccaggatgttgaaaatctccagaaatttgtgaaggagcagaaacaagttcaagaagaaattagtagaatgtcttcaaaagcaatgcttaaggtacaagaagatattaaagctctgaagcagctcctgtcgttggctgccaatggaatacagagaaacactctcaacattgacaaattgaaaatagaaactgctcaggagttgaagaatgctgaaatagctttaagaacccagaagacaccacctggacttcaacatgaatatgcagctcctgctgactacttcagaatcttggttcagcaatttgaggtacagcttcagcagtacaggcagcagattgaagaactagaaaaccatcttgccactcaagcaaataattcacatataacccctcaagatttgtcaatggctatgcagaaaatttatcaaacatttgtagctttagcggcacaacttcagtctattcatgaaaatgtaaaggttctgaaagaacagtaccttggctacaggaaaatgttcttgggagatgctgttgatgtgtttgaaacaaggcgagcagaagccaagaagtggcagaacacacccagagttactactggacccactcctttcagcaccatgccaaacgcagcagccgttgccatggctgcaacacttacacagcagcaacagcctgctacagggccacagccatctctgggagttagttttggaacgccattcggctcaggtattggcactggcttgcaatcaagtggcttaggttcttcaaaccttggaggatttggaactagctctggttttggatgcagcaccacaggggcctccacatttggatttggaacaacaaataaaccctcaggaagtcttagtgcaggctttggcagctcaagtacatctgggtttaacttcagcaatcctggcatcacggcatcagctggtttgacttttggggtgtccaatcctgcctctgcaggttttggaacaggaggacaactccttcagttgaagaaacctccagctggaaacaaaagaggaaaaagataaacatgggttgatgtgttgagagaatccatagcagcaccgttcattctatgagtctatttttctaatgatgcagtaattaaattgcatcccaggagatttataaagttttgatatttttccctactctggaatttgaactttcttcatgtttgccatactgaacatcttttttcttgtggaatttaaagtccagctgtgttttctttttaatttgattctcagtgtaagaaatgttctgattacatcactgattggtaatggttagaaaccattaacctaaaacttactatttaacctagtgtttttgttgatgaggtttacattatgtgaatacatgcacatttgtttcttatacaggtggtgtgaactctagggcctatactagaatcaatttgttccttgttaaaggccttttgaattatactgcagggcatcttgtgaatatgtatgtaaatatatacagaataatacacacagttgtgtgtgcatataaaatacatatttacgccaggcgtggtggctcacgcctgtaatcccagcactttgggaggccgaggcaggcggatcacctgaggtcaggagtttgagaccagcctgacatggtgaaaccccatctctacgaaaaatacaaaaattagctgggcatagtggcgggtacctataatcccagctactcgggaggctgaggcacgagaatcacttgaagccgggaggtgggggttgcagtgagccgagatcacaccactgcactccagcctgggcaacaagagcaaaactccgtctcaaaaaagatgaaaataaaataaaatatatatttacaggcctacaacttttgcctcagactgttccccttttctaagggtattcaagttttcaccttttaagcttcatatcctcagtgcttgtagaatgatgagcttagaggtaccaggtcattgcagttgtttgcttaaagacttattgaaatggttactggcgtaaatacttggccaactcaactttattgcccctgatcttttccatttttgtttccaccttaacctatagcagctcctccaaatgaggaatgctgtaagtaagactcatcaaacagattttaaccattttattatcctgtgtgtccttacattgcttctgtgagatgtttttttcttatctgagatgaactttcaggagcctatttgaactccagactggtgttctggggcaaagagctattagccaaactgattctatgcaggtgaaggatgcactaaagttctcactttagtgagaacttttctagctattccaatacagagttctttcttatagggctattgatattgacaccaaatggagtggcttctcagcctcttaatgtcttaagtaagtgcttaatttggaatagagaaaccagtatattttaaaaaagaaaaatattctttgtagcaactgtaaattctcccattataacagtgaacagagctccaggtaataacgcataggcatgtcaggttgcatctgtatatttgactacattagtattagtgacatcaggtggatataaaagaaaacccttggaaagagaactgccttagccatgatttcgttagtagacctatttatgattcaattgcaattttcagataggatgtgaacatggaatttcattgaaaatagtttaattttttatataaaaggttttgtatataatgtgtgtcagtgactattttcaaaatcattttcatcaagacaccttttttctaaaataggcattgcatacacatatgcacacgtatgtgcacgtgccacacattttttgtataatgttgggtttgattataaaagtgttgtcaaatgttttatttatctgcatatagcagtggttggcttttttgaattgaaatttttgcgcattgatgcattgaaataaggaaaattatttatctctgagcactaaacttatttttgcatatttctgtaatattgcagtccccagatccagaacatgggaagttagggaaaatgtgtgattttgtgttttgaattactgtcagaattacatacacaattacaacaaactttttttaaaagacatttcattgtactgcaaaaatctgaatatttatatttcttgtttttttctttatatgttttgcattttaatatgttgagccactggaaatttgtaacagattaatttgttataggagtttaaatgtgttgtcattgtctccattgtctttgtccagagcctattattatggaaacaataaaatttattgtgtcaaaaaaaaaacaaactaaaaaagaaaaaaaaaaaacaaaaaagaaataaaaaataatagaaagangaaaaacanaaaaaaaaagaaa

SEQ ID NO: 446943 - DNA, 6105 bp, Homo sapiens
agcgggggctacgtgcgcgcggcgagcgccgggcgtacttttgcgtggttgctccaccccctcagccttgccttcgccgccgttggggctggaagttcccgccaggtccgtgccgggcgagagagatgctgcccggcccgcctcggctttgaggcgagagaagtgtcccagacccatttcgccttgctgacggcgtcgagccctggccagacatgtccacagggttctccttcgggtccgggactctgggctccaccaccgtggccgccggcgggaccagcacaggcggcgttttctccttcggaacgggaacgtctagcaacccttctgtggggctcaattttggaaatcttggaagtacttcaactccagcaactacatctgctccttcaagtggttttggaaccgggctctttggatctaaacctgccactgggttcactctaggaggaacaaatacaggaatagcaacaactataactacaggattaactctgggaacgccagccactacatctgcagctacaacaggcttcagtttaggattcaataaacctgcagcatctgccacaccatttgctctacctattacctctacctcagctagcggtctgactctttcgtctgctctgacatcaactccagcagcatccacaggatttactctaaataatttgggtgggacaacagccacaactacaactgcatcaacaggcctctctttagggggagccttagctggtttgggaggttcacttttccagagtacaaacacaggaacatcaggacttggacagaatgctttagggttgactttgggaactacagcagctacttcaactgcaggcaatgaaggccttggtggtatagatttcagtagctcctcagataaaaagagtgataaaacgggaacaagaccagaggatagtaaagctctgaaggatgaaaatctacctcctgtcatctgccaggatgttgaaaatctccagaaatttgtgaaggagcagaaacaagttcaagaagaaattagtagaatgtcttcaaaagcaatgcttaaggtacaagaagatattaaagctctgaagcagctcctgtcgttggctgccaatggaatacagagaaacactctcaacattgacaaattgaaaatagaaactgctcaggagttgaagaatgctgaaatagctttaagaacccagaagacaccacctggacttcaacatgaatatgcagctcctgctgactacttcagaatcttggttcagcaatttgaggtacagcttcagcagtacaggcagcagattgaagaactagaaaaccatcttgccactcaagcaaataattcacatataacccctcaagatttgtcaatggctatgcagaaaatttatcaaacatttgtagctttagcggcacaacttcagtctattcatgaaaatgtaaaggttctgaaagaacagtaccttggctacaggaaaatgttcttgggagatgctgttgatgtgtttgaaacaaggcgagcagaagccaagaagtggcagaacacacccagagttactactggacccactcctttcagcaccatgccaaacgcagcagccgttgccatggctgcaacacttacacagcagcaacagcctgctacaggtctgaacgcattcaagttatagcttcttactgttccaatgcagaacatttatgtgcgtttttataagtcttccatttgtgtgagcactgaagaaatttctatgagtagctgttccaatacaatctaaaattgtgatggacacgattataaacatacctgataaaaaaggcagggtagtcttagcaataattatacatcaattagatattgaatattgtgaatctacttaatgttatttgctgtaatgctataaatgccctttagaacatggtgtttcactagtgaattacatttaagaataacattagattctgaaatcatgactgtaccatttattgttttaaagtcagagatcatccatccattctttgaatttttcatatatgatactgataggtggtgcattctcattttcctcatacatagtgattacaaagtacccacattcaggatgaagtatgcttttattgactgaaggtatgttgaagatcaataggcttgtttgtatgtatgttgactgtaaacagaatacaagccctctaaaccaaattttgaagatgatacatgctagaattgtacctttccaaggtgaacagaacagcaagagcaggaaaaagatgttttgagatgtggattgcacattaaggagcaactgggaagttgaacagatgaaaataattggtgacatggaaagcagattgttttatttcttggtttagttacacttctaattagagaaacattttttgtggtcattctacagtgttttatttggtcctgtgtctttcggaggttaatagttatcttaatcctgccatcccttttgtcaggtttgaagcttgacatggaaaaatagtcttaatcgatattgatttttttattttaatcattcataaatttcttagtaatgcttactattcaatagcatgtgtctttctgagagttccatatagtccagtagtacattataatacacacaaattaatacatatttagattgcattcaagctacctatactagggaagcattctctggttttcactattggcagtttaaaaaattgttcttcacatttggagatgacagaattgacttgccataagtaaagggttgatgatagatttatgccaaatcctccatatcccgtggctggacccatgtgaatagtggctcgcacgagcactgtctggtagctctctagctggctggagtgtaggattgcgttgttaagttatggagggaaaaagtcattatgggattgattcctttgaggattgatatttcttcttaaaaggattcaatcccataattatgaccatcagctctcatgattacctaaccagttaatcaaaccaaccatagtactagtttactttttagagccagtattaatcctaaagtagataagtgtagatttggttaagtgttctttaaacatagtgaatttccattctattaaatagaacttgagaaatgtcagttatataaaaagttatgttgtaagtgaatatattctatgataaatacctaaacttgaagcaaaatctcctgtcaagggtttgtgtgtgtgtgtgtgtttaactttcttatctatagattattattttgagaaattcataggttttcacttatacattttgagcttgtggacatatggagatgtgtgttcattctctaaatgagtgcctactatgtgctgggctcgaggaatacaaaggtagacaatatagattttgtctttgccctctgtggtggttgacaatgttagcttaatctggagtattcttgaggagccttttgctcataggctttaattttgtctgtgacttttgccaggctttggggaaattgactgccttcactcttccctgaaactttgaagtccacataagggctttctcatcagatggcagaaattataatttattaacctaaacaaccttacagtgttttcgctttgaattgtatgaattcttagaactgagaagctaaacaacagtgataacaattttacattatcttttctttctccttttgtttctctaaaggtctcccaggccttcccagtcaaaattttcgttatttttagtcatgtcaccatgatgtgagatttctgagctctgttagatacatttagaaatgtccctatttatcaaatggtgttttgtaccccataagttatcccttatgccctgtgacttctgtgaaatctttgtttttaagtgccagtaacaaattttagaccatctagatgagggtagagagagcttatgcattgtttttatacatcactgttgatctatacaagatttgagttatcagaagggttttgcttttatttgcatatgaaatttttattaacatgaatatgggcacagagcaaatagcttcttagactgctgccttctgaaggtggcttctgtatctttctcagaggaggaggaatagacttaaacgacttctttgtcctccttcaattttttttttaatgaaaaagtatactagggcttaggcatgtgtgatttacagttatttgttctgaaggctgcagagaattgaaaatccagcaggctatttgtgtatgaaatcatgagcatcgataacgtggataacgtagttccatgttggcagaacttgacacttgtctataagtgcttcccaagcctcctgaaaaactgaagacatttacattaggcttttcagtataattttaatttaggataggttttttagcaatgtatctgggattgagttttgctattgtgttttgacactttaagagttcttgatgtttacataataagactttcttatgtgacttagctgctgttttaaggagagccaagacgttttgttaggaattcctaatttttagcttagtgtaggtttggacatttaaggtgtagtgttaaataggaaacattaagtatttcatcttagtttcttgtggttttgtgattttgttgtatttaataaccaaaggaacattccccattaaatcagtaagagtaaaatttttcaaactggggaaaacgcattttaggttttttaaagaaaaattattttaaaatgtgacttagaaataaccatactaattacattaggcatttggggtgatcatggaaaattataaaatatttttagcactttagtcctttttctgttaatgcagttttacttttaagaaagtaaaatttattctggaaaatatgaattacagcgctaaacctggttttgttgtgtgtgaatatattatatggtaacttttgtaaaatgttactctacatgaagatttcactttggccagtcattggtatatatcactacaaacttaattttatttatggaaataagaacctctcattggatgactattcaaatttcaaagcagacttcttgaattgtttacgtaacttttgcctgaaggatttagactgctttctaatagtgaaactaatatatatggtggccagagtgtaatatatgctaatactttggcatgggagatatttatcatgagtttttactattaaaaaatgttatacatttgcctacgagttttataaatgatgttgccttcagaatttgtgtgaaggtacaaaactaaaaatatcatgtatctgatgtgcaatggaaagtcttgtcatcattagatatgagttcttgattatattctgaatattgatgattagaaaaatcttatgttctgttgctcttaacaacagacccacacacaacaaaaagcatgctatttgagtaactcttacgacttacaaggctgagggctgtggtgtgcattattctttagggtcttccaccagcagtgcctcctattaacctgtgacaaacaagtctctcaatgttaaagaactggacatgtgttttttatgttttttgttaggaatcagaaagtataataatatgcttggtttctttttcctatagtaacattttacaaaagagctgctaggcaggtattttattctcaaagtgatctcaaactggatgtaaaattttaaattatttttttaatagtagtataagaattctggctgctattagttattgtttgttttctgggttagaagctattcgaaaagtccagtttctgtcccagtgtagcaaaatgtagttcctcggttgtttttctttaaatgctttataattttacactacctttttaatatacaaacctcattcttcattggataacttgaaggctttgatttctttaaaaatttaaattttagtgtgtatattactttgacagttccctcatctttgagatgcactgatcactgtgcttgaaaaagacaatactgaagattgtactatgaagtttattgaataattttcataaattatttatccaaatgagagatttttagatttttgtattctgcttagttttaaaaaaaaaaagtcgaccggccaccaatttagtagtagtagaggc

SEQ ID NO: 446944 - DNA, 1784 bp, Homo sapiens
agcgggggctacgtgcgcgcggcgagcgccgggcgtacttttgcgtggttgctccaccccctcagccttgccttcgccgccgttggggctggaagttcccgccaggtccgtgccgggcgagagagatgctgcccggcccgcctcggctttgaggcgagagaagtgtcccagacccatttcgccttgctgacggcgtcgagccctggccagacatgtccacagggttctccttcgggtccgggactctgggctccaccaccgtggccgccggcgggaccagcacaggcggcgttttctccttcggaacgggaacgtctagcaacccttctgtggggctcaattttggaaatcttggaagtacttcaactccagcaactacatctgctccttcaagtggttttggaaccgggctctttggatctaaacctgccactgggttcactctaggaggaacaaatacaggaatagcaacaactataactacaggattaactctgggaacgccagccactacatctgcagctacaacaggcttcagtttaggattcaataaacctgcagcatctgccacaccatttgctctacctattacctctacctcagctagcggtctgactctttcgtctgctctgacatcaactccagcagcatccacaggatttactctaaataatttgggtgggacaacagccacaactacaactgcatcaacaggcctctctttagggggagccttagctggtttgggaggttcacttttccagagtacaaacacaggaacatcaggacttggacagaatgctttagggttgactttgggaactacagcagctacttcaactgcaggcaatgaaggccttggtggtatagatttcagtagctcctcagataaaaagagtgataaaacgggaacaagaccagaggatagtaaagctctgaaggatgaaaatctacctcctgtcatctgccaggatgttgaaaatctccagaaatttgtgaaggagcagaaacaagttcaagaagaaattagtagaatgtcttcaaaagcaatgcttaaggtacaagaagatattaaagctctgaagcagctcctgtcgttggctgccaatggaatacagagaaacactctcaacattgacaaattgaaaatagaaactgctcaggagttgaagaatgctgaaatagctttaagaacccagaagacaccacctggacttcaacatgaatatgcagctcctgctgactacttcagaatcttggttcagcaatttgaggtacagcttcagcagtacaggcagcagattgaagaactagaaaaccatcttgccactcaagcaaataattcacatataacccctcaagatttgtcaatggctatgcagaaaatttatcaaacatttgtagctttagcggcacaacttcagtctattcatgaaaatgtaaaggttctgaaagaacagtaccttggctacaggaaaatgttcttgggagatgctgttgatgtgtttgaaacaaggcgagcagaagccaagaagtggcagaacacacccagagttactactggacccactcctttcagcaccatgccaaacgcagcagccgttgccatggctgcaacacttacacagcagcaacagcctgctacaggtgataagtggtgtaatgtagcagagcttaagaatagaactcaattatcactttttgtgaacaagttggaattgtcatgttactgtgtaattgatttgctttacaatgaacaataaatttaataaaataaaaaaatg

SEQ ID NO: 446945 - DNA, 898 bp, Homo sapiens
ccctcagccttgccttcgccgccgttggggctggaagttcccgccaggtccgtgccgggcgagagagatgctgcccggcccgcctcggctttgaggcgagagaagtgtcccagacccatttcgccttgctgacggcgtcgagccctggccagacatgtccacagggttctccttcgggtccgggactctgggctccaccaccgtggccgccggcgggaccagcacaggcggcgttttctccttcggaacgggaacgtctaggtaaccgcactttctcgccttcctgggccggattcacccccacccccacccccgcaaagctcccttggtgtccccatcctgtctcttccctctggcttccttcccagtggggctggagagaagcacttaatctagccgcccggcgtcgtaggcctctcgccgcggtacccgggcccagcgcggcctggtgaagtggagggcgggatgggttctgtgctgtgaggtttccagaatccacgtatagttcaggcattatttggacctagtggggtcttgactgcgtggaagggccttggggtctaccccggagctttagcgatgtgtcagtcttaggcatagaatgaacattgaatgaatgaatgaaattatagcatactgtggagttttatgatagataattccgatttcattgcagcatttgcggttttggatatgacggtgttttaataactttgtggtttttaaccagcttttcaagcttttgtgccacatgggaccttatctgtttttgttaaaaaaaacaaaaacacttttttacagtgtttattagtggtaattttctgcagtatgtgcagattagtatatctgatgcgagaatgttgtgttgtaataactcaatttgtcttttacttaaatt

SEQ ID NO: 446946 - DNA, 810 bp, Homo sapiens
tctgtgttactcatacttacatgctacccagaagtctctggcctagccaggagattttaaacaattgaaataattcatgttttcgttttagggttcacctttagatgttcttaaagatgaaagggttcagtactggattgagaattatagaaatttattagatgcctggaggttttggcataaacgagctgaatttgatattcacaggagtaagttggatcccagttccaagcctttagcacaagtttttgtgagttgcaatttctgtggcaagtcaatctcctacagctgttcagctgtgcctcatcagggcagaggttttagtcagtatggtgtgagtggctcaccaacgaaatctaaagtcacaagttgtcctggctgtcgaaaaccacttcctcgatgtgcgctttgtctcattaatatgggaacaccagtttctagctgtcctggaggaaccaaatcagatgaaaaagtggacttgagcaaggacaaaaaattagcccaatttaacaactggtttacatggtgtcataattgcaggcacggtggacatgctggacatatgcttagttggttcagggaccatgcagagtgccctgtgtctgcatgcacgtgtaaatgtatgcagttggatacaacggggaatctggtacctgcagagactgtccagccataaaatgttaccaccttaagagaacccttcaagtgtggagctttctagtaggtgtccttcatagctcagaaacatacctcagaacaagccattcatgacttacctgtaatgggaaaataaatcattctatcagatca

SEQ ID NO: 446947 - DNA, 3450 bp, Homo sapiens
  misc_feature (2391)..(2391): n is a, c, g, or t
  misc_feature (2458)..(2458): n is a, c, g, or t
  misc_feature (2552)..(2552): n is a, c, g, or t
gcaaaatatgttgtatttgtggcatagttcatatttacactatcataaaattatggccgagaagttaaatattctaaatgtgtcaacatagttctctgtaaaactgacttattttccaaatatattttgaaataaaacaatataaaaatgttttctgtttttaggaatggtggaaagcagcagacataattggagtgggttggataagcaaagtgatattcaaaatttaaatgaagagagaatcttagctttacagctttgtgggtggataaagaaaggaacggatgtagacgtggggccatttttgaactcccttgtacaagaaggggaatgggaaagagctgctgctgtggcattgttcaacttggatattcgccgagcaatccaaatcctgaatgaaggggcatcttctgaaaaaggagatctgaatctcaatgtggtagcaatggctttatcgggttatacggatgagaagaactccctttggagagaaatgtgtagcacactgcgattacagctaaataacccgtatttgtgtgtcatgtttgcatttctgacaagtgaaacaggatcttacgatggagttttgtatgaaaacaaagttgcagtacgtgacagagtggcatttgcttgtaaattccttagtgatactcagttaaatagatacatcgaaaagttgaccaatgaaatgaaagaggctggaaatttggaaggaattttgcttacaggccttactaaagatggagtggacttaatggagagttatgttgatagaactggagatgttcaaacagcaagttactgtatgttacagggttcacctttagatgttcttaaagatgaaagggttcagtactggattgagaattatagaaatttattagatgcctggaggttttggcataaacgagctgaatttgatattcacaggagtaagttggatcccagttccaagcctttagcacaagtttttgtgagttgcaatttctgtggcaagtcaatctcctacagctgttcagctgtgcctcatcagggcagaggttttagtcagtatggtgtgagtggctcaccaacgaaatctaaagtcacaagttgtcctggctgtcgaaaaccacttcctcgatgtgcgctttgtctcattaatatgggaacaccagtttctagctgtcctggaggaaccaaatcagatgaaaaagtggacttgagcaaggacaaaaaattagcccaatttaacaactggtttacatggtgtcataattgcaggcacggtggacatgctggacatatgcttagttggttcagggaccatgcagagtgccctgtgtctgcatgcacgtgtaaatgtatgcagttggatacaacggggaatctggtacctgcagagactgtccagccataaaatgttaccaccttaagagaacccttcaagtgtggagctttctagtaggtgtccttcatagctcagaaacatacctcagaacaagccattcatgacttacctgtaatgggaaaataaatcattctatcagatcagcagttttgatgtttgagtgattttgatatgcttcacagagacaaatgctgccaaaataaacatcgaagtatagacatgagttctgttcagcaggttgaaaagtctgatttagaaaaactttctaagttttggttgaaattatgaacactctagaagcagaatttctggaagagccaagaacagactttgagcctatatcttcaaagctgaaactggatatctttcaataaaatatgtgcacttttaaaataaaatgactaattctgtgattcagacaatagttttaagttcagctgtgcttagatttctttcagattaatttaaaattatagatttttacttttagaattgcagagcccctatcccacactggagaatattttttattactgtctgttatatatgtgtctatgtgtgtgtgtatatttatgtgtgtatgtataaatatgtactttttaaaggagccttttccctcctttgattttaagataagcaatcttttggcataacattatcgtcttcctagaaaagccaagatgaagaatctatcttacaactttttctcttcagtagagaaaaacatgtaccatttcagggtgaacatacaaaattttcactttctaccttttgccttccaatgtcctgatttgtcttcaaaggtttttctccatattaatttgtcatcttatcctcatcacctgagaacattttactgcatacaaagtctatgcaagattatatgtaactagccatttagtataatctatgtcagtgtttctgtgctgtcaaattccgtcctgatttggaataccataccttgttctttccaaggtagactaggaagtgttggggaaatngggtcacttcagagaccattttagatgtaagtttttaaatgtaagtgttactggggctaagtcaggnactttatttaaaacatttttttttctcatttcatagctagatagttgtaagagaaatacaaagaatttacaagatgcttctctgtcatctgccntatgcagagggactgaactaggaattttgtagttgaagctgtgttcataaagagtaaatcttattttatagattttggagaaataaaacaagaattttaagagctttcgtattagcagttttgccttataaaaactaagatttgtcagattagtttgaggtgtaacctaaatattaaaagtagattaaatttattttttaccttgagtgtctgatacataaaacccttttctaggaaaacattggaagtagtacatatttactctaaatgtctcacctgcatgacagtcttttcaaatgaaagacatggtaattgcaatttttttttaaagattgctattaagggtactttttccagccttcatttgagtaaatcttaattgatttcattttattaacatataccctttacctttaatatttcatttgaagtgttcctttcaaacttactgtcttaaatatgaaagtcagctttaagtaatgtcagactcatatgcattttcattctcattagctaaagtaaaatgtaaaattatctcaaatagttacaagttttggaaatacagtataaaacatgaatgtaaagtctattatgtaatatgcttatttgtaatcctaatatatgagggtgacatttttaagattgtatgtatgtgtcaacctcttaaatgttttctgtgaagcccaaacatgcagtttatgtctctggtgtctgttttgcatttcagtgtgcgtggacaatcaaattattttctcatttttatcactaagtcactggtatttgggtttataaactcaacaagatactttacctaaacatgatcaatagatgtgtttattaaaagtgtttttattatttttaaaagattgaataaatctgggttgaagtcattgtatct

SEQ ID NO: 446948 - DNA, 3857 bp, Homo sapiens
cctaggaacccggggatccggcctgtggacccacgggcagggcctgcggggtgcaccggcgctttcgggcggaaggcggggcctcccggccagtgaccccgccccgaggcgcctcccgggcggggaagggcggggctcgcgctgggaaactccccttccaaggccgaggcgccgctccgcgtcctccaggcgtggtggtggggtcgtgggtcccagcccagtggtccaggtcacgggccgcacggccgcggccgccatcttgcccgcgtccgggctcctgcggcgggcggggcggtgtcccggccggaagcggctgtgcggcggccgcgctgccacctcaggtcagtgagcgcgacccggttcgcgtctcgactctcgggagcgccgcggccgcagcgaggggccggagatagcctagttgaaaggcccgggcgtctcggcggggagcgcgttccgcgctgtagggtaatcgcgccgggcggccggccggctggccgggcctcagcgggagccaccgggggctgcgggcggccgtgggacctgcggagacctcctcggggcgcagggaacacgctacagccttcgccgcggcgggcttgtggggagcggcgtcccagcctttcccgggaggctcagccaggtgcctggagcgggagagtcggactcagattcctgctttacctagaatagcaacgtgccctgttcccgttgtaccctcttaaatactatacttcttaaacggcctgtctcccggtgagctctgttctcttctcatatgagtaatgaaaattaagaggatgaatgaaacctcacacatgttgtggactttgctgaataggttagcaaatgactgcaggccttttgtatattttaagggaaatttggatatgtgcagtgcatctcctcgaagatgctgatggtggaaatttcttgaaaccgctctcgtaatttgccacgtgctgttgcaaatattctggtgaatgaacacagaatcagcatggctttcctttgctgagaaatcactgatgggaagtgagacttgttaaacttgaaagtgaatggacctgagtggaccctttgatcacatcagtaaacatgagcggtaccaaacctgatattttatgggcaccacaccatgttgatagatttgttgtgtgtgactcagaactaagtctttatcatgtggaatctactgtgaattcagaactcaaagctggatctttacgtttatctgaagactctgcagctacattactgtcaataaattcagatacaccctatatgaaatgtgttgcctggtatcttaattatgatcctgaatgtctgctggcagttggacaagcaaatggtcgagttgtacttacaagccttggtcaagatcataactcaaagttcaaagatttgataggaaaagagtttgttccaaaacatgcacgacaatgtaatacccttgcctggaatccactggatagtaactggctagctgctggtttagataagcacagagctgacttttcagtgctaatatgggatatctgcagcaaatatactcctgatatagttcccatggaaaaagtgaaactttcagcaggtgaaactgaaacaacattattagtaacaaaaccactttatgagttaggacagaatgatgcttgtctgtctctttgttggcttccacgagaccagaaacttctccttgctggtatgcatcgtaacctagctatatttgatcttcggaatacaagccaaaagatgttcgtaaatacaaaagctgttcagggtgtgacggtagacccatatttccacgatcgtgttgcttccttctatgaaggtcaggttgcaatatgggatcttagaaaatttgagaagccagttttgacattgactgagcaaccaaaacccttaacaaaagtagcatggtgtcccactaggactggtctacttgccactttaacaagggatagtaatattattagattgtatgatatgcagcatacacccactcccattggggatgaaactgaacccacaataattgaaagaagtgtgcaaccttgtgacaattacattgcttcctttgcgtggcatccaacaagtcaaaatcgaatgatagttgtaactcccaaccgaacaatgtcagacttcactgtttttgaaaggatatctcttgcctggagcccaattacatctttaatgtgggcttgtggtcgtcatttatatgaatgtacggaagaagaaaatgataattctttagaaaaagatatagcaacgaagatgcgtcttcgggctttatcaaggtatggacttgatacagagcaggtgtggaggaaccacattttagctggaaatgaagatccacagctcaagtcactctggtatactctgcactttatgaagcaatacacagaagatatggatcagaaatctccaggcaacaaaggatcattggtttatgcaggaattaaatcaattgtaaagtcatcgttgggaatggtggaaagcagcagacataattggagtgggttggataagcaaagtgatattcaaaatttaaatgaagagagaatcttagctttacagctttgtgggtggataaagaaaggaacggatgtagacgtggggccatttttgaactcccttgtacaagaaggggaatgggaaagagctgctgctgtggcattgttcaacttggatattcgccgagcaatccaaatcctgaatgaaggggcatcttctgaaaaaggagatctgaatctcaatgtggtagcaatggctttatcgggttatacggatgagaagaactccctttggagagaaatgtgtagcacactgcgattacagctaaataacccgtatttgtgtgtcatgtttgcatttctgacaagtgaaacaggatcttacgatggagttttgtatgaaaacaaagttgcagtacgtgacagagtggcatttgcttgtaaattccttagtgatactcagttaaatagatacatcgaaaagttgaccaatgaaatgaaagaggctggaaatttggaaggaattttgcttacaggccttactaaagatggagtggacttaatggagagttatgttgatagaactggagatgttcaaacagcaagttactgtatgttacagggttcacctttagatgttcttaaagatgaaagggttcagtactggattgagaattatagaaatttattagatgcctggaggttttggcataaacgagctgaatttgatattcacaggagtaagttggatcccagttccaagcctttagcacaagtttttgtgagttgcaatttctgtggcaagtcaatctcctacagctgttcagctgtgcctcatcagggcagaggttttagtcagtatggtgtgagtggctcaccaacgaaatctaaagtcacaagttgtcctggctgtcgaaaaccacttcctcgatgtgcgctttgtctcattaatatgggaacaccagtttctagctgtcctggaggaaccaaatcagatgaaaaagtggacttgagcaaggacaaaaaattagcccaatttaacaactggtttacatggtgtcataattgcaggcacggtggacatgctggacatatgcttagttggttcagggaccatgcagagtgccctgtgtctgcatgcacgtgtaaatgtatgcagttggatacaacggggaatctggtacctgcagagactgtccagccataaaatgttaccaccttaagagaacccttcaagtgtggagctttctagtaggtgtccttcatagctcagaaacatacctcagaacaagccattcatgacttacctgtaatgggaaaataaatcattctatcagatca

SEQ ID NO: 446949 - DNA, 3982 bp, Homo sapiens
cctaggaacccggggatccggcctgtggacccacgggcagggcctgcggggtgcaccggcgctttcgggcggaaggcggggcctcccggccagtgaccccgccccgaggcgcctcccgggcggggaagggcggggctcgcgctgggaaactccccttccaaggccgaggcgccgctccgcgtcctccaggcgtggtggtggggtcgtgggtcccagcccagtggtccaggtcacgggccgcacggccgcggccgccatcttgcccgcgtccgggctcctgcggcgggcggggcggtgtcccggccggaagcggctgtgcggcggccgcgctgccacctcaggtcagtgagcgcgacccggttcgcgtctcgactctcgggagcgccgcggccgcagcgaggggccggagatagcctagttgaaaggcccgggcgtctcggcggggagcgcgttccgcgctgtagggtaatcgcgccgggcggccggccggctggccgggcctcagcgggagccaccgggggctgcgggcggccgtgggacctgcggagacctcctcggggcgcagggaacacgctacagccttcgccgcggcgggcttgtggggagcggcgtcccagcctttcccgggaggctcagccaggtgcctggagcgggagagtcggactcagattcctgctttacctagaatagcaacgtgccctgttcccgttgtaccctcttaaatactatacttcttaaacggcctgtctcccgggaaatttggatatgtgcagtgcatctcctcgaagatgctgatggtggaaatttcttgaaaccgctctcgtaatttgccacgtgctgttgcaaatattctggtgaatgaacacagaatcagcatggctttcctttgctgagaaatcactgatgggaagtgagacttgttaaacttgaaagtgaatggacctgagtggaccctttgatcacatcagtaaacatgagcggtaccaaacctgatattttatgggcaccacaccatgttgatagatttgttgtgtgtgactcagaactaagtctttatcatgtggaatctactgtgaattcagaactcaaagctggatctttacgtttatctgaagactctgcagctacattactgtcaataaattcagatacaccctatatgaaatgtgttgcctggtatcttaattatgatcctgaatgtctgctggcagttggacaagcaaatggtcgagttgtacttacaagccttggtcaagatcataactcaaagttcaaagatttgataggaaaagagtttgttccaaaacatgcacgacaatgtaatacccttgcctggaatccactggatagtaactggctagctgctggtttagataagcacagagctgacttttcagtgctaatatgggatatctgcagcaaatatactcctgatatagttcccatggaaaaagtgaaactttcagcaggtgaaactgaaacaacattattagtaacaaaaccactttatgagttaggacagaatgatgcttgtctgtctctttgttggcttccacgagaccagaaacttctccttgctggtatgcatcgtaacctagctatatttgatcttcggaatacaagccaaaagatgttcgtaaatacaaaagctgttcagggtgtgacggtagacccatatttccacgatcgtgttgcttccttctatgaaggtcaggttgcaatatgggatcttagaaaatttgagaagccagttttgacattgactgagcaaccaaaacccttaacaaaagtagcatggtgtcccactaggactggtctacttgccactttaacaagggatagtaatattattagattgtatgatatgcagcatacacccactcccattggggatgaaactgaacccacaataattgaaagaagtgtgcaaccttgtgacaattacattgcttcctttgcgtggcatccaacaagtcaaaatcgaatgatagttgtaactcccaaccgaacaatgtcagacttcactgtttttgaaaggatatctcttgcctggagcccaattacatctttaatgtgggcttgtggtcgtcatttatatgaatgtacggaagaagaaaatgataattctttagaaaaagatatagcaacgaagatgcgtcttcgggctttatcaaggtatggacttgatacagagcaggtgtggaggaaccacattttagctggaaatgaagatccacagctcaagtcactctggtatactctgcactttatgaagcaatacacagaagatatggatcagaaatctccaggcaacaaaggatcattggtttatgcaggaattaaatcaattgtaaagtcatcgttgggaatggtggaaagcagcagacataattggagtgggttggataagcaaagtgatattcaaaatttaaatgaagagagaatcttagctttacagctttgtgggtggataaagaaaggaacggatgtagacgtggggccatttttgaactcccttgtacaagaaggggaatgggaaagagctgctgctgtggcattgttcaacttggatattcgccgagcaatccaaatcctgaatgaaggggcatcttctgaaaaaggagatctgaatctcaatgtggtagcaatggctttatcgggttatacggatgagaagaactccctttggagagaaatgtgtagcacactgcgattacagctaaataacccgtatttgtgtgtcatgtttgcatttctgacaagtgaaacaggatcttacgatggagttttgtatgaaaacaaagttgcagtacgtgacagagtggcatttgcttgtaaattccttagtgatactcagttaaatagatacatcgaaaagttgaccaatgaaatgaaagaggctggaaatttggaaggaattttgcttacaggccttactaaagatggagtggacttaatggagagttatgttgatagaactggagatgttcaaacagcaagttactgtatgttacagggttcacctttagatgttcttaaagatgaaagggttcagtactggattgagaattatagaaatttattagatgcctggaggttttggcataaacgagctgaatttgatattcacaggagtaagttggatcccagttccaagcctttagcacaagtttttgtgagttgcaatttctgtggcaagtcaatctcctacagctgttcagctgtgcctcatcagggcagaggttttagtcagtatggtgtgagtggctcaccaacgaaatctaaagtcacaagttgtcctggctgtcgaaaaccacttcctcgatgtgcgctttgtctcattaatatgggaacaccagtttctagctgtcctggaggaaccaaatcagatgaaaaagtggacttgagcaaggacaaaaaattagcccaatttaacaactggtttacatggtgtcataattgcaggcacggtggacatgctggacatatgcttagttggttcagggaccatgcagagtgccctgtgtctgcatgcacgtgtaaatgtatgcagttggatacaacggggaatctggtacctgcagagactgtccagccataaaatgttaccaccttaagagaacccttcaagtgtggagctttctagtaggtgtccttcatagctcagaaacatacctcagaacaagccattcatgacttacctgtaatgggaaaataaatcattctatcagatcagcagttttgatgtttgagtgattttgatatgcttcacagagacaaatgctgccaaaataaacatcgaagtatagacatgagttctgttcagcaggttgaaaagtctgatttagaaaaactttctaagttttggttgaaattatgaacactctagaagcagaatttctggaagagccaagaacagactttgagcctatatcttcaaagctgaaactggatatctttcaataaaatatgtgcactttta

SEQ ID NO: 446950 - DNA, 3900 bp, Homo sapiens
cctaggaacccggggatccggcctgtggacccacgggcagggcctgcggggtgcaccggcgctttcgggcggaaggcggggcctcccggccagtgaccccgccccgaggcgcctcccgggcggggaagggcggggctcgcgctgggaaactccccttccaaggccgaggcgccgctccgcgtcctccaggcgtggtggtggggtcgtgggtcccagcccagtggtccaggtcacgggccgcacggccgcggccgccatcttgcccgcgtccgggctcctgcggcgggcggggcggtgtcccggccggaagcggctgtgcggcggccgcgctgccacctcaggtcagtgagcgcgacccggttcgcgtctcgactctcgggagcgccgcggccgcagcgaggggccggagatagcctagttgaaaggcccgggcgtctcggcggggagcgcgttccgcgctgtagggtaatcgcgccgggcggccggccggctggccgggcctcagcgggagccaccgggggctgcgggcggccgtgggacctgcggagacctcctcggggcgcagggaacacgctacagccttcgccgcggcgggcttgtggggagcggcgtcccagcctttcccgggaggctcagccaggtgcctggagcgggagagtcggactcagattcctgctttacctagaatagcaacgtgccctgttcccgttgtaccctcttaaatactatacttcttaaacggcctgtctcccgtgctgttgcaaatattctggtgaatgaacacagaatcagcatggctttcctttgctgagaaatcactgatgggaagtgagacttgttaaacttgaaagtgaatggacctgagtggaccctttgatcacatcagtaaacatgagcggtaccaaacctgatattttatgggcaccacaccatgttgatagatttgttgtgtgtgactcagaactaagtctttatcatgtggaatctactgtgaattcagaactcaaagctggatctttacgtttatctgaagactctgcagctacattactgtcaataaattcagatacaccctatatgaaatgtgttgcctggtatcttaattatgatcctgaatgtctgctggcagttggacaagcaaatggtcgagttgtacttacaagccttggtcaagatcataactcaaagttcaaagatttgataggaaaagagtttgttccaaaacatgcacgacaatgtaatacccttgcctggaatccactggatagtaactggctagctgctggtttagataagcacagagctgacttttcagtgctaatatgggatatctgcagcaaatatactcctgatatagttcccatggaaaaagtgaaactttcagcaggtgaaactgaaacaacattattagtaacaaaaccactttatgagttaggacagaatgatgcttgtctgtctctttgttggcttccacgagaccagaaacttctccttgctggtatgcatcgtaacctagctatatttgatcttcggaatacaagccaaaagatgttcgtaaatacaaaagctgttcagggtgtgacggtagacccatatttccacgatcgtgttgcttccttctatgaaggtcaggttgcaatatgggatcttagaaaatttgagaagccagttttgacattgactgagcaaccaaaacccttaacaaaagtagcatggtgtcccactaggactggtctacttgccactttaacaagggatagtaatattattagattgtatgatatgcagcatacacccactcccattggggatgaaactgaacccacaataattgaaagaagtgtgcaaccttgtgacaattacattgcttcctttgcgtggcatccaacaagtcaaaatcgaatgatagttgtaactcccaaccgaacaatgtcagacttcactgtttttgaaaggatatctcttgcctggagcccaattacatctttaatgtgggcttgtggtcgtcatttatatgaatgtacggaagaagaaaatgataattctttagaaaaagatatagcaacgaagatgcgtcttcgggctttatcaaggtatggacttgatacagagcaggtgtggaggaaccacattttagctggaaatgaagatccacagctcaagtcactctggtatactctgcactttatgaagcaatacacagaagatatggatcagaaatctccaggcaacaaaggatcattggtttatgcaggaattaaatcaattgtaaagtcatcgttgggaatggtggaaagcagcagacataattggagtgggttggataagcaaagtgatattcaaaatttaaatgaagagagaatcttagctttacagctttgtgggtggataaagaaaggaacggatgtagacgtggggccatttttgaactcccttgtacaagaaggggaatgggaaagagctgctgctgtggcattgttcaacttggatattcgccgagcaatccaaatcctgaatgaaggggcatcttctgaaaaaggagatctgaatctcaatgtggtagcaatggctttatcgggttatacggatgagaagaactccctttggagagaaatgtgtagcacactgcgattacagctaaataacccgtatttgtgtgtcatgtttgcatttctgacaagtgaaacaggatcttacgatggagttttgtatgaaaacaaagttgcagtacgtgacagagtggcatttgcttgtaaattccttagtgatactcagttaaatagatacatcgaaaagttgaccaatgaaatgaaagaggctggaaatttggaaggaattttgcttacaggccttactaaagatggagtggacttaatggagagttatgttgatagaactggagatgttcaaacagcaagttactgtatgttacagggttcacctttagatgttcttaaagatgaaagggttcagtactggattgagaattatagaaatttattagatgcctggaggttttggcataaacgagctgaatttgatattcacaggagtaagttggatcccagttccaagcctttagcacaagtttttgtgagttgcaatttctgtggcaagtcaatctcctacagctgttcagctgtgcctcatcagggcagaggttttagtcagtatggtgtgagtggctcaccaacgaaatctaaagtcacaagttgtcctggctgtcgaaaaccacttcctcgatgtgcgctttgtctcattaatatgggaacaccagtttctagctgtcctggaggaaccaaatcagatgaaaaagtggacttgagcaaggacaaaaaattagcccaatttaacaactggtttacatggtgtcataattgcaggcacggtggacatgctggacatatgcttagttggttcagggaccatgcagagtgccctgtgtctgcatgcacgtgtaaatgtatgcagttggatacaacggggaatctggtacctgcagagactgtccagccataaaatgttaccaccttaagagaacccttcaagtgtggagctttctagtaggtgtccttcatagctcagaaacatacctcagaacaagccattcatgacttacctgtaatgggaaaataaatcattctatcagatcagcagttttgatgtttgagtgattttgatatgcttcacagagacaaatgctgccaaaataaacatcgaagtatagacatgagttctgttcagcaggttgaaaagtctgatttagaaaaactttctaagttttggttgaaattatgaacactctagaagcagaatttctggaagagccaagaacagactttgagcctatatcttcaaagctgaaactggatatctttcaataaaatatgtgcactttta

SEQ ID NO: 446951 - DNA, 2727 bp, Homo sapiens
  misc_feature (1668)..(1668): n is a, c, g, or t
  misc_feature (1735)..(1735): n is a, c, g, or t
  misc_feature (1829)..(1829): n is a, c, g, or t
tctgtgttactcatacttacatgctacccagaagtctctggcctagccaggagattttaaacaattgaaataattcatgttttcgttttagggttcacctttagatgttcttaaagatgaaagggttcagtactggattgagaattatagaaatttattagatgcctggaggttttggcataaacgagctgaatttgatattcacaggagtaagttggatcccagttccaagcctttagcacaagtttttgtgagttgcaatttctgtggcaagtcaatctcctacagctgttcagctgtgcctcatcagggcagaggttttagtcagtatggtgtgagtggctcaccaacgaaatctaaagtcacaagttgtcctggctgtcgaaaaccacttcctcgatgtgcgctttgtctcattaatatgggaacaccagtttctagctgtcctggaggaaccaaatcagatgaaaaagtggacttgagcaaggacaaaaaattagcccaatttaacaactggtttacatggtgtcataattgcaggcacggtggacatgctggacatatgcttagttggttcagggaccatgcagagtgccctgtgtctgcatgcacgtgtaaatgtatgcagttggatacaacggggaatctggtacctgcagagactgtccagccataaaatgttaccaccttaagagaacccttcaagtgtggagctttctagtaggtgtccttcatagctcagaaacatacctcagaacaagccattcatgacttacctgtaatgggaaaataaatcattctatcagatcagcagttttgatgtttgagtgattttgatatgcttcacagagacaaatgctgccaaaataaacatcgaagtatagacatgagttctgttcagcaggttgaaaagtctgatttagaaaaactttctaagttttggttgaaattatgaacactctagaagcagaatttctggaagagccaagaacagactttgagcctatatcttcaaagctgaaactggatatctttcaataaaatatgtgcacttttaaaataaaatgactaattctgtgattcagacaatagttttaagttcagctgtgcttagatttctttcagattaatttaaaattatagatttttacttttagaattgcagagcccctatcccacactggagaatattttttattactgtctgttatatatgtgtctatgtgtgtgtgtatatttatgtgtgtatgtataaatatgtactttttaaaggagccttttccctcctttgattttaagataagcaatcttttggcataacattatcgtcttcctagaaaagccaagatgaagaatctatcttacaactttttctcttcagtagagaaaaacatgtaccatttcagggtgaacatacaaaattttcactttctaccttttgccttccaatgtcctgatttgtcttcaaaggtttttctccatattaatttgtcatcttatcctcatcacctgagaacattttactgcatacaaagtctatgcaagattatatgtaactagccatttagtataatctatgtcagtgtttctgtgctgtcaaattccgtcctgatttggaataccataccttgttctttccaaggtagactaggaagtgttggggaaatngggtcacttcagagaccattttagatgtaagtttttaaatgtaagtgttactggggctaagtcaggnactttatttaaaacatttttttttctcatttcatagctagatagttgtaagagaaatacaaagaatttacaagatgcttctctgtcatctgccntatgcagagggactgaactaggaattttgtagttgaagctgtgttcataaagagtaaatcttattttatagattttggagaaataaaacaagaattttaagagctttcgtattagcagttttgccttataaaaactaagatttgtcagattagtttgaggtgtaacctaaatattaaaagtagattaaatttattttttaccttgagtgtctgatacataaaacccttttctaggaaaacattggaagtagtacatatttactctaaatgtctcacctgcatgacagtcttttcaaatgaaagacatggtaattgcaatttttttttaaagattgctattaagggtactttttccagccttcatttgagtaaatcttaattgatttcattttattaacatataccctttacctttaatatttcatttgaagtgttcctttcaaacttactgtcttaaatatgaaagtcagctttaagtaatgtcagactcatatgcattttcattctcattagctaaagtaaaatgtaaaattatctcaaatagttacaagttttggaaatacagtataaaacatgaatgtaaagtctattatgtaatatgcttatttgtaatcctaatatatgagggtgacatttttaagattgtatgtatgtgtcaacctcttaaatgttttctgtgaagcccaaacatgcagtttatgtctctggtgtctgttttgcatttcagtgtgcgtggacaatcaaattattttctcatttttatcactaagtcactggtatttgggtttataaactcaacaagatactttacctaaacatgatcaatagatgtgtttattaaaagtgtttttattatttttaaaagattgaataaatctgggttgaagtcattgtatct

SEQ ID NO: 446952 - DNA, 6522 bp, Homo sapiens
  misc_feature (5463)..(5463): n is a, c, g, or t
  misc_feature (5530)..(5530): n is a, c, g, or t
  misc_feature (5624)..(5624): n is a, c, g, or t
cctaggaacccggggatccggcctgtggacccacgggcagggcctgcggggtgcaccggcgctttcgggcggaaggcggggcctcccggccagtgaccccgccccgaggcgcctcccgggcggggaagggcggggctcgcgctgggaaactccccttccaaggccgaggcgccgctccgcgtcctccaggcgtggtggtggggtcgtgggtcccagcccagtggtccaggtcacgggccgcacggccgcggccgccatcttgcccgcgtccgggctcctgcggcgggcggggcggtgtcccggccggaagcggctgtgcggcggccgcgctgccacctcaggtcagtgagcgcgacccggttcgcgtctcgactctcgggagcgccgcggccgcagcgaggggccggagatagcctagttgaaaggcccgggcgtctcggcggggagcgcgttccgcgctgtagggtaatcgcgccgggcggccggccggctggccgggcctcagcgggagccaccgggggctgcgggcggccgtgggacctgcggagacctcctcggggcgcagggaacacgctacagccttcgccgcggcgggcttgtggggagcggcgtcccagcctttcccgggaggctcagccaggtgcctggagcgggagagtcggactcagattcctgctttacctagaatagcaacgtgccctgttcccgttgtaccctcttaaatactatacttcttaaacggcctgtctcccgggaaatttggatatgtgcagtgcatctcctcgaagatgctgatggtggaaatttcttgaaaccgctctcgtaatttgccacgtgctgttgcaaatattctggtgaatgaacacagaatcagcatggctttcctttgctgagaaatcactgatgggaagtgagacttgttaaacttgaaagtgaatggacctgagtggaccctttgatcacatcagtaaacatgagcggtaccaaacctgatattttatgggcaccacaccatgttgatagatttgttgtgtgtgactcagaactaagtctttatcatgtggaatctactgtgaattcagaactcaaagctggatctttacgtttatctgaagactctgcagctacattactgtcaataaattcagatacaccctatatgaaatgtgttgcctggtatcttaattatgatcctgaatgtctgctggcagttggacaagcaaatggtcgagttgtacttacaagccttggtcaagatcataactcaaagttcaaagatttgataggaaaagagtttgttccaaaacatgcacgacaatgtaatacccttgcctggaatccactggatagtaactggctagctgctggtttagataagcacagagctgacttttcagtgctaatatgggatatctgcagcaaatatactcctgatatagttcccatggaaaaagtgaaactttcagcaggtgaaactgaaacaacattattagtaacaaaaccactttatgagttaggacagaatgatgcttgtctgtctctttgttggcttccacgagaccagaaacttctccttgctggtatgcatcgtaacctagctatatttgatcttcggaatacaagccaaaagatgttcgtaaatacaaaagctgttcagggtgtgacggtagacccatatttccacgatcgtgttgcttccttctatgaaggtcaggttgcaatatgggatcttagaaaatttgagaagccagttttgacattgactgagcaaccaaaacccttaacaaaagtagcatggtgtcccactaggactggtctacttgccactttaacaagggatagtaatattattagattgtatgatatgcagcatacacccactcccattggggatgaaactgaacccacaataattgaaagaagtgtgcaaccttgtgacaattacattgcttcctttgcgtggcatccaacaagtcaaaatcgaatgatagttgtaactcccaaccgaacaatgtcagacttcactgtttttgaaaggatatctcttgcctggagcccaattacatctttaatgtgggcttgtggtcgtcatttatatgaatgtacggaagaagaaaatgataattctttagaaaaagatatagcaacgaagatgcgtcttcgggctttatcaaggtatggacttgatacagagcaggtgtggaggaaccacattttagctggaaatgaagatccacagctcaagtcactctggtatactctgcactttatgaagcaatacacagaagatatggatcagaaatctccaggcaacaaaggatcattggtttatgcaggaattaaatcaattgtaaagtcatcgttgggaatggtggaaagcagcagacataattggagtgggttggataagcaaagtgatattcaaaatttaaatgaagagagaatcttagctttacagctttgtgggtggataaagaaaggaacggatgtagacgtggggccatttttgaactcccttgtacaagaaggggaatgggaaagagctgctgctgtggcattgttcaacttggatattcgccgagcaatccaaatcctgaatgaaggggcatcttctgaaaaaggagatctgaatctcaatgtggtagcaatggctttatcgggttatacggatgagaagaactccctttggagagaaatgtgtagcacactgcgattacagctaaataacccgtatttgtgtgtcatgtttgcatttctgacaagtgaaacaggatcttacgatggagttttgtatgaaaacaaagttgcagtacgtgacagagtggcatttgcttgtaaattccttagtgatactcagttaaatagatacatcgaaaagttgaccaatgaaatgaaagaggctggaaatttggaaggaattttgcttacaggccttactaaagatggagtggacttaatggagagttatgttgatagaactggagatgttcaaacagcaagttactgtatgttacagggttcacctttagatgttcttaaagatgaaagggttcagtactggattgagaattatagaaatttattagatgcctggaggttttggcataaacgagctgaatttgatattcacaggagtaagttggatcccagttccaagcctttagcacaagtttttgtgagttgcaatttctgtggcaagtcaatctcctacagctgttcagctgtgcctcatcagggcagaggttttagtcagtatggtgtgagtggctcaccaacgaaatctaaagtcacaagttgtcctggctgtcgaaaaccacttcctcgatgtgcgctttgtctcattaatatgggaacaccagtttctagctgtcctggaggaaccaaatcagatgaaaaagtggacttgagcaaggacaaaaaattagcccaatttaacaactggtttacatggtgtcataattgcaggcacggtggacatgctggacatatgcttagttggttcaggtaatcagcacatttcttctttgataggcttggagttatgggggataacacagattgcttctaaatagtttgggtttatctattagcatttagccaaagtatgaattttattttttactgtcactcatgttaacaaaggtggtgtgaacatgtcgtgattagatatcctatgtaaccttaaactataaaggtaatacttatgtaagaactaatttaaatgttttgtatgagttaaatgtttgaataacattatttaactttattcggggagaggatatgtttacagtttttacactgaatattctgtaatttaccatgcaattgaattactaatgaaatgttaaaagagcatatcatacctctgcctcagttctcttctaagtaagctttttatgtagtcacgcaattaagactgtcaagacatatttgaatttcattttgaatggtgccagtggccctgtgctcctggttgatacagcatttatacccagtttgtcttactagctaatttaaactctgagcacatccctgtcaccttcacaactataaatgaaatatcttgccatatatgtagaaaataatttcatgcttttgatgctttttttctctgggttttagtttctatatttttccaaatgccattttgaaaagttgcattatagatagatataagtaaacaggtgggcacagtggtgcacacctgtagtcccagctactcaggaggctgaggcaggaggatcacttgagcccaaaagtgtgcgtacagcctgggaaatatagggagaccctgtctcttaaaaaataaataaataaataaatgtatgtctgtctaatttggatttttaactgttatttgacctatttttttagggaccatgcagagtgccctgtgtctgcatgcacgtgtaaatgtatgcagttggatacaacggggaatctggtacctgcagagactgtccagccataaaatgttaccaccttaagagaacccttcaagtgtggagctttctagtaggtgtccttcatagctcagaaacatacctcagaacaagccattcatgacttacctgtaatgggaaaataaatcattctatcagatcagcagttttgatgtttgagtgattttgatatgcttcacagagacaaatgctgccaaaataaacatcgaagtatagacatgagttctgttcagcaggttgaaaagtctgatttagaaaaactttctaagttttggttgaaattatgaacactctagaagcagaatttctggaagagccaagaacagactttgagcctatatcttcaaagctgaaactggatatctttcaataaaatatgtgcacttttaaaataaaatgactaattctgtgattcagacaatagttttaagttcagctgtgcttagatttctttcagattaatttaaaattatagatttttacttttagaattgcagagcccctatcccacactggagaatattttttattactgtctgttatatatgtgtctatgtgtgtgtgtatatttatgtgtgtatgtataaatatgtactttttaaaggagccttttccctcctttgattttaagataagcaatcttttggcataacattatcgtcttcctagaaaagccaagatgaagaatctatcttacaactttttctcttcagtagagaaaaacatgtaccatttcagggtgaacatacaaaattttcactttctaccttttgccttccaatgtcctgatttgtcttcaaaggtttttctccatattaatttgtcatcttatcctcatcacctgagaacattttactgcatacaaagtctatgcaagattatatgtaactagccatttagtataatctatgtcagtgtttctgtgctgtcaaattccgtcctgatttggaataccataccttgttctttccaaggtagactaggaagtgttggggaaatngggtcacttcagagaccattttagatgtaagtttttaaatgtaagtgttactggggctaagtcaggnactttatttaaaacatttttttttctcatttcatagctagatagttgtaagagaaatacaaagaatttacaagatgcttctctgtcatctgccntatgcagagggactgaactaggaattttgtagttgaagctgtgttcataaagagtaaatcttattttatagattttggagaaataaaacaagaattttaagagctttcgtattagcagttttgccttataaaaactaagatttgtcagattagtttgaggtgtaacctaaatattaaaagtagattaaatttattttttaccttgagtgtctgatacataaaacccttttctaggaaaacattggaagtagtacatatttactctaaatgtctcacctgcatgacagtcttttcaaatgaaagacatggtaattgcaatttttttttaaagattgctattaagggtactttttccagccttcatttgagtaaatcttaattgatttcattttattaacatataccctttacctttaatatttcatttgaagtgttcctttcaaacttactgtcttaaatatgaaagtcagctttaagtaatgtcagactcatatgcattttcattctcattagctaaagtaaaatgtaaaattatctcaaatagttacaagttttggaaatacagtataaaacatgaatgtaaagtctattatgtaatatgcttatttgtaatcctaatatatgagggtgacatttttaagattgtatgtatgtgtcaacctcttaaatgttttctgtgaagcccaaacatgcagtttatgtctctggtgtctgttttgcatttcagtgtgcgtggacaatcaaattattttctcatttttatcactaagtcactggtatttgggtttataaactcaacaagatactttacctaaacatgatcaatagatgtgtttattaaaagtgtttttattatttttaaaagattgaataaatctgggttgaagtcattgtatct

SEQ ID NO: 446953 - DNA, 4605 bp, Homo sapiens
cctaggaacccggggatccggcctgtggacccacgggcagggcctgcggggtgcaccggcgctttcgggcggaaggcggggcctcccggccagtgaccccgccccgaggcgcctcccgggcggggaagggcggggctcgcgctgggaaactccccttccaaggccgaggcgccgctccgcgtcctccaggcgtggtggtggggtcgtgggtcccagcccagtggtccaggtcacgggccgcacggccgcggccgccatcttgcccgcgtccgggctcctgcggcgggcggggcggtgtcccggccggaagcggctgtgcggcggccgcgctgccacctcaggtcagtgagcgcgacccggttcgcgtctcgactctcgggagcgccgcggccgcagcgaggggccggagatagcctagttgaaaggcccgggcgtctcggcggggagcgcgttccgcgctgtagggtaatcgcgccgggcggccggccggctggccgggcctcagcgggagccaccgggggctgcgggcggccgtgggacctgcggagacctcctcggggcgcagggaacacgctacagccttcgccgcggcgggcttgtggggagcggcgtcccagcctttcccgggaggctcagccaggtgcctggagcgggagagtcggactcagattcctgctttacctagaatagcaacgtgccctgttcccgttgtaccctcttaaatactatacttcttaaacggcctgtctcccgggaaatttggatatgtgcagtgcatctcctcgaagatgctgatggtggaaatttcttgaaaccgctctcgtaatttgccacgtgctgttgcaaatattctggtgaatgaacacagaatcagcatggctttcctttgctgagaaatcactgatgggaagtgagacttgttaaacttgaaagtgaatggacctgagtggaccctttgatcacatcagtaaacatgagcggtaccaaacctgatattttatgggcaccacaccatgttgatagatttgttgtgtgtgactcagaactaagtctttatcatgtggaatctactgtgaattcagaactcaaagctggatctttacgtttatctgaagactctgcagctacattactgtcaataaattcagatacaccctatatgaaatgtgttgcctggtatcttaattatgatcctgaatgtctgctggcagttggacaagcaaatggtcgagttgtacttacaagccttggtcaagatcataactcaaagttcaaagatttgataggaaaagagtttgttccaaaacatgcacgacaatgtaatacccttgcctggaatccactggatagtaactggctagctgctggtttagataagcacagagctgacttttcagtgctaatatgggatatctgcagcaaatatactcctgatatagttcccatggaaaaagtgaaactttcagcaggtgaaactgaaacaacattattagtaacaaaaccactttatgagttaggacagaatgatgcttgtctgtctctttgttggcttccacgagaccagaaacttctccttgctggtatgcatcgtaacctagctatatttgatcttcggaatacaagccaaaagatgttcgtaaatacaaaagctgttcagggtgtgacggtagacccatatttccacgatcgtgttgcttccttctatgaaggtcaggttgcaatatgggatcttagaaaatttgagaagccagttttgacattgactgagcaaccaaaacccttaacaaaagtagcatggtgtcccactaggactggtctacttgccactttaacaagggatagtaatattattagattgtatgatatgcagcatacacccactcccattggggatgaaactgaacccacaataattgaaagaagtgtgcaaccttgtgacaattacattgcttcctttgcgtggcatccaacaagtcaaaatcgaatgatagttgtaactcccaaccgaacaatgtcagacttcactgtttttgaaaggatatctcttgcctggagcccaattacatctttaatgtgggcttgtggtcgtcatttatatgaatgtacggaagaagaaaatgataattctttagaaaaagatatagcaacgaagatgcgtcttcgggctttatcaaggtatggacttgatacagagcaggtgtggaggaaccacattttagctggaaatgaagatccacagctcaagtcactctggtatactctgcactttatgaagcaatacacagaagatatggatcagaaatctccaggcaacaaaggatcattggtttatgcaggaattaaatcaattgtaaagtcatcgttgggaatggtggaaagcagcagacataattggagtgggttggataagcaaagtgatattcaaaatttaaatgaagagagaatcttagctttacagctttgtgggtggataaagaaaggaacggatgtagacgtggggccatttttgaactcccttgtacaagaaggggaatgggaaagagctgctgctgtggcattgttcaacttggatattcgccgagcaatccaaatcctgaatgaaggggcatcttctgaaaaaggagatctgaatctcaatgtggtagcaatggctttatcgggttatacggatgagaagaactccctttggagagaaatgtgtagcacactgcgattacagctaaataacccgtatttgtgtgtcatgtttgcatttctgacaagtgaaacaggatcttacgatggagttttgtatgaaaacaaagttgcagtacgtgacagagtggcatttgcttgtaaattccttagtgatactcagttaaatagatacatcgaaaagttgaccaatgaaatgaaagaggctggaaatttggaaggaattttgcttacaggccttactaaagatggagtggacttaatggagagttatgttgatagaactggagatgttcaaacagcaagttactgtatgttacagggttcacctttagatgttcttaaagatgaaagggttcagtactggattgagaattatagaaatttattagatgcctggaggttttggcataaacgagctgaatttgatattcacaggagtaagttggatcccagttccaagcctttagcacaagtttttgtgagttgcaatttctgtggcaagtcaatctcctacagctgttcagctgtgcctcatcagggcagaggttttagtcagtatggtgtgagtggctcaccaacgaaatctaaagtcacaagttgtcctggctgtcgaaaaccacttcctcgatgtgcgctttgtctcattaatatgggaacaccagtttctagctgtcctggaggaaccaaatcagatgaaaaagtggacttgagcaaggacaaaaaattagcccaatttaacaactggtttacatggtgtcataattgcaggcacggtggacatgctggacatatgcttagttggttcaggtaatcagcacatttcttctttgataggcttggagttatgggggataacacagattgcttctaaatagtttgggtttatctattagcatttagccaaagtatgaattttattttttactgtcactcatgttaacaaaggtggtgtgaacatgtcgtgattagatatcctatgtaaccttaaactataaaggtaatacttatgtaagaactaatttaaatgttttgtatgagttaaatgtttgaataacattatttaactttattcggggagaggatatgtttacagtttttacactgaatattctgtaatttaccatgcaattgaattactaatgaaatgttaaaagagcatatcatacctctgcctcagttctcttctaagtaagctttttatgtagtcacgcaattaagactgtcaagacatatttgaatttcattttgaatggtgccagtggccctgtgctcctggttgatacagcatttatacccagtttgtcttactagctaatttaaactctgagcacatccctgtcaccttcacaactataaatgaaatatcttgccatatatgtagaaaataatttcatgcttttgatgctttttttctctgggttttagtttctatatttttccaaatgccattttgaaaagttgcattatagatagatataagtaaacaggtgggcacagtggtgcacacctgtagtcccagctactcaggaggctgaggcaggaggatcacttgagcccaaaagtgtgcgtacagcctgggaaatatagggagaccctgtctcttaaaaaataaataaataaataaatgtatgtctgtctaatttggatttttaactgttatttgacctatttttttagggaccatgcagagtgccctgtgtctgcatgcacgtgtaaatgtatgcagttggatacaacggggaatctggtacctgcagagactgtccagccataaaatgttaccaccttaagagaacccttcaagtgtggagctttctagtaggtgtccttcatagctcagaaacatacctcagaacaagccattcatgacttacctgtaatgggaaaataaatcattctatcagatca

SEQ ID NO: 446954 - DNA, 2307 bp, Homo sapiens
  misc_feature (1248)..(1248): n is a, c, g, or t
  misc_feature (1315)..(1315): n is a, c, g, or t
  misc_feature (1409)..(1409): n is a, c, g, or t
gattgagcagtggccgtcggtccagagaaggtagcgaaatgagataacccatgtggacttgagcaaggacaaaaaattagcccaatttaacaactggtttacatggtgtcataattgcaggcacggtggacatgctggacatatgcttagttggttcagggaccatgcagagtgccctgtgtctgcatgcacgtgtaaatgtatgcagttggatacaacggggaatctggtacctgcagagactgtccagccataaaatgttaccaccttaagagaacccttcaagtgtggagctttctagtaggtgtccttcatagctcagaaacatacctcagaacaagccattcatgacttacctgtaatgggaaaataaatcattctatcagatcagcagttttgatgtttgagtgattttgatatgcttcacagagacaaatgctgccaaaataaacatcgaagtatagacatgagttctgttcagcaggttgaaaagtctgatttagaaaaactttctaagttttggttgaaattatgaacactctagaagcagaatttctggaagagccaagaacagactttgagcctatatcttcaaagctgaaactggatatctttcaataaaatatgtgcacttttaaaataaaatgactaattctgtgattcagacaatagttttaagttcagctgtgcttagatttctttcagattaatttaaaattatagatttttacttttagaattgcagagcccctatcccacactggagaatattttttattactgtctgttatatatgtgtctatgtgtgtgtgtatatttatgtgtgtatgtataaatatgtactttttaaaggagccttttccctcctttgattttaagataagcaatcttttggcataacattatcgtcttcctagaaaagccaagatgaagaatctatcttacaactttttctcttcagtagagaaaaacatgtaccatttcagggtgaacatacaaaattttcactttctaccttttgccttccaatgtcctgatttgtcttcaaaggtttttctccatattaatttgtcatcttatcctcatcacctgagaacattttactgcatacaaagtctatgcaagattatatgtaactagccatttagtataatctatgtcagtgtttctgtgctgtcaaattccgtcctgatttggaataccataccttgttctttccaaggtagactaggaagtgttggggaaatngggtcacttcagagaccattttagatgtaagtttttaaatgtaagtgttactggggctaagtcaggnactttatttaaaacatttttttttctcatttcatagctagatagttgtaagagaaatacaaagaatttacaagatgcttctctgtcatctgccntatgcagagggactgaactaggaattttgtagttgaagctgtgttcataaagagtaaatcttattttatagattttggagaaataaaacaagaattttaagagctttcgtattagcagttttgccttataaaaactaagatttgtcagattagtttgaggtgtaacctaaatattaaaagtagattaaatttattttttaccttgagtgtctgatacataaaacccttttctaggaaaacattggaagtagtacatatttactctaaatgtctcacctgcatgacagtcttttcaaatgaaagacatggtaattgcaatttttttttaaagattgctattaagggtactttttccagccttcatttgagtaaatcttaattgatttcattttattaacatataccctttacctttaatatttcatttgaagtgttcctttcaaacttactgtcttaaatatgaaagtcagctttaagtaatgtcagactcatatgcattttcattctcattagctaaagtaaaatgtaaaattatctcaaatagttacaagttttggaaatacagtataaaacatgaatgtaaagtctattatgtaatatgcttatttgtaatcctaatatatgagggtgacatttttaagattgtatgtatgtgtcaacctcttaaatgttttctgtgaagcccaaacatgcagtttatgtctctggtgtctgttttgcatttcagtgtgcgtggacaatcaaattattttctcatttttatcactaagtcactggtatttgggtttataaactcaacaagatactttacctaaacatgatcaatagatgtgtttattaaaagtgtttttattatttttaaaagattgaataaatctgggttgaagtcattgtatct

SEQ ID NO: 446955 - DNA, 3735 bp, Homo sapiens
cctaggaacccggggatccggcctgtggacccacgggcagggcctgcggggtgcaccggcgctttcgggcggaaggcggggcctcccggccagtgaccccgccccgaggcgcctcccgggcggggaagggcggggctcgcgctgggaaactccccttccaaggccgaggcgccgctccgcgtcctccaggcgtggtggtggggtcgtgggtcccagcccagtggtccaggtcacgggccgcacggccgcggccgccatcttgcccgcgtccgggctcctgcggcgggcggggcggtgtcccggccggaagcggctgtgcggcggccgcgctgccacctcaggtcagtgagcgcgacccggttcgcgtctcgactctcgggagcgccgcggccgcagcgaggggccggagatagcctagttgaaaggcccgggcgtctcggcggggagcgcgttccgcgctgtagggtaatcgcgccgggcggccggccggctggccgggcctcagcgggagccaccgggggctgcgggcggccgtgggacctgcggagacctcctcggggcgcagggaacacgctacagccttcgccgcggcgggcttgtggggagcggcgtcccagcctttcccgggaggctcagccaggtgcctggagcgggagagtcggactcagattcctgctttacctagaatagcaacgtgccctgttcccgttgtaccctcttaaatactatacttcttaaacggcctgtctcccgggaaatttggatatgtgcagtgcatctcctcgaagatgctgatggtggaaatttcttgaaaccgctctcgtaatttgccacgtgctgttgcaaatattctggtgaatgaacacagaatcagcatggctttcctttgctgagaaatcactgatgggaagtgagacttgttaaacttgaaagtgaatggacctgagtggaccctttgatcacatcagtaaacatgagcggtaccaaacctgatattttatgggcaccacaccatgttgatagatttgttgtgtgtgactcagaactaagtctttatcatgtggaatctactgtgaattcagaactcaaagctggatctttacgtttatctgaagactctgcagctacattactgtcaataaattcagatacaccctatatgaaatgtgttgcctggtatcttaattatgatcctgaatgtctgctggcagttggacaagcaaatggtcgagttgtacttacaagccttggtcaagatcataactcaaagttcaaagatttgataggaaaagagtttgttccaaaacatgcacgacaatgtaatacccttgcctggaatccactggatagtaactggctagctgctggtttagataagcacagagctgacttttcagtgctaatatgggatatctgcagcaaatatactcctgatatagttcccatggaaaaagtgaaactttcagcaggtgaaactgaaacaacattattagtaacaaaaccactttatgagttaggacagaatgatgcttgtctgtctctttgttggcttccacgagaccagaaacttctccttgctggtatgcatcgtaacctagctatatttgatcttcggaatacaagccaaaagatgttcgtaaatacaaaagctgttcagggtgtgacggtagacccatatttccacgatcgtgttgcttccttctatgaaggtcaggttgcaatatgggatcttagaaaatttgagaagccagttttgacattgactgagcaaccaaaacccttaacaaaagtagcatggtgtcccactaggactggtctacttgccactttaacaagggatagtaatattattagattgtatgatatgcagcatacacccactcccattggggatgaaactgaacccacaataattgaaagaagtgtgcaaccttgtgacaattacattgcttcctttgcgtggcatccaacaagtcaaaatcgaatgatagttgtaactcccaaccgaacaatgtcagacttcactgtttttgaaaggatatctcttgcctggagcccaattacatctttaatgtgggcttgtggtcgtcatttatatgaatgtacggaagaagaaaatgataattctttagaaaaagatatagcaacgaagatgcgtcttcgggctttatcaaggtatggacttgatacagagcaggtgtggaggaaccacattttagctggaaatgaagatccacagctcaagtcactctggtatactctgcactttatgaagcaatacacagaagatatggatcagaaatctccaggcaacaaaggatcattggtttatgcaggaattaaatcaattgtaaagtcatcgttgggaatggtggaaagcagcagacataattggagtgggttggataagcaaagtgatattcaaaatttaaatgaagagagaatcttagctttacagctttgtgggtggataaagaaaggaacggatgtagacgtggggccatttttgaactcccttgtacaagaaggggaatgggaaagagctgctgctgtggcattgttcaacttggatattcgccgagcaatccaaatcctgaatgaaggggcatcttctgaaaaaggagatctgaatctcaatgtggtagcaatggctttatcgggttatacggatgagaagaactccctttggagagaaatgtgtagcacactgcgattacagctaaataacccgtatttgtgtgtcatgtttgcatttctgacaagtgaaacaggatcttacgatggagttttgtatgaaaacaaagttgcagtacgtgacagagtggcatttgcttgtaaattccttagtgatactcagttaaatagatacatcgaaaagttgaccaatgaaatgaaagaggctggaaatttggaaggaattttgcttacaggccttactaaagatggagtggacttaatggagagttatgttgatagaactggagatgttcaaacagcaagttactgtatgttacagggttcacctttagatgttcttaaagatgaaagggttcagtactggattgagaattatagaaatttattagatgcctggaggttttggcataaacgagctgaatttgatattcacaggagtaagttggatcccagttccaagcctttagcacaagtttttgtgagttgcaatttctgtggcaagtcaatctcctacagctgttcagctgtgcctcatcagggcagaggttttagtcagtatggtgtgagtggctcaccaacgaaatctaaagtcacaagttgtcctggctgtcgaaaaccacttcctcgatgtgcgctttgtctcattaatatgggaacaccagtttctagctgtcctggaggaaccaaatcagatgaaaaagtggacttgagcaaggacaaaaaattagcccaatttaacaactggtttacatggtgtcataattgcaggcacggtggacatgctggacatatgcttagttggttcagggaccatgcagagtgccctgtgtctgcatgcacgtgtaaatgtatgcagttggatacaacggggaatctggtacctgcagagactgtccagccataaaatgttaccaccttaagagaacccttcaagtgtggagctttctagtaggtgtccttcatagctcagaaacatacctcagaacaagccattcatgacttacctgtaatgggaaaataaatcattctatcagatca

SEQ ID NO: 446956 - DNA, 3323 bp, Homo sapiens
cctaggaacccggggatccggcctgtggacccacgggcagggcctgcggggtgcaccggcgctttcgggcggaaggcggggcctcccggccagtgaccccgccccgaggcgcctcccgggcggggaagggcggggctcgcgctgggaaactccccttccaaggccgaggcgccgctccgcgtcctccaggcgtggtggtggggtcgtgggtcccagcccagtggtccaggtcacgggccgcacggccgcggccgccatcttgcccgcgtccgggctcctgcggcgggcggggcggtgtcccggccggaagcggctgtgcggcggccgcgctgccacctcagggaaatttggatatgtgcagtgcatctcctcgaagatgctgatggtggaaatttcttgaaaccgctctcgtaatttgccacgtgctgttgcaaatattctggtgaatgaacacagaatcagcatggctttcctttgctgagaaatcactgatgggaagtgagacttgttaaacttgaaagtgaatggacctgagtggaccctttgatcacatcagtaaacatgagcggtaccaaacctgatattttatgggcaccacaccatgttgatagatttgttgtgtgtgactcagaactaagtctttatcatgtggaatctactgtgaattcagaactcaaagctggatctttacgtttatctgaagactctgcagctacattactgtcaataaattcagatacaccctatatgaaatgtgttgcctggtatcttaattatgatcctgaatgtctgctggcagttggacaagcaaatggtcgagttgtacttacaagccttggtcaagatcataactcaaagttcaaagatttgataggaaaagagtttgttccaaaacatgcacgacaatgtaatacccttgcctggaatccactggatagtaactggctagctgctggtttagataagcacagagctgacttttcagtgctaatatgggatatctgcagcaaatatactcctgatatagttcccatggaaaaagtgaaactttcagcaggtgaaactgaaacaacattattagtaacaaaaccactttatgagttaggacagaatgatgcttgtctgtctctttgttggcttccacgagaccagaaacttctccttgctggtatgcatcgtaacctagctatatttgatcttcggaatacaagccaaaagatgttcgtaaatacaaaagctgttcagggtgtgacggtagacccatatttccacgatcgtgttgcttccttctatgaaggtcaggttgcaatatgggatcttagaaaatttgagaagccagttttgacattgactgagcaaccaaaacccttaacaaaagtagcatggtgtcccactaggactggtctacttgccactttaacaagggatagtaatattattagattgtatgatatgcagcatacacccactcccattggggatgaaactgaacccacaataattgaaagaagtgtgcaaccttgtgacaattacattgcttcctttgcgtggcatccaacaagtcaaaatcgaatgatagttgtaactcccaaccgaacaatgtcagacttcactgtttttgaaaggatatctcttgcctggagcccaattacatctttaatgtgggcttgtggtcgtcatttatatgaatgtacggaagaagaaaatgataattctttagaaaaagatatagcaacgaagatgcgtcttcgggctttatcaaggtatggacttgatacagagcaggtgtggaggaaccacattttagctggaaatgaagatccacagctcaagtcactctggtatactctgcactttatgaagcaatacacagaagatatggatcagaaatctccaggcaacaaaggatcattggtttatgcaggaattaaatcaattgtaaagtcatcgttgggaatggtggaaagcagcagacataattggagtgggttggataagcaaagtgatattcaaaatttaaatgaagagagaatcttagctttacagctttgtgggtggataaagaaaggaacggatgtagacgtggggccatttttgaactcccttgtacaagaaggggaatgggaaagagctgctgctgtggcattgttcaacttggatattcgccgagcaatccaaatcctgaatgaaggggcatcttctgaaaaaggagatctgaatctcaatgtggtagcaatggctttatcgggttatacggatgagaagaactccctttggagagaaatgtgtagcacactgcgattacagctaaataacccgtatttgtgtgtcatgtttgcatttctgacaagtgaaacaggatcttacgatggagttttgtatgaaaacaaagttgcagtacgtgacagagtggcatttgcttgtaaattccttagtgatactcagttaaatagatacatcgaaaagttgaccaatgaaatgaaagaggctggaaatttggaaggaattttgcttacaggccttactaaagatggagtggacttaatggagagttatgttgatagaactggagatgttcaaacagcaagttactgtatgttacagggttcacctttagatgttcttaaagatgaaagggttcagtactggattgagaattatagaaatttattagatgcctggaggttttggcataaacgagctgaatttgatattcacaggagtaagttggatcccagttccaagcctttagcacaagtttttgtgagttgcaatttctgtggcaagtcaatctcctacagctgttcagctgtgcctcatcagggcagaggttttagtcagtatggtgtgagtggctcaccaacgaaatctaaagtcacaagttgtcctggctgtcgaaaaccacttcctcgatgtgcgctttgtctcattaatatgggaacaccagtttctagctgtcctggaggaaccaaatcagatgaaaaagtggacttgagcaaggacaaaaaattagcccaatttaacaactggtttacatggtgtcataattgcaggcacggtggacatgctggacatatgcttagttggttcagggaccatgcagagtgccctgtgtctgcatgcacgtgtaaatgtatgcagttggatacaacggggaatctggtacctgcagagactgtccagccataaaatgttaccaccttaagagaacccttcaagtgtggagctttctagtaggtgtccttcatagctcagaaacatacctcagaacaagccattcatgacttacctgtaatgggaaaataaatcattctatcagatca

SEQ ID NO: 446957 - DNA, 3076 bp, Homo sapiens
aagcttgcggccgcgctgccacctcagtgaatggacctgagtggaccctttgatcacatcagtaaacatgagcggtaccaaacctgatattttatgggcaccacaccatgttgatagatttgttgtgtgtgactcagaactaagtctttatcatgtggaatctactgtgaattcagaactcaaagctggatctttacgtttatctgaagactctgcagctacattactgtcaataaattcagatacaccctatatgaaatgtgttgcctggtatcttaattatgatcctgaatgtctgctggcagttggacaagcaaatggtcgagttgtacttacaagccttggtcaagatcataactcaaagttcaaagatttgataggaaaagagtttgttccaaaacatgcacgacaatgtaatacccttgcctggaatccactggatagtaactggctagctgctggtttagataagcacagagctgacttttcagtgctaatatgggatatctgcagcaaatatactcctgatatagttcccatggaaaaagtgaaactttcagcaggtgaaactgaaacaacattattagtaacaaaaccactttatgagttaggacagaatgatgcttgtctgtctctttgttggcttccacgagaccagaaacttctccttgctggtatgcatcgtaacctagctatatttgatcttcggaatacaagccaaaagatgttcgtaaatacaaaagctgttcagggtgtgacggtagacccatatttccacgatcgtgttgcttccttctatgaaggtcaggttgcaatatgggatcttagaaaatttgagaagccagttttgacattgactgagcaaccaaaacccttaacaaaagtagcatggtgtcccactaggactggtctacttgccactttaacaagggatagtaatattattagattgtatgatatgcagcatacacccactcccattggggatgaaactgaacccacaataattgaaagaagtgtgcaaccttgtgacaattacattgcttcctttgcgtggcatccaacaagtcaaaatcgaatgatagttgtaactcccaaccgaacaatgtcagacttcactgtttttgaaaggatatctcttgcctggagcccaattacatctttaatgtgggcttgtggtcgtcatttatatgaatgtacggaagaagaaaatgataattctttagaaaaagatatagcaacgaagatgcgtcttcgggctttatcaaggtatggacttgatacagagcaggtgtggaggaaccacattttagctggaaatgaagatccacagctcaagtcactctggtatactctgcactttatgaagcaatacacagaagatatggatcagaaatctccaggcaacaaaggatcattggtttatgcaggaattaaatcaattgtaaagtcatcgttgggaatggtggaaagcagcagacataattggagtgggttggataagcaaagtgatattcaaaatttaaatgaagagagaatcttagctttacagctttgtgggtggataaagaaaggaacggatgtagacgtggggccatttttgaactcccttgtacaagaaggggaatgggaaagagctgctgctgtggcattgttcaacttggatattcgccgagcaatccaaatcctgaatgaaggggcatcttctgaaaaaggagatctgaatctcaatgtggtagcaatggctttatcgggttatacggatgagaagaactccctttggagagaaatgtgtagcacactgcgattacagctaaataacccgtatttgtgtgtcatgtttgcatttctgacaagtgaaacaggatcttacgatggagttttgtatgaaaacaaagttgcagtacgtgacagagtggcatttgcttgtaaattccttagtgatactcagttaaatagatacatcgaaaagttgaccaatgaaatgaaagaggctggaaatttggaaggaattttgcttacaggccttactaaagatggagtggacttaatggagagttatgttgatagaactggagatgttcaaacagcaagttactgtatgttacagggttcacctttagatgttcttaaagatgaaagggttcagtactggattgagaattatagaaatttattagatgcctggaggttttggcataaacgagctgaatttgatattcacaggagtaagttggatcccagttccaagcctttagcacaagtttttgtgagttgcaatttctgtggcaagtcaatctcctacagctgttcagctgtgcctcatcagggcagaggttttagtcagtatggtgtgagtggctcaccaacgaaatctaaagtcacaagttgtcctggctgtcgaaaaccacttcctcgatgtgcgctttgtctcattaatatgggaacaccagtttctagctgtcctggaggaaccaaatcagatgaaaaagtggacttgagcaaggacaaaaaattagcccaatttaacaactggtttacatggtgtcataattgcaggcacggtggacatgctggacatatgcttagttggttcagggaccatgcagagtgccctgtgtctgcatgcacgtgtaaatgtatgcagttggatacaacggggaatctggtacctgcagagactgtccagccataaaatgttaccaccttaagagaacccttcaagtgtggagctttctagtaggtgtccttcatagctcagaaacatacctcagaacaagccattcatgacttacctgtaatgggaaaataaatcattctatcagatcagcagttttgatgtttgagtgattttgatatgcttcacagagacaaatgctgccaaaataaacatcgaagtatagacatgagttctgttcagcaggttgaaaagtctgatttagaaaaactttctaagttttggttgaaattatgaacactctagaagcagaatttctggaagagccaagaacagactttgagcctatatcttcaaagctgaaactggatatctttcaataaaatatgtgcactttta

SEQ ID NO: 446958 - DNA, 4500 bp, Homo sapiens
  misc_feature (3441)..(3441): n is a, c, g, or t
  misc_feature (3508)..(3508): n is a, c, g, or t
  misc_feature (3602)..(3602): n is a, c, g, or t
cctaggaacccggggatccggcctgtggacccacgggcagggcctgcggggtgcaccggcgctttcgggcggaaggcggggcctcccggccagtgaccccgccccgaggcgcctcccgggcggggaagggcggggctcgcgctgggaaactccccttccaaggccgaggcgccgctccgcgtcctccaggcgtggtggtggggtcgtgggtcccagcccagtggtccaggtcacgggccgcacggccgcggccgccatcttgcccgcgtccgggctcctgcggcgggcggggcggtgtcccggccggaagcggctgtgcggcggccgcgctgccacctcaggtcagtgagcgcgacccggttcgcgtctcgactctcgggagcgccgcggccgcagcgaggggccggagatagcctagttgaaaggcccgggcgtctcggcggggagcgcgttccgcgctgtagggtaatcgcgccgggcggccggccggctggccgggcctcagcgggagccaccgggggctgcgggcggccgtgggacctgcggagacctcctcggggcgcagggaacacgctacagccttcgccgcggcgggcttgtggggagcggcgtcccagcctttcccgggaggctcagccaggtgcctggagcgggagagtcggactcagattcctgctttacctagaatagcaacgtgccctgttcccgttgtaccctcttaaatactatacttcttaaacggcctgtctcccgggaaatttggatatgtgcagtgcatctcctcgaagatgctgatggtggaaatttcttgaaaccgctctcgtaatttgccacgtgctgttgcaaatattctggtgaatgaacacagaatcagcatggctttcctttgctgagaaatcactgatgggaagtgagacttgttaaacttgaaagtgaatggacctgagtggaccctttgatcacatcagtaaacatgagcggtaccaaacctgatattttatgggcaccacaccatgttgatagatttgttgtgtgtgactcagaactaagtctttatcatgtggaatctactgtgaattcagaactcaaagctggatctttacgtttatctgaagactctgcagctacattactgtcaataaattcagatacaccctatatgaaatgtgttgcctggtatcttaattatgatcctgaatgtctgctggcagttggacaagcaaatggtcgagttgtacttacaagccttggtcaagatcataactcaaagttcaaagatttgataggaaaagagtttgttccaaaacatgcacgacaatgtaatacccttgcctggaatccactggatagtaactggctagctgctggtttagataagcacagagctgacttttcagtgctaatatgggatatctgcagcaaatatactcctgatatagttcccatggaaaaagtgaaactttcagcaggtgaaactgaaacaacattattagtaacaaaaccactttatgagttaggacagaatgatgcttgtctgtctctttgttggcttccacgagaccagaaacttctccttgctggtatgcatcgtaacctagctatatttgatcttcggaatacaagccaaaagatgttcgtaaatacaaaagctgttcagggtgtgacggtagacccatatttccacgatcgtgttgcttccttctatgaaggtcaggttgcaatatgggatcttagaaaatttgagaagccagttttgacattgactgagcaaccaaaacccttaacaaaagtagcatggtgtcccactaggactggtctacttgccactttaacaagggatagtaatattattagattgtatgatatgcagcatacacccactcccattggggatgaaactgaacccacaataattgaaagaagtgtgcaaccttgtgacaattacattgcttcctttgcgtggcatccaacaagtcaaaatcgaatgatagttgtaactcccaaccgaacaatgtcagacttcactgtttttgaaaggatatctcttgcctggagcccaattacatctttaatgtgggcttgtggtcgtcatttatatgaatgtacggaagaagaaaatgataattctttagaaaaagatatagcaacgaagatgcgtcttcgggctttatcaaggtatggacttgatacagagcaggtgtggaggaaccacattttagctggaggaaccaaatcagatgaaaaagtggacttgagcaaggacaaaaaattagcccaatttaacaactggtttacatggtgtcataattgcaggcacggtggacatgctggacatatgcttagttggttcagggaccatgcagagtgccctgtgtctgcatgcacgtgtaaatgtatgcagttggatacaacggggaatctggtacctgcagagactgtccagccataaaatgttaccaccttaagagaacccttcaagtgtggagctttctagtaggtgtccttcatagctcagaaacatacctcagaacaagccattcatgacttacctgtaatgggaaaataaatcattctatcagatcagcagttttgatgtttgagtgattttgatatgcttcacagagacaaatgctgccaaaataaacatcgaagtatagacatgagttctgttcagcaggttgaaaagtctgatttagaaaaactttctaagttttggttgaaattatgaacactctagaagcagaatttctggaagagccaagaacagactttgagcctatatcttcaaagctgaaactggatatctttcaataaaatatgtgcacttttaaaataaaatgactaattctgtgattcagacaatagttttaagttcagctgtgcttagatttctttcagattaatttaaaattatagatttttacttttagaattgcagagcccctatcccacactggagaatattttttattactgtctgttatatatgtgtctatgtgtgtgtgtatatttatgtgtgtatgtataaatatgtactttttaaaggagccttttccctcctttgattttaagataagcaatcttttggcataacattatcgtcttcctagaaaagccaagatgaagaatctatcttacaactttttctcttcagtagagaaaaacatgtaccatttcagggtgaacatacaaaattttcactttctaccttttgccttccaatgtcctgatttgtcttcaaaggtttttctccatattaatttgtcatcttatcctcatcacctgagaacattttactgcatacaaagtctatgcaagattatatgtaactagccatttagtataatctatgtcagtgtttctgtgctgtcaaattccgtcctgatttggaataccataccttgttctttccaaggtagactaggaagtgttggggaaatngggtcacttcagagaccattttagatgtaagtttttaaatgtaagtgttactggggctaagtcaggnactttatttaaaacatttttttttctcatttcatagctagatagttgtaagagaaatacaaagaatttacaagatgcttctctgtcatctgccntatgcagagggactgaactaggaattttgtagttgaagctgtgttcataaagagtaaatcttattttatagattttggagaaataaaacaagaattttaagagctttcgtattagcagttttgccttataaaaactaagatttgtcagattagtttgaggtgtaacctaaatattaaaagtagattaaatttattttttaccttgagtgtctgatacataaaacccttttctaggaaaacattggaagtagtacatatttactctaaatgtctcacctgcatgacagtcttttcaaatgaaagacatggtaattgcaatttttttttaaagattgctattaagggtactttttccagccttcatttgagtaaatcttaattgatttcattttattaacatataccctttacctttaatatttcatttgaagtgttcctttcaaacttactgtcttaaatatgaaagtcagctttaagtaatgtcagactcatatgcattttcattctcattagctaaagtaaaatgtaaaattatctcaaatagttacaagttttggaaatacagtataaaacatgaatgtaaagtctattatgtaatatgcttatttgtaatcctaatatatgagggtgacatttttaagattgtatgtatgtgtcaacctcttaaatgttttctgtgaagcccaaacatgcagtttatgtctctggtgtctgttttgcatttcagtgtgcgtggacaatcaaattattttctcatttttatcactaagtcactggtatttgggtttataaactcaacaagatactttacctaaacatgatcaatagatgtgtttattaaaagtgtttttattatttttaaaagattgaataaatctgggttgaagtcattgtatct

SEQ ID NO: 446959 - DNA, 7652 bp, Homo sapiens
aagcggcctgtatagatacaggagcaggaactctaggacagccctgagtgaagaggaggaggaagaacgggagttcagaaaacagttccccctgcatgaaaaggactttgcagatattttggtgcagccaacgttggaggagaacaaaggaacttcagatgggcaagaagaggaagcaggcacaaacccagctctcctctcccagaattcaatgcaggcagtaatgctgatacaccagcaattgtgtctcaactttgctcgatccctctggtatcaacagactctgccgccacatgaagcaaagcattacctcagcctgtttctgtcttgctatcagactggggcatcgcttgtgacacacttctaccccctgatgggagttgaactgaatgaccgactcttgggcagccaacttttggcctgtaccctctcccataacactctttttggggaggcaccctcagacctgatggtgaaacctgatgggccctatgacttctaccagcatcccaatgttccagaagcacggcagtgtcaacctgtgcttcaaggtttctcagaggctgtcagtcacttgctacaggactggccagaacacccagcgcttgaacagctcctggttgtaatggacagaattcgtagtttcccactttccagtcccatctcaaagttcctgaatggcttagagatccttctggcaaaggcacaggattgggaggaaaatgcaagtcgagctttgtctttgcggaaacatcttgatttgatcagtcagatgatcattcggtggcgtaaactggagctgaactgctggtccatgagtttggataatactatgaagcgccacaccgagaaatccaccaagcactggttctccatctatcagatgcttgagaagcacatgcaggaacaaacagaagaacaggaagatgacaaacagatgaccttgatgttgctggtcagcacattacaagcatttattgaaggatcctcgctgggagagttccatgtgcgacttcagatgttactggttttccattgtcatgtcttgctgatgccacaggttgaaggaaaggattcactttgcagtgttctatggaatttgtaccattattacaagcaattctttgaccgggtccaggccaaaattgtggaacttcgttcccccctagaaaaagaacttaaagaatttgttaagatttccaagtggaatgatgtcagcttctggtccattaagcaatctgtagaaaagacacacaggacactctttaaattcatgaagaaatttgaagcagtcctgagtgaaccctgccggtcatccctggtggagagtgacaaggaagaacagcctgactttttgcccaggccaacagatggagctgcaagtgaactgtcttccattcagaatctgaacagggcactgagggagaccctgttagcccaaccagcagctgggcaggccacaattccagagtggtgtcagggcgctgctccttccggcttggaaggggagcttctgcgtcgcttgccaaagctcaggaaacgcatgaggaagatgtgcctgacgttcatgaaggagagccccctgcctcgccttgtggagggccttgatcagttcacaggtgaagtgatttcctctgtgagtgagctgcagagcttaaaggtggaaccctctgcagagaaggagaagcagcggtcagaagccaagcacattctcatgcaaaaacagcgagctttgtcagacctctttaaacaccttgcaaaaattggtttgtcgtatcgcaaaggtcttgcttgggcccgttcaaaaaaccctcaagagatgcttcatcttcacccattagatctccagagcgcattgtccatcgtcagcagcactcaggaggctgattctaggctgcttacagaaatctcgtcttcatgggatggatgccagaagtatttttatcgctctcttgcacggcatgccaggcttaacgcagcactagcaactcctgccaaggaaatgggcatgggcaacgtggagaggtgcagagggttctcagcacatttgatgaagatgctcgtccgacagcggcgctccctgaccacgctcagtgagcagtggatcatcctcaggaacctcctcagctgtgtgcaagagattcacagcaggctgatggggccccaggcctaccccgtggccttcccccctcaggatggcgtgcagcagtggacagagcgcctgcagcacctggccatgcagtgccagatcctgcttgagcagctctcctggctcctccagtgctgccccagtgtagggccagctccaggccatggcaatgtccaggtactggggcagcctcctggcccctgcctggaaggaccagaacttagcaagggacaactttgtggagtagtgctggacctaattccttccaatctgagctacccatctccaatacctggaagtcagctgccctctggttgccggatgcggaaacaggatcacctttggcaacagtcaactacgagattaacagagatgctaaaaaccattaaaacagtgaaagctgacgtcgacaaaattagacagcagtcttgtgagactctctttcattcttggaaagattttgaagtttgctcttctgcgctgagttgcttgtcccaggtgtcagttcatttgcagggcctagagtccttgttcattcttccagggatggaggttgagcaaagagactcacaaatggcactagttgaaagtctggaatatgtaagaggagaaattagtaaagccatggctgactttactacctggaagacccatctgcttacttcagatagccaaggaggaaatcaaatgttggacgaaggatttgtggaagatttttcagagcaaatggaaattgccatccgagccatcctctgtgccatccagaacttagaagaaagaaagaatgaaaaagcagaggagaacactgaccaagcaagcccacaagaagattatgcaggctttgagagactgcaatcaggacatctaacaaaactcttagaggatgacttctgggccgatgtgagcactttgcacgtgcagaaaataatttctgccatctccgagctgttggagaggctgaaatcgtacggtgaggatggcacagcagcaaagcacctgttcttcagccaatcctgttccttgctggtgcgcctggtgccggtcctctccagctactcagacctcgtcctcttcttcctgaccatgtctttagcaactcaccgtagtactgcaaagctgctctctgtgcttgcccaggtctttacagagcttgcccagaagggattttgcttgcccaaagaatttatggaagattcagctggagagggagcaactgagttccatgactatgagggaggtggaattggagaaggcgagggcatgaaggatgtgagtgaccagatcggaaatgaagaacaggtggaagatacatttcagaagggtcaagaaaaagacaaagaggatcctgattcaaaatctgatattaagggcgaggataatgccattgagatgtcggaagattttgatgggaaaatgcatgatggggagcttgaagaacaagaagaggatgatgagaaatcagatagtgagggcggagacctggataaacacatgggcgatctcaatggtgaggaagctgacaaactagatgagaggctttggggtgatgatgatgaggaggaagatgaggaggaagaagacaataaaactgaagaaacaggaccaggaatggatgaggaagattctgaacttgttgctaaagatgacaacttggatagtggcaattcaaacaaagataaaagccagcaagataagaaggaagaaaaggaagaagcagaagctgatgatggtggacaaggtgaagacaaaattaatgaacaaatagatgagagggactatgatgaaaatgaggtggacccttaccatggcaatcaggaaaaggtgccagaacccgaggctttggaccttccagatgacttgaaccttgacagtgaagacaagaatggtggtgaggacaccgacaatgaagaaggagaagaagagaatcctttggagataaaagaaaaaccagaagaagcaggtcatgaagctgaggaaagaggagagaccgagaccgaccagaacgaaagtcagagtccacaggagcctgaggaaggccccagtgaagatgacaaggcagaaggggaagaggaaatggacacaggagctgatgaccaagatggagatgctgctcagcatcctgaagaacactctgaggagcagcagcagtctgtggaggaaaaagacaaggaagccgatgaagaaggtggagagaatggccctgctgaccaaggtttccagccccaggaggaagaagaacgggaggactctgatacagaggagcaggtgccagaggctttggagaggaaggagcatgcctcctgtgggcagactggtgtggagaacatgcagaacacacaggccatggagctggctggggccgcacctgagaaggagcaggggaaagaggaacacggaagtggagctgcagatgcaaaccaggcagaaggccatgaatcgaatttcattgcccagttggcctcccagaagcacaccaggaaaaacacacagagttttaagaggaaacctgggcaggctgacaatgaacgttccatgggtgatcacaatgagcgtgtgcacaagaggctgaggactgtggatacggacagccatgccgagcaggggccagctcagcagccccaggcccaggtggaggatgcagatgcattcgagcacattaaacaaggcagtgacgcatacgatgcacagacctatgatgtggccagcaaagaacagcaacagtctgcaaaagactctggcaaagatcaggaagaggaggagatagaggacacccttatggacacagaggagcaggaggagttcaaagcagcagacgtggagcagctgaagccagaggaaatcaagtcgggcaccacagcacccttgggctttgatgagatggaagtggagatccaaactgttaaaacagaggaagaccaagaccccagaacagacaaagcccataaggagacagaaaatgagaaaccagaaagaagccgagagtctaccattcatacagctcatcaattcctcatggacacgatcttccagccctttttaaaagatgtcaatgagctaagacaggagctggagagacagctggaaatgtggcagccacgtgaatctggaaacccagaggaggagaaggttgcagctgagatgtggcagagttacctgatcttaacagcgcctctttcacaacggttatgtgaagagcttcgtctcatattagagcctacccaggcagccaagctgaaaggagactatcgaactgggaaacgactaaacatacggaaagtcattccatacattgctagtcaatttcggaaagacaagatttggcttcgaaggaccaagcccagtaaacgccagtatcagatttgtttggctatcgatgactcttctagtatggtagacaatcataccaagcagcttgcatttgaatctttggctgtgattggaaatgctctaaccctcctggaagtgggtcagattgcagtgtgtagttttggagaatctgtaaagctgttacacccatttcatgagcagttcagtgattactctgggtcccagattctacgtctctgcaaattccaacaaaagaaaaccaagattgctcagtttctagagtctgttgccaacatgtttgcagctgctcagcagctctcgcagaacatcagttcagaaactgcacaactcctcctggtagtctctgatgggcgaggccttttccttgagggcaaagaaagagtcctggcagcagttcaggctgcccggaatgcaaatatctttgtcatctttgttgtattggacaatcccagttcacgggattctatcttggacattaaagtaccgatatttaaaggacctggagagatgcctgaaatccgatcctacatggaagagttcccattcccatactatatcattcttcgagatgtaaacgcacttcctgagacactcagcgatgccctcagacagtggtttgagttggtgacagcctctgaccacccatagaacagaaagaagagtccaaagtgagacttaactgtggtcagaaggtcacattgcttacccaggtgctcccttttggacaactacaaaaaattttattgtaatatttttattttacaacgtgatcttacagcctacagaatgctctctggctcccggctttgcctgggctgaggtttttataccaaacctggaagcagcagcaggtgcctgaactcgtaactagagaagagttatccttcttccctgccttggaagccctggcctgggaggaggtcataccccaccgttggagcccagctgcctgttttcttttgcaggggatctgggcacctgtgccttgaggagatgctgccaggagcatgggactctgacagtcctttgtataaaggactaaagggagctgcccttttgaccctgttctaagctctgccttgccaagcccatagtgtgtgcccaaaagctgtcaagtggccaagacagctcgtttctggagagtatgagggtgtgttttcttattgtgaaaggaactaccttctcttagagggtaggaagaatgtggtgtgtgtgtgttctcataaagcaactggacattataggtgcccaggtcatctataaaaacgatccttgggctgtgtaaaaatgaagtggcttttcagtatcctctttcacacttgctgcttcgggagactatgcaatgatgggaaggtgattgcccctttatttcattcagtgccatggtccctgttgttgtagtaatttatttgtttagttcatttttttttttcttaacagtcaaggggaagagtgattcctcacactgctttcaagctggactgagccagtctcattctgggaaagaaacgctgtgtccagaactcagcagctccatctattttttccagtcgaaagaaactgatctttaggcagtttttacttggccagaaagcagtgctgaatacttgaaactgtgtgctctgttctacttaatgttctgtcagaatgttcttttgtaggcagtatgtcatgatgtaatcatctatctccttgtctgtttccaagttacactgtgaagtctgcgacccttttgaggtggtcatcaaagacacagattccttgtttaaccaagtgtcccaaagcatgtacctgaagttatatcattttttattctaaaaagctatgcagcttatattctgaaaactattaaaacatataccactgttgttgatgtaatttgtgactcttcttaatggaagatgacaggattgtaaaaggtatgctaggggactgatcttctctgctggatcagtcagtcagctgttactagttgatgctgtgctaacatgatcccctcctacttccatgttgctcttactacaaaggttatcatttgcatttatgtccatggtaggctgagctataatatgctggctttgcagcagaatgaaaaggatgagttggtgtagccttataaggaggcttataaaaataaattatcctccataaatga

SEQ ID NO: 446960 - DNA, 501 bp, Homo sapiens
acatagctggttgatgatgaagcctggtttctaattgaggtctgtcctgtctttggagtgagacataatattcctgcaaagaactaagcagccttacaaaggcccctgagaggttaacataaggtctgtacctagacactcctgtttctgcctgtaggccaggccttagttacggtgagttccagggcaggcaggtaggcaggagtgattatatgactgagaataaaggacagcagtgagagaagttgtattcaatgcagcacagtaaccagggacttgtaatagcttctttcacctcattcttttgtggcttggatttcctaggaacacggaagtggagctgcagatgcaaaccaggcagaaggccatgaatcgaatttcattgcccagttggcctcccagaagcacaccaggaaaaacacacaggtttctatcactcctcagctaaacttaggtgaaggcagcatgtagaaaaagatgttccaaacgtagtgctttaaa

SEQ ID NO: 446961 - DNA, 4757 bp, Homo sapiens
ccccgcgtccgcccacgcgtccgcaaagagactttcaactagtgccatttgtgagtctctttgctcaacctccatccctggaagaatgaacaaagagactcacaaatggcactagttgaaagtctggaatatgtaagaggagaaattagtaaagccatggctgactttactacctggaagacccatctgcttacttcagatagccaaggaggaaatcaaatgttggacgaaggatttgtggaagatttttcagagcaaatggaaattgccatccgagccatcctctgtgccatccagaacttagaagaaagaaagaatgaaaaagcagaggagaacactgaccaagcaagcccacaagaagattatgcaggctttgagagactgcaatcaggacatctaacaaaactcttagaggatgacttctgggccgatgtgagcactttgcacgtgcagaaaataatttctgccatctccgagctgttggagaggctgaaatcgtacggtgaggatggcacagcagcaaagcacctgttcttcagccaatcctgttccttgctggtgcgcctggtgccggtcctctccagctactcagacctcgtcctcttcttcctgaccatgtctttagcaactcaccgtagtactgcaaagctgctctctgtgcttgcccaggtctttacagagcttgcccagaagggattttgcttgcccaaagaatttatggaagattcagctggagagggagcaactgagttccatgactatgagggaggtggaattggagaaggcgagggcatgaaggatgtgagtgaccagatcggaaatgaagaacaggtggaagatacatttcagaagggtcaagaaaaagacaaagaggatcctgattcaaaatctgatattaagggcgaggataatgccattgagatgtcggaagattttgatgggaaaatgcatgatggggagcttgaagaacaagaagaggatgatgagaaatcagatagtgagggcggagacctggataaacacatgggcgatctcaatggtgaggaagctgacaaactagatgagaggctttggggtgatgatgatgaggaggaagatgaggaggaagaagacaataaaactgaagaaacaggaccaggaatggatgaggaagattctgaacttgttgctaaagatgacaacttggatagtggcaattcaaacaaagataaaagccagcaagataagaaggaagaaaaggaagaagcagaagctgatgatggtggacaaggtgaagacaaaattaatgaacaaatagatgagagggactatgatgaaaatgaggtggacccttaccatggcaatcaggaaaaggtgccagaacccgaggctttggaccttccagatgacttgaaccttgacagtgaagacaagaatggtggtgaggacaccgacaatgaagaaggagaagaagagaatcctttggagataaaagaaaaaccagaagaagcaggtcatgaagctgaggaaagaggagagaccgagaccgaccagaacgaaagtcagagtccacaggagcctgaggaaggccccagtgaagatgacaaggcagaaggggaagaggaaatggacacaggagctgatgaccaagatggagatgctgctcagcatcctgaagaacactctgaggagcagcagcagtctgtggaggaaaaagacaaggaagccgatgaagaaggtggagagaatggccctgctgaccaaggtttccagccccaggaggaagaagaacgggaggactctgatacagaggagcaggtgccagaggctttggagaggaaggagcatgcctcctgtgggcagactggtgtggagaacatgcagaacacacaggccatggagctggctggggccgcacctgagaaggagcaggggaaagaggaacacggaagtggagctgcagatgcaaaccaggcagaaggccatgaatcgaatttcattgcccagttggcctcccagaagcacaccaggaaaaacacacagagttttaagaggaaacctgggcaggctgacaatgaacgttccatgggtgatcacaatgagcgtgtgcacaagaggctgaggactgtggatacggacagccatgccgagcaggggccagctcagcagccccaggcccaggtggaggatgcagatgcattcgagcacattaaacaaggcagtgacgcatacgatgcacagacctatgatgtggccagcaaagaacagcaacagtctgcaaaagactctggcaaagatcaggaagaggaggagatagaggacacccttatggacacagaggagcaggaggagttcaaagcagcagacgtggagcagctgaagccagaggaaatcaagtcgggcaccacagcacccttgggctttgatgagatggaagtggagatccaaactgttaaaacagaggaagaccaagaccccagaacagacaaagcccataaggagacagaaaatgagaaaccagaaagaagccgagagtctaccattcatacagctcatcaattcctcatggacacgatcttccagccctttttaaaagatgtcaatgagctaagacaggagctggagagacagctggaaatgtggcagccacgtgaatctggaaacccagaggaggagaaggttgcagctgagatgtggcagagttacctgatcttaacagcgcctctttcacaacggttatgtgaagagcttcgtctcatattagagcctacccaggcagccaagctgaaaggagactatcgaactgggaaacgactaaacatacggaaagtcattccatacattgctagtcaatttcggaaagacaagatttggcttcgaaggaccaagcccagtaaacgccagtatcagatttgtttggctatcgatgactcttctagtatggtagacaatcataccaagcagcttgcatttgaatctttggctgtgattggaaatgctctaaccctcctggaagtgggtcagattgcagtgtgtagttttggagaatctgtaaagctgttacacccatttcatgagcagttcagtgattactctgggtcccagattctacgtctctgcaaattccaacaaaagaaaaccaagattgctcagtttctagagtctgttgccaacatgtttgcagctgctcagcagctctcgcagaacatcagttcagaaactgcacaactcctcctggtagtctctgatgggcgaggccttttccttgagggcaaagaaagagtcctggcagcagttcaggctgcccggaatgcaaatatctttgtcatctttgttgtattggacaatcccagttcacgggattctatcttggacattaaagtaccgatatttaaaggacctggagagatgcctgaaatccgatcctacatggaagagttcccattcccatactatatcattcttcgagatgtaaacgcacttcctgagacactcagcgatgccctcagacagtggtttgagttggtgacagcctctgaccacccatagaacagaaagaagagtccaaagtgagacttaactgtggtcagaaggtcacattgcttacccaggtgctcccttttggacaactacaaaaaattttattgtaatatttttattttacaacgtgatcttacagcctacagaatgctctctggctcccggctttgcctgggctgaggtttttataccaaacctggaagcagcagcaggtgcctgaactcgtaactagagaagagttatccttcttccctgccttggaagccctggcctgggaggaggtcataccccaccgttggagcccagctgcctgttttcttttgcaggggatctgggcacctgtgccttgaggagatgctgccaggagcatgggactctgacagtcctttgtataaaggactaaagggagctgcccttttgaccctgttctaagctctgccttgccaagcccatagtgtgtgcccaaaagctgtcaagtggccaagacagctcgtttctggagagtatgagggtgtgttttcttattgtgaaaggaactaccttctcttagagggtaggaagaatgtggtgtgtgtgtgttctcataaagcaactggacattataggtgcccaggtcatctataaaaacgatccttgggctgtgtaaaaatgaagtggcttttcagtatcctctttcacacttgctgcttcgggagactatgcaatgatgggaaggtgattgcccctttatttcattcagtgccatggtccctgttgttgtagtaatttatttgtttagttcatttttttttttcttaacagtcaaggggaagagtgattcctcacactgctttcaagctggactgagccagtctcattctgggaaagaaacgctgtgtccagaactcagcagctccatctattttttccagtcgaaagaaactgatctttaggcagtttttacttggccagaaagcagtgctgaatacttgaaactgtgtgctctgttctacttaatgttctgtcagaatgttcttttgtaggcagtatgtcatgatgtaatcatctatctccttgtctgtttccaagttacactgtgaagtctgcgacccttttgaggtggtcatcaaagacacagattccttgtttaaccaagtgtcccaaagcatgtacctgaagttatatcattttttattctaaaaagctatgcagcttatattctgaaaactattaaaacatataccactgttgttgatgta

SEQ ID NO: 446962 - DNA, 7557 bp, Homo sapiens
aagcggcctgtatagatacaggagcaggaactctaggacagccctgagtgaagaggaggaggaagaacgggagttcagaaaacagttccccctgcatgaaaaggactttgcagatattttggtgcagccaacgttggaggagaacaaaggaacttcagatgggcaagaagaggaagcaggcacaaacccagctctcctctcccagaattcaatgcaggcagtaatgctgatacaccagcaattgtgtctcaactttgctcgatccctctggtatcaacagactctgccgccacatgaagcaaagcattacctcagcctgtttctgtcttgctatcagactggggcatcgcttgtgacacacttctaccccctgatgggagttgaactgaatgaccgactcttgggcagccaacttttggcctgtaccctctcccataacactctttttggggaggcaccctcagacctgatggtgaaacctgatgggccctatgacttctaccagcatcccaatgttccagaagcacggcagtgtcaacctgtgcttcaaggtttctcagaggctgtcagtcacttgctacaggactggccagaacacccagcgcttgaacagctcctggttgtaatggacagaattcgtagtttcccactttccagtcccatctcaaagttcctgaatggcttagagatccttctggcaaaggcacaggattgggaggaaaatgcaagtcgagctttgtctttgcggaaacatcttgatttgatcagtcagatgatcattcggtggcgtaaactggagctgaactgctggtccatgagtttggataatactatgaagcgccacaccgagaaatccaccaagcactggttctccatctatcagatgcttgagaagcacatgcaggaacaaacagaagaacaggaagatgacaaacagatgaccttgatgttgctggtcagcacattacaagcatttattgaaggatcctcgctgggagagttccatgtgcgacttcagatgttactggttttccattgtcatgtcttgctgatgccacaggttgaaggaaaggattcactttgcagtgttctatggaatttgtaccattattacaagcaattctttgaccgggtccaggccaaaattgtggaacttcgttcccccctagaaaaagaacttaaagaatttgttaagatttccaagtggaatgatgtcagcttctggtccattaagcaatctgtagaaaagacacacaggacactctttaaattcatgaagaaatttgaagcagtcctgagtgaaccctgccggtcatccctggtggagagtgacaaggaagaacagcctgactttttgcccaggccaacagatggagctgcaagtgaactgtcttccattcagaatctgaacagggcactgagggagaccctgttagcccaaccagcagctgggcaggccacaattccagagtggtgtcagggcgctgctccttccggcttggaaggggagcttctgcgtcgcttgccaaagctcaggaaacgcatgaggaagatgtgcctgacgttcatgaaggagagccccctgcctcgccttgtggagggccttgatcagttcacaggtgaagtgatttcctctgtgagtgagctgcagagcttaaaggtggaaccctctgcagagaaggagaagcagcggtcagaagccaagcacattctcatgcaaaaacagcgagctttgtcagacctctttaaacaccttgcaaaaattggtttgtcgtatcgcaaaggtcttgcttgggcccgttcaaaaaaccctcaagagatgcttcatcttcacccattagatctccagagcgcattgtccatcgtcagcagcactcaggaggctgattctaggctgcttacagaaatctcgtcttcatgggatggatgccagaagtatttttatcgctctcttgcacggcatgccaggcttaacgcagcactagcaactcctgccaaggaaatgggcatgggcaacgtggagaggtgcagagggttctcagcacatttgatgaagatgctcgtccgacagcggcgctccctgaccacgctcagtgagcagtggatcatcctcaggaacctcctcagctgtgtgcaagagattcacagcaggctgatggggccccaggcctaccccgtggccttcccccctcaggatggcgtgcagcagtggacagagcgcctgcagcacctggccatgcagtgccagatcctgcttgagcagctctcctggctcctccagtgctgccccagtgtagggccagctccaggccatggcaatgtccaggtactggggcagcctcctggcccctgcctggaaggaccagaacttagcaagggacaactttgtggagtagtgctggacctaattccttccaatctgagctacccatctccaatacctggaagtcagctgccctctggttgccggatgcggaaacaggatcacctttggcaacagtcaactacgagattaacagagatgctaaaaaccattaaaacagtgaaagctgacgtcgacaaaattagacagcagtcttgtgagactctctttcattcttggaaagattttgaagtttgctcttctgcgctgagttgcttgtcccaggtgtcagttcatttgcagggcctagagtccttgttcattcttccagggatggaggttgagcaaagagactcacaaatggcactagttgaaagtctggaatatgtaagaggagaaattagtaaagccatggctgactttactacctggaagacccatctgcttacttcagatagccaaggaggaaatcaaatgttggacgaaggatttgtggaagatttttcagagcaaatggaaattgccatccgagccatcctctgtgccatccagaacttagaagaaagaaagaatgaaaaagcagaggagaacactgaccaagcaagcccacaagaagattatggtatgtctgaaatcaggcagaaattagtttcatgcctgatttaatttttgtatttgatgatttatttctgtggctaaatagttaaggatggatgttagaaacagataactgcatggatagagataaaaggatttgttttctgttattcatcatgttgttattttctctgaatgaatgaggcagcaggctttgagagactgcaatcaggacatctaacaaaactcttagaggatgacttctgggccgatgtgagcactttgcacgtgcagaaaataatttctgccatctccgagctgttggagaggctgaaatcgtacggtgaggatggcacagcagcaaagcacctgttcttcagccaatcctgttccttgctggtgcgcctggtgccggtcctctccagctactcagacctcgtcctcttcttcctgaccatgtctttagcaactcaccgtagtactgcaaagctgctctctgtgcttgcccaggtctttacagagcttgcccagaagggattttgcttgcccaaagaatttatggaagattcagctggagagggagcaactgagttccatgactatgagggaggtggaattggagaaggcgagggcatgaaggatgtgagtgaccagatcggaaatgaagaacaggtggaagatacatttcagaagggtcaagaaaaagacaaagaggatcctgattcaaaatctgatattaagggcgaggataatgccattgagatgtcggaagattttgatgggaaaatgcatgatggggagcttgaagaacaagaagaggatgatgagaaatcagatagtgagggcggagacctggataaacacatgggcgatctcaatggtgaggaagctgacaaactagatgagaggctttggggtgatgatgatgaggaggaagatgaggaggaagaagacaataaaactgaagaaacaggaccaggaatggatgaggaagattctgaacttgttgctaaagatgacaacttggatagtggcaattcaaacaaagataaaagccagcaagataagaaggaagaaaaggaagaagcagaagctgatgatggtggacaaggtgaagacaaaattaatgaacaaatagatgagagggactatgatgaaaatgaggtggacccttaccatggcaatcaggaaaaggtgccagaacccgaggctttggaccttccagatgacttgaaccttgacagtgaagacaagaatggtggtgaggacaccgacaatgaagaaggagaagaagagaatcctttggagataaaagaaaaaccagaagaagcaggtcatgaagctgaggaaagaggagagaccgagaccgaccagaacgaaagtcagagtccacaggagcctgaggaaggccccagtgaagatgacaaggcagaaggggaagaggaaatggacacaggagctgatgaccaagatggagatgctgctcagcatcctgaagaacactctgaggagcagcagcagtctgtggaggaaaaagacaaggaagccgatgaagaaggtggagagaatggccctgctgaccaaggtttccagccccaggaggaagaagaacgggaggactctgatacagaggagcaggtgccagaggctttggagaggaaggagcatgcctcctgtgggcagactggtgtggagaacatgcagaacacacaggccatggagctggctggggccgcacctgagaaggagcaggggaaagaggaacacggaagtggagctgcagatgcaaaccaggcagaaggccatgaatcgaatttcattgcccagttggcctcccagaagcacaccaggaaaaacacacagagttttaagaggaaacctgggcaggctgacaatgaacgttccatgggtgatcacaatgagcgtgtgcacaagaggctgaggactgtggatacggacagccatgccgagcaggggccagctcagcagccccaggcccaggtggaggatgcagatgcattcgagcacattaaacaaggcagtgacgcatacgatgcacagacctatgatgtggccagcaaagaacagcaacagtctgcaaaagactctggcaaagatcaggaagaggaggagatagaggacacccttatggacacagaggagcaggaggagttcaaagcagcagacgtggagcagctgaagccagaggaaatcaagtcgggcaccacagcacccttgggctttgatgagatggaagtggagatccaaactgttaaaacagaggaagaccaagaccccagaacagacaaagcccataaggagacagaaaatgagaaaccagaaagaagccgagagtctaccattcatacagctcatcaattcctcatggacacgatcttccagccctttttaaaagatgtcaatgagctaagacaggagctggagagacagctggaaatgtggcagccacgtgaatctggaaacccagaggaggagaaggttgcagctgagatgtggcagagttacctgatcttaacagcgcctctttcacaacggttatgtgaagagcttcgtctcatattagagcctacccaggcagccaagctgaaaggagactatcgaactgggaaacgactaaacatacggaaagtcattccatacattgctagtcaatttcggaaagacaagatttggcttcgaaggaccaagcccagtaaacgccagtatcagatttgtttggctatcgatgactcttctagtatggtagacaatcataccaagcagcttgcatttgaatctttggctgtgattggaaatgctctaaccctcctggaagtgggtcagattgcagtgtgtagttttggagaatctgtaaagctgttacacccatttcatgagcagttcagtgattactctgggtcccagattctacgtctctgcaaattccaacaaaagaaaaccaagattgctcagtttctagagtctgttgccaacatgtttgcagctgctcagcagctctcgcagaacatcagttcagaaactgcacaactcctcctggtagtctctgatgggcgaggccttttccttgagggcaaagaaagagtcctggcagcagttcaggctgcccggaatgcaaatatctttgtcatctttgttgtattggacaatcccagttcacgggattctatcttggacattaaagtaccgatatttaaaggacctggagagatgcctgaaatccgatcctacatggaagagttcccattcccatactatatcattcttcgagatgtaaacgcacttcctgagacactcagcgatgccctcagacagtggtttgagttggtgacagcctctgaccacccatagaacagaaagaagagtccaaagtgagacttaactgtggtcagaaggtcacattgcttacccaggtgctcccttttggacaactacaaaaaattttattgtaatatttttattttacaacgtgatcttacagcctacagaatgctctctggctcccggctttgcctgggctgaggtttttataccaaacctggaagcagcagcaggtgcctgaactcgtaactagagaagagttatccttcttccctgccttggaagccctggcctgggaggaggtcataccccaccgttggagcccagctgcctgttttcttttgcaggggatctgggcacctgtgccttgaggagatgctgccaggagcatgggactctgacagtcctttgtataaaggactaaagggagctgcccttttgaccctgttctaagctctgccttgccaagcccatagtgtgtgcccaaaagctgtcaagtggccaagacagctcgtttctggagagtatgagggtgtgttttcttattgtgaaaggaactaccttctcttagagggtaggaagaatgtggtgtgtgtgtgttctcataaagcaactggacattataggtgcccaggtcatctataaaaacgatccttgggctgtgtaaaaatgaagtggcttttcagtatcctctttcacacttgctgcttcgggagactatgcaatgatgggaaggtgattgcccctttatttcattcagtgccatggtccctgttgttgtagtaatttatttgtttagttcatttttttttttcttaacagtcaaggggaagagtgattcctcacactgctttcaagctggactgagccagtctcattctgggaaagaaacgctgtgtccagaactcagcagctccatctattttttccagtcgaaagaaactgatctttaggcagtttttacttggccagaaagcagtgctgaatacttgaaactgtgtgctctgttctacttaatgttctgtcagaatgttcttttgtaggcagtatgtcatgatgtaatcatctatctccttgtctgtttccaagttacactgtgaagtctgcgacccttttgaggtggtcatcaaagacacagattccttgtttaaccaagtgtcccaaagcatgtacctgaagttatatcattttttattctaaaaagctatgcagcttatattctgaaaactattaaaacatataccactgttgttgatgta

SEQ ID NO: 446963 - DNA, 3771 bp, Homo sapiens
actacatacttcgtgactacatacttccgtgactacatacttccggataacatacttccgactacatacttccgactacatacttccgactacatacttccgactacatacttctgactacatacttccgactacatacttccgaggaccaggaatggatgaggaagattctgaacttgttgctaaagatgacaacttggatagtggcaattcaaacaaagataaaagccagcaagataagaaggaagaaaaggaagaagcagaagctgatgatggtggacaaggtgaagacaaaattaatgaacaaatagatgagagggactatgatgaaaatgaggtggacccttaccatggcaatcaggaaaaggtgccagaacccgaggctttggaccttccagatgacttgaaccttgacagtgaagacaagaatggtggtgaggacaccgacaatgaagaaggagaagaagagaatcctttggagataaaagaaaaaccagaagaagcaggtcatgaagctgaggaaagaggagagaccgagaccgaccagaacgaaagtcagagtccacaggagcctgaggaaggccccagtgaagatgacaaggcagaaggggaagaggaaatggacacaggagctgatgaccaagatggagatgctgctcagcatcctgaagaacactctgaggagcagcagcagtctgtggaggaaaaagacaaggaagccgatgaagaaggtggagagaatggccctgctgaccaaggtttccagccccaggaggaagaagaacgggaggactctgatacagaggagcaggtgccagaggctttggagaggaaggagcatgcctcctgtgggcagactggtgtggagaacatgcagaacacacaggccatggagctggctggggccgcacctgagaaggagcaggggaaagaggaacacggaagtggagctgcagatgcaaaccaggcagaaggccatgaatcgaatttcattgcccagttggcctcccagaagcacaccaggaaaaacacacagagttttaagaggaaacctgggcaggctgacaatgaacgttccatgggtgatcacaatgagcgtgtgcacaagaggctgaggactgtggatacggacagccatgccgagcaggggccagctcagcagccccaggcccaggtggaggatgcagatgcattcgagcacattaaacaaggcagtgacgcatacgatgcacagacctatgatgtggccagcaaagaacagcaacagtctgcaaaagactctggcaaagatcaggaagaggaggagatagaggacacccttatggacacagaggagcaggaggagttcaaagcagcagacgtggagcagctgaagccagaggaaatcaagtcgggcaccacagcacccttgggctttgatgagatggaagtggagatccaaactgttaaaacagaggaagaccaagaccccagaacagacaaagcccataaggagacagaaaatgagaaaccagaaagaagccgagagtctaccattcatacagctcatcaattcctcatggacacgatcttccagccctttttaaaagatgtcaatgagctaagacaggagctggagagacagctggaaatgtggcagccacgtgaatctggaaacccagaggaggagaaggttgcagctgagatgtggcagagttacctgatcttaacagcgcctctttcacaacggttatgtgaagagcttcgtctcatattagagcctacccaggcagccaagctgaaaggagactatcgaactgggaaacgactaaacatacggaaagtcattccatacattgctagtcaatttcggaaagacaagatttggcttcgaaggaccaagcccagtaaacgccagtatcagatttgtttggctatcgatgactcttctagtatggtagacaatcataccaagcagcttgcatttgaatctttggctgtgattggaaatgctctaaccctcctggaagtgggtcagattgcagtgtgtagttttggagaatctgtaaagctgttacacccatttcatgagcagttcagtgattactctgggtcccagattctacgtctctgcaaattccaacaaaagaaaaccaagattgctcagtttctagagtctgttgccaacatgtttgcagctgctcagcagctctcgcagaacatcagttcagaaactgcacaactcctcctggtagtctctgatgggcgaggccttttccttgagggcaaagaaagagtcctggcagcagttcaggctgcccggaatgcaaatatctttgtcatctttgttgtattggacaatcccagttcacgggattctatcttggacattaaagtaccgatatttaaaggacctggagagatgcctgaaatccgatcctacatggaagagttcccattcccatactatatcattcttcgagatgtaaacgcacttcctgagacactcagcgatgccctcagacagtggtttgagttggtgacagcctctgaccacccatagaacagaaagaagagtccaaagtgagacttaactgtggtcagaaggtcacattgcttacccaggtgctcccttttggacaactacaaaaaattttattgtaatatttttattttacaacgtgatcttacagcctacagaatgctctctggctcccggctttgcctgggctgaggtttttataccaaacctggaagcagcagcaggtgcctgaactcgtaactagagaagagttatccttcttccctgccttggaagccctggcctgggaggaggtcataccccaccgttggagcccagctgcctgttttcttttgcaggggatctgggcacctgtgccttgaggagatgctgccaggagcatgggactctgacagtcctttgtataaaggactaaagggagctgcccttttgaccctgttctaagctctgccttgccaagcccatagtgtgtgcccaaaagctgtcaagtggccaagacagctcgtttctggagagtatgagggtgtgttttcttattgtgaaaggaactaccttctcttagagggtaggaagaatgtggtgtgtgtgtgttctcataaagcaactggacattataggtgcccaggtcatctataaaaacgatccttgggctgtgtaaaaatgaagtggcttttcagtatcctctttcacacttgctgcttcgggagactatgcaatgatgggaaggtgattgcccctttatttcattcagtgccatggtccctgttgttgtagtaatttatttgtttagttcatttttttttttcttaacagtcaaggggaagagtgattcctcacactgctttcaagctggactgagccagtctcattctgggaaagaaacgctgtgtccagaactcagcagctccatctattttttccagtcgaaagaaactgatctttaggcagtttttacttggccagaaagcagtgctgaatacttgaaactgtgtgctctgttctacttaatgttctgtcagaatgttcttttgtaggcagtatgtcatgatgtaatcatctatctccttgtctgtttccaagttacactgtgaagtctgcgacccttttgaggtggtcatcaaagacacagattccttgtttaaccaagtgtcccaaagcatgtacctgaagttatatcattttttattctaaaaagctatgcagcttatattctgaaaactattaaaacatataccactgttgttgatgta

SEQ ID NO: 446964 - DNA, 3161 bp, Homo sapiens
acatagctggttgatgatgaagcctggtttctaattgaggtctgtcctgtctttggagtgagacataatattcctgcaaagaactaagcagccttacaaaggcccctgagaggttaacataaggtctgtacctagacactcctgtttctgcctgtaggccaggccttagttacggtgagttccagggcaggcaggtaggcaggagtgattatatgactgagaataaaggacagcagtgagagaagttgtattcaatgcagcacagtaaccagggacttgtaatagcttctttcacctcattcttttgtggcttggatttcctaggaacacggaagtggagctgcagatgcaaaccaggcagaaggccatgaatcgaatttcattgcccagttggcctcccagaagcacaccaggaaaaacacacagagttttaagaggaaacctgggcaggctgacaatgaacgttccatgggtgatcacaatgagcgtgtgcacaagaggctgaggactgtggatacggacagccatgccgagcaggggccagctcagcagccccaggcccaggtggaggatgcagatgcattcgagcacattaaacaaggcagtgacgcatacgatgcacagacctatgatgtggccagcaaagaacagcaacagtctgcaaaagactctggcaaagatcaggaagaggaggagatagaggacacccttatggacacagaggagcaggaggagttcaaagcagcagacgtggagcagctgaagccagaggaaatcaagtcgggcaccacagcacccttgggctttgatgagatggaagtggagatccaaactgttaaaacagaggaagaccaagaccccagaacagacaaagcccataaggagacagaaaatgagaaaccagaaagaagccgagagtctaccattcatacagctcatcaattcctcatggacacgatcttccagccctttttaaaagatgtcaatgagctaagacaggagctggagagacagctggaaatgtggcagccacgtgaatctggaaacccagaggaggagaaggttgcagctgagatgtggcagagttacctgatcttaacagcgcctctttcacaacggttatgtgaagagcttcgtctcatattagagcctacccaggcagccaagctgaaaggagactatcgaactgggaaacgactaaacatacggaaagtcattccatacattgctagtcaatttcggaaagacaagatttggcttcgaaggaccaagcccagtaaacgccagtatcagatttgtttggctatcgatgactcttctagtatggtagacaatcataccaagcagcttgcatttgaatctttggctgtgattggaaatgctctaaccctcctggaagtgggtcagattgcagtgtgtagttttggagaatctgtaaagctgttacacccatttcatgagcagttcagtgattactctgggtcccagattctacgtctctgcaaattccaacaaaagaaaaccaagattgctcagtttctagagtctgttgccaacatgtttgcagctgctcagcagctctcgcagaacatcagttcagaaactgcacaactcctcctggtagtctctgatgggcgaggccttttccttgagggcaaagaaagagtcctggcagcagttcaggctgcccggaatgcaaatatctttgtcatctttgttgtattggacaatcccagttcacgggattctatcttggacattaaagtaccgatatttaaaggacctggagagatgcctgaaatccgatcctacatggaagagttcccattcccatactatatcattcttcgagatgtaaacgcacttcctgagacactcagcgatgccctcagacagtggtttgagttggtgacagcctctgaccacccatagaacagaaagaagagtccaaagtgagacttaactgtggtcagaaggtcacattgcttacccaggtgctcccttttggacaactacaaaaaattttattgtaatatttttattttacaacgtgatcttacagcctacagaatgctctctggctcccggctttgcctgggctgaggtttttataccaaacctggaagcagcagcaggtgcctgaactcgtaactagagaagagttatccttcttccctgccttggaagccctggcctgggaggaggtcataccccaccgttggagcccagctgcctgttttcttttgcaggggatctgggcacctgtgccttgaggagatgctgccaggagcatgggactctgacagtcctttgtataaaggactaaagggagctgcccttttgaccctgttctaagctctgccttgccaagcccatagtgtgtgcccaaaagctgtcaagtggccaagacagctcgtttctggagagtatgagggtgtgttttcttattgtgaaaggaactaccttctcttagagggtaggaagaatgtggtgtgtgtgtgttctcataaagcaactggacattataggtgcccaggtcatctataaaaacgatccttgggctgtgtaaaaatgaagtggcttttcagtatcctctttcacacttgctgcttcgggagactatgcaatgatgggaaggtgattgcccctttatttcattcagtgccatggtccctgttgttgtagtaatttatttgtttagttcatttttttttttcttaacagtcaaggggaagagtgattcctcacactgctttcaagctggactgagccagtctcattctgggaaagaaacgctgtgtccagaactcagcagctccatctattttttccagtcgaaagaaactgatctttaggcagtttttacttggccagaaagcagtgctgaatacttgaaactgtgtgctctgttctacttaatgttctgtcagaatgttcttttgtaggcagtatgtcatgatgtaatcatctatctccttgtctgtttccaagttacactgtgaagtctgcgacccttttgaggtggtcatcaaagacacagattccttgtttaaccaagtgtcccaaagcatgtacctgaagttatatcattttttattctaaaaagctatgcagcttatattctgaaaactattaaaacatataccactgttgttgatgta

SEQ ID NO: 446965 - DNA, 4550 bp, Homo sapiens
ccccgcgtccgcccacgcgtccgcaaagagactttcaactagtgccatttgtgagtctctttgctcaacctccatccctggaagaatgaacaaagagactcacaaatggcactagttgaaagtctggaatatgtaagaggagaaattagtaaagccatggctgactttactacctggaagacccatctgcttacttcagatagccaaggaggaaatcaaatgttggacgaaggatttgtggaagatttttcagagcaaatggaaattgccatccgagccatcctctgtgccatccagaacttagaagaaagaaagaatgaaaaagcagaggagaacactgaccaagcaagcccacaagaagattatgcaggctttgagagactgcaatcaggacatctaacaaaactcttagaggatgacttctgggccgatgtgagcactttgcacgtgcagaaaataatttctgccatctccgagctgttggagaggctgaaatcgtacggtgaggatggcacagcagcaaagcacctgttcttcagccaatcctgttccttgctggtgcgcctggtgccggtcctctccagctactcagacctcgtcctcttcttcctgaccatgtctttagcaactcaccgtagtactgcaaagctgctctctgtgcttgcccaggtctttacagagcttgcccagaagggattttgcttgcccaaagaatttatggaagattcagctggagagggagcaactgagttccatgactatgagggaggtggaattggagaaggcgagggcatgaaggatgtgagtgaccagatcggaaatgaagaacaggtggaagatacatttcagaagggtcaagaaaaagacaaagaggatcctgattcaaaatctgatattaagggcgaggataatgccattgagatgtcggaagattttgatgggaaaatgcatgatggggagcttgaagaacaagaagaggatgatgagaaatcagatagtgagggcggagacctggataaacacatgggcgatctcaatggtgaggaagctgacaaactagatgagaggctttggggtgatgatgatgaggaggaagatgaggaggaagaagacaataaaactgaagaaacaggaccaggaatggatgaggaagattctgaacttgttgctaaagatgacaacttggatagtggcaattcaaacaaagataaaagccagcaagataagaaggaagaaaaggaagaagcagaagctgatgatggtggacaaggtgaagacaaaattaatgaacaaatagatgagagggactatgatgaaaatgaggtggacccttaccatggcaatcaggaaaaggtgccagaacccgaggctttggaccttccagatgacttgaaccttgacagtgaagacaagaatggtggtgaggacaccgacaatgaagaaggagaagaagagaatcctttggagataaaagaaaaaccagaagaagcaggtcatgaagctgaggaaagaggagagaccgagaccgaccagaacgaaagtcagagtccacaggagcctgaggaaggccccagtgaagatgacaaggcagaaggggaagaggaaatggacacaggagctgatgaccaagatggagatgctgctcagcatcctgaagaacactctgaggagcagcagcagtctgtggaggaaaaagacaaggaagccgatgaagaaggtggagagaatggccctgctgaccaaggtttccagccccaggaggaagaagaacgggaggactctgatacagaggagcaggtgccagaggctttggagaggaaggagcatgcctcctgtgggcagactggtgtggagaacatgcagaacacacaggccatggagctggctggggccgcacctgagaaggagcaggggaaagaggaacacggaagtggagctgcagatgcaaaccaggcagaaggccatgaatcgaatttcattgcccagttggcctcccagaagcacaccaggaaaaacacacagagttttaagaggaaacctgggcaggctgacaatgaacgttccatgggtgatcacaatgagcgtgtgcacaagaggctgaggactgtggatacggacagccatgccgagcaggggccagctcagcagccccaggcccaggtggaggatgcagatgcattcgagcacattaaacaaggcagtgacgcatacgatgcacagacctatgatgtggccagcaaagaacagcaacagtctgcaaaagactctggcaaagatcaggaagaggaggagatagaggacacccttatggacacagaggagcaggaggagttcaaagcagcagacgtggagcagctgaagccagaggaaatcaagtcgggcaccacagcacccttgggctttgatgagatggaagtggagatccaaactgttaaaacagaggaagaccaagaccccagaacagacaaagcccataaggagacagaaaatgagaaaccagaaagaagccgagagtctaccattcatacagctcatcaattcctcatggacacgatcttccagccctttttaaaagatgtcaatgagctaagacaggagctggagagacagctggaaatgtggcagccacgtgaatctggaaacccagaggaggagaaggttgcagctgagatgtggcagagttacctgatcttaacagcgcctctttcacaacggttatgtgaagagcttcgtctcatattagagcctacccaggcagccaagctgaaaggagactatcgaactgggaaacgactaaacatacggaaagtcattccatacattgctagtcaatttcggaaagacaagatttggcttcgaaggaccaagcccagtaaacgccagtatcagatttgtttggctatcgatgactcttctagtatggtagacaatcataccaagcagcttgcatttgaatctttggctgtgattggaaatgctctaaccctcctggaagtgggtcagattgcagtgtgtagttttggagaatctgtaaagctgttacacccatttcatgagcagttcagtgattactctgggtcccagattctacgtctctgcaaattccaacaaaagaaaaccaagattgctcaggattctatcttggacattaaagtaccgatatttaaaggacctggagagatgcctgaaatccgatcctacatggaagagttcccattcccatactatatcattcttcgagatgtaaacgcacttcctgagacactcagcgatgccctcagacagtggtttgagttggtgacagcctctgaccacccatagaacagaaagaagagtccaaagtgagacttaactgtggtcagaaggtcacattgcttacccaggtgctcccttttggacaactacaaaaaattttattgtaatatttttattttacaacgtgatcttacagcctacagaatgctctctggctcccggctttgcctgggctgaggtttttataccaaacctggaagcagcagcaggtgcctgaactcgtaactagagaagagttatccttcttccctgccttggaagccctggcctgggaggaggtcataccccaccgttggagcccagctgcctgttttcttttgcaggggatctgggcacctgtgccttgaggagatgctgccaggagcatgggactctgacagtcctttgtataaaggactaaagggagctgcccttttgaccctgttctaagctctgccttgccaagcccatagtgtgtgcccaaaagctgtcaagtggccaagacagctcgtttctggagagtatgagggtgtgttttcttattgtgaaaggaactaccttctcttagagggtaggaagaatgtggtgtgtgtgtgttctcataaagcaactggacattataggtgcccaggtcatctataaaaacgatccttgggctgtgtaaaaatgaagtggcttttcagtatcctctttcacacttgctgcttcgggagactatgcaatgatgggaaggtgattgcccctttatttcattcagtgccatggtccctgttgttgtagtaatttatttgtttagttcatttttttttttcttaacagtcaaggggaagagtgattcctcacactgctttcaagctggactgagccagtctcattctgggaaagaaacgctgtgtccagaactcagcagctccatctattttttccagtcgaaagaaactgatctttaggcagtttttacttggccagaaagcagtgctgaatacttgaaactgtgtgctctgttctacttaatgttctgtcagaatgttcttttgtaggcagtatgtcatgatgtaatcatctatctccttgtctgtttccaagttacactgtgaagtctgcgacccttttgaggtggtcatcaaagacacagattccttgtttaaccaagtgtcccaaagcatgtacctgaagttatatcattttttattctaaaaagctatgcagcttatattctgaaaactattaaaacatataccactgttgttgatgta

SEQ ID NO: 446966 - DNA, 4027 bp, Homo sapiens
ccccgcgtccgcccacgcgtccgcaaagagactttcaactagtgccatttgtgagtctctttgctcaacctccatccctggaagaatgaacaaagagactcacaaatggcactagttgaaagtctggaatatgtaagaggagaaattagtaaagccatggctgactttactacctggaagacccatctgcttacttcagatagccaaggaggaaatcaaatgttggacgaaggatttgtggaagatttttcagagcaaatggaaattgccatccgagccatcctctgtgccatccagaacttagaagaaagaaagaatgaaaaagcagaggagaacactgaccaagcaagcccacaagaagattatgcaggctttgagagactgcaatcaggacatctaacaaaactcttagaggatgacttctgggccgatgtgagcactttgcacgtgcagaaaataatttctgccatctccgagctgttggagaggctgaaatcgtacggtgaggatggcacagcagcaaagcacctgttcttcagccaatcctgttccttgctggtgcgcctggtgccggtcctctccagctactcagacctcgtcctcttcttcctgaccatgtctttagcaactcaccgtagtactgcaaagctgctctctgtgcttgcccaggtctttacagagcttgcccagaagggattttgcttgcccaaagaatttatggaagattcagctggagagggagcaactgagttccatgactatgagggaggtggaattggagaaggcgagggcatgaaggatgtgagtgaccagatcggaaatgaagaacaggtggaagatacatttcagaagggtcaagaaaaagacaaagaggatcctgattcaaaatctgatattaagggcgaggataatgccattgagatgtcggaagattttgatgggaaaatgcatgatggggagcttgaagaacaagaagaggatgatgagaaatcagatagtgagggcggagacctggataaacacatgggcgatctcaatggtgaggaagctgacaaactagatgagaggctttggggtgatgatgatgaggaggaagatgaggaggaagaagacaataaaactgaagaaacaggaccaggaatggatgaggaagattctgaacttgttgctaaagatgacaacttggatagtggcaattcaaacaaagataaaagccagcaagataagaaggaagaaaaggaagaagcagaagctgatgatggtggacaaggtgaagacaaaattaatgaacaaatagatgagagggactatgatgaaaatgaggtggacccttaccatggcaatcaggaaaaggtgccagaacccgaggctttggaccttccagatgacttgaaccttgacagtgaagacaagaatggtggtgaggacaccgacaatgaagaaggagaagaagagaatcctttggagataaaagaaaaaccagaagaagcaggtcatgaagctgaggaaagaggagagaccgagaccgaccagaacgaaagtcagagtccacaggagcctgaggaaggccccagtgaagatgacaaggcagaaggggaagaggaaatggacacaggagctgatgaccaagatggagatgctgctcagcatcctgaagaacactctgaggagcagcagcagtctgtggaggaaaaagacaaggaagccgatgaagaaggtggagagaatggccctgctgaccaaggtttccagccccaggaggaagaagaacgggaggactctgatacagaggagcaggtgccagaggctttggagaggaaggagcatgcctcctgtgggcagactggtgtggagaacatgcagaacacacaggccatggagctggctggggccgcacctgagaaggagcaggggaaagaggaacacggaagtggagctgcagatgcaaaccaggcagaaggccatgaatcgaatttcattgcccagttggcctcccagaagcacaccaggaaaaacacacagagttttaagaggaaacctgggcaggctgacaatgaacgttccatgggtgatcacaatgagcgtgtgcacaagaggctgaggactgtggatacggacagccatgccgagcaggggccagctcagcagccccaggcccaggtggaggatgcagatgcattcgagcacattaaacaaggcagtgacgcatacgatgcacagacctatgatgtggccagcaaagaacagcaacagtctgcaaaagactctggcaaagatcaggaagaggaggagatagaggacacccttatggacacagaggagcaggaggagttcaaagcagcagacgtggagcagctgaagccagaggaaatcaagtcgggcaccacagcacccttgggctttgatgagatggaagtggagatccaaactgttaaaacagaggaagaccaagaccccagaacagacaaagcccataaggagacagaaaatgagaaaccagaaagaagccgagagtctaccattcatacagctcatcaattcctcatggacacgatcttccagccctttttaaaagatgtcaatgagctaagacaggagctggagagacagctggaaatgtggcagccacgtgaatctggaaacccagaggaggagaaggttgcagctgagatgtggcagagttacctgatcttaacagcgcctctttcacaacggttatgtgaagagcttcgtctcatattagagcctacccaggcagccaagctgaaaggagactatcgaactgggaaacgactaaacatacggaaagtcattccatacattgctagtcaatttcggaaagacaagatttggcttcgaaggaccaagcccagtaaacgccagtatcagatttgtttggctatcgatgactcttctagtatggtagacaatcataccaagcagcttgcatttgaatctttggctgtgattggaaatgctctaaccctcctggaagtgggtcagattgcagtgtgtagttttggagaatctgtaaagctgttacacccatttcatgagcagttcagtgattactctgggtcccagattctacgtctctgcaaattccaacaaaagaaaaccaagattgctcagtttctagagtctgttgccaacatgtttgcagctgctcagcagctctcgcagaacatcagttcagaaactgcacaactcctcctggtagtctctgatgggcgaggccttttccttgagggcaaagaaagagtcctggcagcagttcaggctgcccggaatgcaaatatctttgtcatctttgttgtattggacaatcccagttcacgggattctatcttggacattaaagtaccgatatttaaaggacctggagagatgcctgaaatccgatcctacatggaagagttcccattcccatactatatcattcttcgagatgtaaacgcacttcctgagacactcagcgatgccctcagacagtggtttgagttggtgacagcctctgaccacccatagaacagaaagaagagtccaaagtgagacttaactgtggtcagaaggtcacattgcttacccagtcaaggggaagagtgattcctcacactgctttcaagctggactgagccagtctcattctgggaaagaaacgctgtgtccagaactcagcagctccatctattttttccagtcgaaagaaactgatctttaggcagtttttacttggccagaaagcagtgctgaatacttgaaactgtgtgctctgttctacttaatgttctgtcagaatgttcttttgtaggcagtatgtcatgatgtaatcatctatctccttgtctgtttccaagttacactgtgaagtctgcgacccttttgaggtggtcatcaaagacacagattccttgtttaaccaagtgtcccaaagcatgtacctgaagttatatcattttttattctaaaaagctatgcagcttatattctgaaaactattaaaacatataccactgttgttgatgta

SEQ ID NO: 446967 - DNA, 3995 bp, Homo sapiens
ccccgcgtccgcccacgcgtccgcaaagagactttcaactagtgccatttgtgagtctctttgctcaacctccatccctggaagaatgaacaaagagactcacaaatggcactagttgaaagtctggaatatgtaagaggagaaattagtaaagccatggctgactttactacctggaagacccatctgcttacttcagatagccaaggaggaaatcaaatgttggacgaaggatttgtggaagatttttcagagcaaatggaaattgccatccgagccatcctctgtgccatccagaacttagaagaaagaaagaatgaaaaagcagaggagaacactgaccaagcaagcccacaagaagattatgcaggctttgagagactgcaatcaggacatctaacaaaactcttagaggatgacttctgggccgatgtgagcactttgcacgtgcagaaaataatttctgccatctccgagctgttggagaggctgaaatcgtacggtgaggatggcacagcagcaaagcacctgttcttcagccaatcctgttccttgctggtgcgcctggtgccggtcctctccagctactcagacctcgtcctcttcttcctgaccatgtctttagcaactcaccgtagtactgcaaagctgctctctgtgcttgcccaggtctttacagagcttgcccagaagggattttgcttgcccaaagaatttatggaagattcagctggagagggagcaactgagttccatgactatgagggaggtggaattggagaaggcgagggcatgaaggatgtgagtgaccagatcggaaatgaagaacaggtggaagatacatttcagaagggtcaagaaaaagacaaagaggatcctgattcaaaatctgatattaagggcgaggataatgccattgagatgtcggaagattttgatgggaaaatgcatgatggggagcttgaagaacaagaagaggatgatgagaaatcagatagtgagggcggagacctggataaacacatgggcgatctcaatggtgaggaagctgacaaactagatgagaggctttggggtgatgatgatgaggaggaagatgaggaggaagaagacaataaaactgaagaaacaggaccaggaatggatgaggaagattctgaacttgttgctaaagatgacaacttggatagtggcaattcaaacaaagataaaagccagcaagataagaaggaagaaaaggaagaagcagaagctgatgatggtggacaaggtgaagacaaaattaatgaacaaatagatgagagggactatgatgaaaatgaggtggacccttaccatggcaatcaggaaaaggtgccagaacccgaggctttggaccttccagatgacttgaaccttgacagtgaagacaagaatggtggtgaggacaccgacaatgaagaaggagaagaagagaatcctttggagataaaagaaaaaccagaagaagcaggtcatgaagctgaggaaagaggagagaccgagaccgaccagaacgaaagtcagagtccacaggagcctgaggaaggccccagtgaagatgacaaggcagaaggggaagaggaaatggacacaggagctgatgaccaagatggagatgctgctcagcatcctgaagaacactctgaggagcagcagcagtctgtggaggaaaaagacaaggaagccgatgaagaaggtggagagaatggccctgctgaccaaggtttccagccccaggaggaagaagaacgggaggactctgatacagaggagcaggtgccagaggctttggagaggaaggagcatgcctcctgtgggcagactggtgtggagaacatgcagaacacacaggccatggagctggctggggccgcacctgagaaggagcaggggaaagaggaacacggaagtggagctgcagatgcaaaccaggcagaaggccatgaatcgaatttcattgcccagttggcctcccagaagcacaccaggaaaaacacacagagttttaagaggaaacctgggcaggctgacaatgaacgttccatgggtgatcacaatgagcgtgtgcacaagaggctgaggactgtggatacggacagccatgccgagcaggggccagctcagcagccccaggcccaggtggaggatgcagatgcattcgagcacattaaacaaggcagtgacgcatacgatgcacagacctatgatgtggccagcaaagaacagcaacagtctgcaaaagactctggcaaagatcaggaagaggaggagatagaggacacccttatggacacagaggagcaggaggagttcaaagcagcagacgtggagcagctgaagccagaggaaatcaagtcgggcaccacagcacccttgggctttgatgagatggaagtggagatccaaactgttaaaacagaggaagaccaagaccccagaacagacaaagcccataaggagacagaaaatgagaaaccagaaagaagccgagagtctaccattcatacagctcatcaattcctcatggacacgatcttccagccctttttaaaagatgtcaatgagctaagacaggagctggagagacagctggaaatgtggcagccacgtgaatctggaaacccagaggaggagaaggttgcagctgagatgtggcagagttacctgatcttaacagcgcctctttcacaacggttatgtgaagagcttcgtctcatattagagcctacccaggcagccaagctgaaaggagactatcgaactgggaaacgactaaacatacggaaagtcattccatacattgctagtcaatttcggaaagacaagatttggcttcgaaggaccaagcccagtaaacgccagtatcagatttgtttggctatcgatgactcttctagtatggtagacaatcataccaagcagcttgcatttgaatctttggctgtgattggaaatgctctaaccctcctggaagtgggtcagattgcagtgtgtagttttggagaatctgtaaagctgttacacccatttcatgagcagttcagtgattactctgggtcccagattctacgtctctgcaaattccaacaaaagaaaaccaagattgctcagtttctagagtctgttgccaacatgtttgcagctgctcagcagctctcgcagaacatcagttcagaaactgcacaactcctcctggtagtctctgatgggcgaggccttttccttgagggcaaagaaagagtcctggcagcagttcaggctgcccggaatgcaaatatctttgtcatctttgttgtattggacaatcccagttcacgggtgagtgactactaaaagccaccttttctggaggtaaagtggggattcccttcaacctgttcaatctgaaatatggcctggatcactcagtcatactgagaactcccagcattcatagtattctgtcaagtaccattgtaggcacttgtaagtattttctctattaatctttgcaataagccagtgaggtagggatcattattcccactttacactgaaggaactgaaacacatagaggttataggtaatgagtgggagagccaagattcagaatgaccatcctctgtgggtcatcatttccctctatgcaaagtcagtgcaggtattgcagccttgataatgggtactgaccactttgaaatggagattaggtgttgccacacttaacttatgtctcagtagctcctcacagcaagaagcatcaatcatcttagtgaaatatgcctatagggcagttctgttccagggaagcattgtctctgtgggtcacattaaggccttgataggaaggtaaagatttagtgtgaatgattccaagtggatgatggggagacaccactgtagggaaagcagattttcctgtctatcccttttcctttttttcagtgtccatcctcctggaaggggcactcagaaagacatctacctccttctt

SEQ ID NO: 446968 - DNA, 2097 bp, Homo sapiens
ccccgcgtccgcccacgcgtccgcaaagagactttcaactagtgccatttgtgagtctctttgctcaacctccatccctggaagaatgaacaaagagactcacaaatggcactagttgaaagtctggaatatgtaagaggagaaattagtaaagccatggctgactttactacctggaagacccatctgcttacttcagatagccaaggaggaaatcaaatgttggacgaaggatttgtggaagatttttcagagcaaatggaaattgccatccgagccatcctctgtgccatccagaacttagaagaaagaaagaatgaaaaagcagaggagaacactgaccaagcaagcccacaagaagattatgcaggctttgagagactgcaatcaggacatctaacaaaactcttagaggatgacttctgggccgatgtgagcactttgcacgtgcagaaaataatttctgccatctccgagctgttggagaggctgaaatcgtacggtgaggatggcacagcagcaaagcacctgttcttcagccaatcctgttccttgctggtgcgcctggtgccggtcctctccagctactcagacctcgtcctcttcttcctgaccatgtctttagcaactcaccgtagtactgcaaagctgctctctgtgcttgcccaggtctttacagagcttgcccagaagggattttgcttgcccaaagaatttatggaagattcagctggagagggagcaactgagttccatgactatgagggaggtggaattggagaaggcgagggcatgaaggatgtgagtgaccagatcggaaatgaagaacaggtggaagatacatttcagaagggtcaagaaaaagacaaagaggatcctgattcaaaatctgatattaagggcgaggataatgccattgagatgtcggaagattttgatgggaaaatgcatgatggggagcttgaagaacaagaagaggatgatgagaaatcagatagtgagggcggagacctggataaacacatgggcgatctcaatggtgaggaagctgacaaactagatgagaggctttggggtgatgatgatgaggaggaagatgaggaggaagaagacaataaaactgaagaaacaggaccaggaatggatgaggaagattctgaacttgttgctaaagatgacaacttggatagtggcaattcaaacaaagataaaagccagcaagataagaaggaagaaaaggaagaagcagaagctgatgatggtggacaaggtgaagacaaaattaatgaacaaatagatgagagggactatgatgaaaatgaggtggacccttaccatggcaatcaggaaaaggtgccagaacccgaggctttggaccttccagatgacttgaaccttgacagtgaagacaagaatggtggtgaggacaccgacaatgaagaaggagaagaagagaatcctttggagataaaagaaaaaccagaagaagcaggtcatgaagctgaggaaagaggagagaccgagaccgaccagaacgaaagtcagagtccacaggagcctgaggaaggccccagtgaagatgacaaggcagaaggggaagaggaaatggacacaggagctgatgaccaagatggagatgctgctcagcatcctgaagaacactctgaggagcagcagcagtctgtggaggaaaaagacaaggaagccgatgaagaaggtggagagaatggccctgctgaccaaggtttccagccccaggaggaagaagaacgggaggactctgatacagaggagcaggtgccagaggctttggagaggaaggagcatgcctcctgtgggcagactggtgtggagaacatgcagaacacacaggccatggagctggctggggccgcacctgagaaggagcaggggaaagaggaacacggaagtggagctgcagatgcaaaccaggcagaaggccatgaatcgaatttcattgcccagttggcctcccagaagcacaccaggaaaaacacacaggtttctatcactcctcagctaaacttaggtgaaggcagcatgtagaaaaagatgttccaaacgtagtgctttaaa

SEQ ID NO: 446969 - DNA, 2035 bp, Homo sapiens
ccccgcgtccgcccacgcgtccgcaaagagactttcaactagtgccatttgtgagtctctttgctcaacctccatccctggaagaatgaacaaagagactcacaaatggcactagttgaaagtctggaatatgtaagaggagaaattagtaaagccatggctgactttactacctggaagacccatctgcttacttcagatagccaaggaggaaatcaaatgttggacgaaggatttgtggaagatttttcagagcaaatggaaattgccatccgagccatcctctgtgccatccagaacttagaagaaagaaagaatgaaaaagcagaggagaacactgaccaagcaagcccacaagaagattatgcaggctttgagagactgcaatcaggacatctaacaaaactcttagaggatgacttctgggccgatgtgagcactttgcacgtgcagaaaataatttctgccatctccgagctgttggagaggctgaaatcgtacggtgaggatggcacagcagcaaagcacctgttcttcagccaatcctgttccttgctggtgcgcctggtgccggtcctctccagctactcagacctcgtcctcttcttcctgaccatgtctttagcaactcaccgtagtactgcaaagctgctctctgtgcttgcccaggtctttacagagcttgcccagaagggattttgcttgcccaaagaatttatggaagattcagctggagagggagcaactgagttccatgactatgagggaggtggaattggagaaggcgagggcatgaaggatgtgagtgaccagatcggaaatgaagaacaggtggaagatacatttcagaagggtcaagaaaaagacaaagaggatcctgattcaaaatctgatattaagggcgaggataatgccattgagatgtcggaagattttgatgggaaaatgcatgatggggagcttgaagaacaagaagaggatgatgagaaatcagatagtgagggcggagacctggataaacacatgggcgatctcaatggtgaggaagctgacaaactagatgagaggctttggggtgatgatgatgaggaggaagatgaggaggaagaagacaataaaactgaagaaacaggaccaggaatggatgaggaagattctgaacttgttgctaaagatgacaacttggatagtggcaattcaaacaaagataaaagccagcaagataagaaggaagaaaaggaagaagcagaagctgatgatggtggacaaggtgaagacaaaattaatgaacaaatagatgagagggactatgatgaaaatgaggtggacccttaccatggcaatcaggaaaaggtgccagaacccgaggctttggaccttccagatgacttgaaccttgacagtgaagacaagaatggtggtgaggacaccgacaatgaagaaggagaagaagagaatcctttggagataaaagaaaaaccagaagaagcaggtcatgaagctgaggaaagaggagagaccgagaccgaccagaacgaaagtcagagtccacaggagcctgaggaaggccccagtgaagatgacaagttacactgtgaagtctgcgacccttttgaggtggtcatcaaagacacagattccttgtttaaccaagtgtcccaaagcatgtacctgaagttatatcattttttattctaaaaagctatgcagcttatattctgaaaactattaaaacatataccactgttgttgatgtaatttgtgactcttcttaatggaagatgacaggattgtaaaaggtatgctaggggactgatcttctctgctggatcagtcagtcagctgttactagttgatgctgtgctaacatgatcccctcctacttccatgttgctcttactacaaaggttatcatttgcatttatgtccatggtaggctgagctataatatgctggctttgcagcagaatgaaaaggatgagttggtgtagccttataaggaggcttataaaaataaattatcctccataaatga

SEQ ID NO: 446970 - DNA, 380 bp, Homo sapiens
tttgtggtaccaggccaccaaagcctttgggtttgttgtgactatagtagccttactgatgttattcctctacttgccaaacaaaaaaatgttttctttgggaatcttgatgcaaaaaatagttgagaggctctggtttagaggatattctgattcctaaaatcattaactttctaattcacagcttgcatttgaatctttggctgtgattggaaatgctctaaccctcctggaagtgggtcagattgcagtgtgtaggtaaggttgctttgtaattcctttatgaaaacttttcacaacctgtttggttattttgatcacacagccaaaaaataactcctgttgtatttggttttcctcccccaagttttggagaatct

SEQ ID NO: 446971 - DNA, 395 bp, Homo sapiens
cagtgagatgagatcgtgccactacactccagcctgggtgacacagtgagaccctctctcaaaaaataataattaaaaaacagaatgtctgtatccaaggatcctccttttttaactacatacggccagaagggacagttagttgatggtctgtaaacctgaggtggttatctgataatcacttcaatgtcagaaatactatcagtctctttgacaatgagaagagcattcacatagttttctaattgtctattcctggttccggtttagtttctagagtctgttgccaacatgtttgcagctgctcagcagctctcgcagaacatcagttcaggtgagctgcatgccttcctcttcattaacaaaatgctttcttgtactctatattcccaagc

SEQ ID NO: 446972 - DNA, 321 bp, Homo sapiens
tcagaagggtcaagaaaaagacaaagaggatcctgattcaaaatctgatattaagggcgaggataatgccattgagatgtcggaagattttgatgggaaaatgcatgatggggagcttgaagaacaaggtttcagattatctgtcacttcattcttgtttttgaaagcataaatattttatccaggaaattacatgttcctaataaggaacccaatataatcttttgaaacaagttggttactgtgcttaagtgcaaatgaaaacctcagcagctgcatgtgctatcaccacctccactgaggcagaagtccctggtgtct

SEQ ID NO: 446973 - DNA, 388 bp, Homo sapiens
ccaacgttggaggagaacaaaggaacttcagatgggcaagaagaggaagcaggcacaaacccagctctcctctcccagaattcaatgcaggcagtaatgctgatacaccagcaattgtgtctcaactttgctcgatccctctggtatcaacagactctgccgccacatgaagcaaagcattacctcagcctgtttctgtcttgctatcagactggggcatcgcttgtgacacacttctaccccctgatgggtatggtagtttacttttgttatgcccctgggaaatgaaagcaaatgcaaatagatgctgttgctactctgtaacaatcacactcatgaatttcctgttttcgcataattccttattggagtttccttggcttaaaga

SEQ ID NO: 446974 - DNA, 433 bp, Homo sapiens
ctctggtctttgctgaacagaaatctagaaagaaacagaatgacactagctttataaagccatttcttgaacatcatttatcttacaggaatttgttaagatttccaagtggaatgatgtcagcttctggtccattaagcaatctgtagaaaagacacacaggtaatccatcttttaaaactggagacaaccaaaatagaatagaattttgtgtggtagggagcaaaacgacatagttaccataacctaacttaatattaagtgtgttaaacttctcaaaaaataacaccttgattgttttgatgttgctttcaacaccacccccttcttctccaagcaaagtctacctgcagtaaggattagtgtgccttgagacaaagcaggctatgtctcaagtcttctgccacccactagctgtatactttgagcaaag

SEQ ID NO: 446975 - DNA, 4701 bp, Homo sapiens
ccccgcgtccgcccacgcgtccgcaaagagactttcaactagtgccatttgtgagtctctttgctcaacctccatccctggaagaatgaacaaagagactcacaaatggcactagttgaaagtctggaatatgtaagaggagaaattagtaaagccatggctgactttactacctggaagacccatctgcttacttcagatagccaaggaggaaatcaaatgttggacgaaggatttgtggaagatttttcagagcaaatggaaattgccatccgagccatcctctgtgccatccagaacttagaagaaagaaagaatgaaaaagcagaggagaacactgaccaagcaagcccacaagaagattatgcaggctttgagagactgcaatcaggacatctaacaaaactcttagaggatgacttctgggccgatgtgagcactttgcacgtgcagaaaataatttctgccatctccgagctgttggagaggctgaaatcgtacggtgaggatggcacagcagcaaagcacctgttcttcagccaatcctgttccttgctggtgcgcctggtgccggtcctctccagctactcagacctcgtcctcttcttcctgaccatgtctttagcaactcaccgtagtactgcaaagctgctctctgtgcttgcccaggtctttacagagcttgcccagaagggattttgcttgcccaaagaatttatggaagattcagctggagagggagcaactgagttccatgactatgagggaggtggaattggagaaggcgagggcatgaaggatgtgagtgaccagatcggaaatgaagaacaggtggaagatacatttcagaagggtcaagaaaaagacaaagaggatcctgattcaaaatctgatattaagggcgaggataatgccattgagatgtcggaagattttgatgggaaaatgcatgatggggagcttgaagaacaagaagaggatgatgagaaatcagatagtgagggcggagacctggataaacacatgggcgatctcaatggtgaggaagctgacaaactagatgagaggctttggggtgatgatgatgaggaggaagatgaggaggaagaagacaataaaactgaagaaacaggaccaggaatggatgaggaagattctgaacttgttgctaaagatgacaacttggatagtggcaattcaaacaaagataaaagccagcaagataagaaggaagaaaaggaagaagcagaagctgatgatggtggacaaggtgaagacaaaattaatgaacaaatagatgagagggactatgatgaaaatgaggtggacccttaccatggcaatcaggaaaaggtgccagaacccgaggctttggaccttccagatgacttgaaccttgacagtgaagacaagaatggtggtgaggacaccgacaatgaagaaggagaagaagagaatcctttggagataaaagaaaaaccagaagaagcaggtcatgaagctgaggaaagaggagagaccgagaccgaccagaacgaaagtcagagtccacaggagcctgaggaaggccccagtgaagatgacaaggcagaaggggaagaggaaatggacacaggagctgatgaccaagatggagatgctgctcagcatcctgaagaacactctgaggagcagcagcagtctgtggaggaaaaagacaaggaagccgatgaagaaggtggagagaatggccctgctgaccaaggtttccagccccaggaggaagaagaacgggaggactctgatacagaggagcaggtgccagaggctttggagaggaaggagcatgcctcctgtgggcagactggtgtggagaacatgcagaacacacaggccatggagctggctggggccgcacctgagaaggagcaggggaaagaggaacacggaagtggagctgcagatgcaaaccaggcagaaggccatgaatcgaatttcattgcccagttggcctcccagaagcacaccaggaaaaacacacagagttttaagaggaaacctgggcaggctgacaatgaacgttccatgggtgatcacaatgagcgtgtgcacaagaggctgaggactgtggatacggacagccatgccgagcaggggccagctcagcagccccaggcccaggtggaggatgcagatgcattcgagcacattaaacaaggcagtgacgcatacgatgcacagacctatgatgtggccagcaaagaacagcaacagtctgcaaaagactctggcaaagatcaggaagaggaggagatagaggacacccttatggacacagaggagcaggaggagttcaaagcagcagacgtggagcagctgaagccagaggaaatcaagtcgggcaccacagcacccttgggctttgatgagatggaagtggagatccaaactgttaaaacagaggaagaccaagaccccagaacagacaaagcccataaggagacagaaaatgagaaaccagaaagaagccgagagtctaccattcatacagctcatcaattcctcatggacacgatcttccagccctttttgccacgtgaatctggaaacccagagggagaaggttgcagctgagatgtggcagagttacctgatcttaacagcgcctctttcacaacggttatgtgaagagcttcgtctcatattagagcctacccaggcagccaagctgaaaggagactatcgaactgggaaacgactaaacatacggaaagtcattccatacattgctagtcaatttcggaaagacaagatttggcttcgaaggaccaagcccagtaaacgccagtatcagatttgtttggctatcgatgactcttctagtatggtagacaatcataccaagcagcttgcatttgaatctttggctgtgattggaaatgctctaaccctcctggaagtgggtcagattgcagtgtgtagttttggagaatctgtaaagctgttacacccatttcatgagcagttcagtgattactctgggtcccagattctacgtctctgcaaattccaacaaaagaaaaccaagattgctcagtttctagagtctgttgccaacatgtttgcagctgctcagcagctctcgcagaacatcagttcagaaactgcacaactcctcctggtagtctctgatgggcgaggccttttccttgagggcaaagaaagagtcctggcagcagttcaggctgcccggaatgcaaatatctttgtcatctttgttgtattggacaatcccagttcacgggattctatcttggacattaaagtaccgatatttaaaggacctggagagatgcctgaaatccgatcctacatggaagagttcccattcccatactatatcattcttcgagatgtaaacgcacttcctgagacactcagcgatgccctcagacagtggtttgagttggtgacagcctctgaccacccatagaacagaaagaagagtccaaagtgagacttaactgtggtcagaaggtcacattgcttacccaggtgctcccttttggacaactacaaaaaattttattgtaatatttttattttacaacgtgatcttacagcctacagaatgctctctggctcccggctttgcctgggctgaggtttttataccaaacctggaagcagcagcaggtgcctgaactcgtaactagagaagagttatccttcttccctgccttggaagccctggcctgggaggaggtcataccccaccgttggagcccagctgcctgttttcttttgcaggggatctgggcacctgtgccttgaggagatgctgccaggagcatgggactctgacagtcctttgtataaaggactaaagggagctgcccttttgaccctgttctaagctctgccttgccaagcccatagtgtgtgcccaaaagctgtcaagtggccaagacagctcgtttctggagagtatgagggtgtgttttcttattgtgaaaggaactaccttctcttagagggtaggaagaatgtggtgtgtgtgtgttctcataaagcaactggacattataggtgcccaggtcatctataaaaacgatccttgggctgtgtaaaaatgaagtggcttttcagtatcctctttcacacttgctgcttcgggagactatgcaatgatgggaaggtgattgcccctttatttcattcagtgccatggtccctgttgttgtagtaatttatttgtttagttcatttttttttttcttaacagtcaaggggaagagtgattcctcacactgctttcaagctggactgagccagtctcattctgggaaagaaacgctgtgtccagaactcagcagctccatctattttttccagtcgaaagaaactgatctttaggcagtttttacttggccagaaagcagtgctgaatacttgaaactgtgtgctctgttctacttaatgttctgtcagaatgttcttttgtaggcagtatgtcatgatgtaatcatctatctccttgtctgtttccaagttacactgtgaagtctgcgacccttttgaggtggtcatcaaagacacagattccttgtttaaccaagtgtcccaaagcatgtacctgaagttatatcattttttattctaaaaagctatgcagcttatattctgaaaactattaaaacatataccactgttgttgatgta

SEQ ID NO: 446976 - DNA, 3902 bp, Homo sapiens
aaaaaggcaataaatctcaggtggggcccttgctagggaagcgggtccacacctctcttaaatacacaggactgggtcagtttggagatctgcctaagctcagtgccttccctttcagaagaggatgatgagaaatcagatagtgagggcggagacctggataaacacatgggcgatctcaatggtgaggaagctgacaaactagatgagaggctttggggtgatgatgatgaggaggaagatgaggaggaagaagacaataaaactgaagaaacaggaccaggaatggatgaggaagattctgaacttgttgctaaagatgacaacttggatagtggcaattcaaacaaagataaaagccagcaagataagaaggaagaaaaggaagaagcagaagctgatgatggtggacaaggtgaagacaaaattaatgaacaaatagatgagagggactatgatgaaaatgaggtggacccttaccatggcaatcaggaaaaggtgccagaacccgaggctttggaccttccagatgacttgaaccttgacagtgaagacaagaatggtggtgaggacaccgacaatgaagaaggagaagaagagaatcctttggagataaaagaaaaaccagaagaagcaggtcatgaagctgaggaaagaggagagaccgagaccgaccagaacgaaagtcagagtccacaggagcctgaggaaggccccagtgaagatgacaaggcagaaggggaagaggaaatggacacaggagctgatgaccaagatggagatgctgctcagcatcctgaagaacactctgaggagcagcagcagtctgtggaggaaaaagacaaggaagccgatgaagaaggtggagagaatggccctgctgaccaaggtttccagccccaggaggaagaagaacgggaggactctgatacagaggagcaggtgccagaggctttggagaggaaggagcatgcctcctgtgggcagactggtgtggagaacatgcagaacacacaggccatggagctggctggggccgcacctgagaaggagcaggggaaagaggaacacggaagtggagctgcagatgcaaaccaggcagaaggccatgaatcgaatttcattgcccagttggcctcccagaagcacaccaggaaaaacacacagagttttaagaggaaacctgggcaggctgacaatgaacgttccatgggtgatcacaatgagcgtgtgcacaagaggctgaggactgtggatacggacagccatgccgagcaggggccagctcagcagccccaggcccaggtggaggatgcagatgcattcgagcacattaaacaaggcagtgacgcatacgatgcacagacctatgatgtggccagcaaagaacagcaacagtctgcaaaagactctggcaaagatcaggaagaggaggagatagaggacacccttatggacacagaggagcaggaggagttcaaagcagcagacgtggagcagctgaagccagaggaaatcaagtcgggcaccacagcacccttgggctttgatgagatggaagtggagatccaaactgttaaaacagaggaagaccaagaccccagaacagacaaagcccataaggagacagaaaatgagaaaccagaaagaagccgagagtctaccattcatacagctcatcaattcctcatggacacgatcttccagccctttttaaaagatgtcaatgagctaagacaggagctggagagacagctggaaatgtggcagccacgtgaatctggaaacccagaggaggagaaggttgcagctgagatgtggcagagttacctgatcttaacagcgcctctttcacaacggttatgtgaagagcttcgtctcatattagagcctacccaggcagccaagctgaaaggagactatcgaactgggaaacgactaaacatacggaaagtcattccatacattgctagtcaatttcggaaagacaagatttggcttcgaaggaccaagcccagtaaacgccagtatcagatttgtttggctatcgatgactcttctagtatggtagacaatcataccaagcagcttgcatttgaatctttggctgtgattggaaatgctctaaccctcctggaagtgggtcagattgcagtgtgtagttttggagaatctgtaaagctgttacacccatttcatgagcagttcagtgattactctgggtcccagattctacgtctctgcaaattccaacaaaagaaaaccaagattgctcagtttctagagtctgttgccaacatgtttgcagctgctcagcagctctcgcagaacatcagttcagaaactgcacaactcctcctggtagtctctgatgggcgaggccttttccttgagggcaaagaaagagtcctggcagcagttcaggctgcccggaatgcaaatatctttgtcatctttgttgtattggacaatcccagttcacgggattctatcttggacattaaagtaccgatatttaaaggacctggagagatgcctgaaatccgatcctacatggaagagttcccattcccatactatatcattcttcgagatgtaaacgcacttcctgagacactcagcgatgccctcagacagtggtttgagttggtgacagcctctgaccacccatagaacagaaagaagagtccaaagtgagacttaactgtggtcagaaggtcacattgcttacccaggtgctcccttttggacaactacaaaaaattttattgtaatatttttattttacaacgtgatcttacagcctacagaatgctctctggctcccggctttgcctgggctgaggtttttataccaaacctggaagcagcagcaggtgcctgaactcgtaactagagaagagttatccttcttccctgccttggaagccctggcctgggaggaggtcataccccaccgttggagcccagctgcctgttttcttttgcaggggatctgggcacctgtgccttgaggagatgctgccaggagcatgggactctgacagtcctttgtataaaggactaaagggagctgcccttttgaccctgttctaagctctgccttgccaagcccatagtgtgtgcccaaaagctgtcaagtggccaagacagctcgtttctggagagtatgagggtgtgttttcttattgtgaaaggaactaccttctcttagagggtaggaagaatgtggtgtgtgtgtgttctcataaagcaactggacattataggtgcccaggtcatctataaaaacgatccttgggctgtgtaaaaatgaagtggcttttcagtatcctctttcacacttgctgcttcgggagactatgcaatgatgggaaggtgattgcccctttatttcattcagtgccatggtccctgttgttgtagtaatttatttgtttagttcatttttttttttcttaacagtcaaggggaagagtgattcctcacactgctttcaagctggactgagccagtctcattctgggaaagaaacgctgtgtccagaactcagcagctccatctattttttccagtcgaaagaaactgatctttaggcagtttttacttggccagaaagcagtgctgaatacttgaaactgtgtgctctgttctacttaatgttctgtcagaatgttcttttgtaggcagtatgtcatgatgtaatcatctatctccttgtctgtttccaagttacactgtgaagtctgcgacccttttgaggtggtcatcaaagacacagattccttgtttaaccaagtgtcccaaagcatgtacctgaagttatatcattttttattctaaaaagctatgcagcttatattctgaaaactattaaaacatataccactgttgttgatgta

SEQ ID NO: 446977 - DNA, 3728 bp, Homo sapiens
atcagccatccatgggataggtccaataggcagaaattatgcatgtctaaaagtcaacccatgcagaagcagtttcttggattgagtgtgatgattgttttttcttcctctgacatttaggaagattctgaacttgttgctaaagatgacaacttggatagtggcaattcaaacaaagataaaagccagcaagataagaaggaagaaaaggaagaagcagaagctgatgatggtggacaaggtgaagacaaaattaatgaacaaatagatgagagggactatgatgaaaatgaggtggacccttaccatggcaatcaggaaaaggtgccagaacccgaggctttggaccttccagatgacttgaaccttgacagtgaagacaagaatggtggtgaggacaccgacaatgaagaaggagaagaagagaatcctttggagataaaagaaaaaccagaagaagcaggtcatgaagctgaggaaagaggagagaccgagaccgaccagaacgaaagtcagagtccacaggagcctgaggaaggccccagtgaagatgacaaggcagaaggggaagaggaaatggacacaggagctgatgaccaagatggagatgctgctcagcatcctgaagaacactctgaggagcagcagcagtctgtggaggaaaaagacaaggaagccgatgaagaaggtggagagaatggccctgctgaccaaggtttccagccccaggaggaagaagaacgggaggactctgatacagaggagcaggtgccagaggctttggagaggaaggagcatgcctcctgtgggcagactggtgtggagaacatgcagaacacacaggccatggagctggctggggccgcacctgagaaggagcaggggaaagaggaacacggaagtggagctgcagatgcaaaccaggcagaaggccatgaatcgaatttcattgcccagttggcctcccagaagcacaccaggaaaaacacacagagttttaagaggaaacctgggcaggctgacaatgaacgttccatgggtgatcacaatgagcgtgtgcacaagaggctgaggactgtggatacggacagccatgccgagcaggggccagctcagcagccccaggcccaggtggaggatgcagatgcattcgagcacattaaacaaggcagtgacgcatacgatgcacagacctatgatgtggccagcaaagaacagcaacagtctgcaaaagactctggcaaagatcaggaagaggaggagatagaggacacccttatggacacagaggagcaggaggagttcaaagcagcagacgtggagcagctgaagccagaggaaatcaagtcgggcaccacagcacccttgggctttgatgagatggaagtggagatccaaactgttaaaacagaggaagaccaagaccccagaacagacaaagcccataaggagacagaaaatgagaaaccagaaagaagccgagagtctaccattcatacagctcatcaattcctcatggacacgatcttccagccctttttaaaagatgtcaatgagctaagacaggagctggagagacagctggaaatgtggcagccacgtgaatctggaaacccagaggaggagaaggttgcagctgagatgtggcagagttacctgatcttaacagcgcctctttcacaacggttatgtgaagagcttcgtctcatattagagcctacccaggcagccaagctgaaaggagactatcgaactgggaaacgactaaacatacggaaagtcattccatacattgctagtcaatttcggaaagacaagatttggcttcgaaggaccaagcccagtaaacgccagtatcagatttgtttggctatcgatgactcttctagtatggtagacaatcataccaagcagcttgcatttgaatctttggctgtgattggaaatgctctaaccctcctggaagtgggtcagattgcagtgtgtagttttggagaatctgtaaagctgttacacccatttcatgagcagttcagtgattactctgggtcccagattctacgtctctgcaaattccaacaaaagaaaaccaagattgctcagtttctagagtctgttgccaacatgtttgcagctgctcagcagctctcgcagaacatcagttcagaaactgcacaactcctcctggtagtctctgatgggcgaggccttttccttgagggcaaagaaagagtcctggcagcagttcaggctgcccggaatgcaaatatctttgtcatctttgttgtattggacaatcccagttcacgggattctatcttggacattaaagtaccgatatttaaaggacctggagagatgcctgaaatccgatcctacatggaagagttcccattcccatactatatcattcttcgagatgtaaacgcacttcctgagacactcagcgatgccctcagacagtggtttgagttggtgacagcctctgaccacccatagaacagaaagaagagtccaaagtgagacttaactgtggtcagaaggtcacattgcttacccaggtgctcccttttggacaactacaaaaaattttattgtaatatttttattttacaacgtgatcttacagcctacagaatgctctctggctcccggctttgcctgggctgaggtttttataccaaacctggaagcagcagcaggtgcctgaactcgtaactagagaagagttatccttcttccctgccttggaagccctggcctgggaggaggtcataccccaccgttggagcccagctgcctgttttcttttgcaggggatctgggcacctgtgccttgaggagatgctgccaggagcatgggactctgacagtcctttgtataaaggactaaagggagctgcccttttgaccctgttctaagctctgccttgccaagcccatagtgtgtgcccaaaagctgtcaagtggccaagacagctcgtttctggagagtatgagggtgtgttttcttattgtgaaaggaactaccttctcttagagggtaggaagaatgtggtgtgtgtgtgttctcataaagcaactggacattataggtgcccaggtcatctataaaaacgatccttgggctgtgtaaaaatgaagtggcttttcagtatcctctttcacacttgctgcttcgggagactatgcaatgatgggaaggtgattgcccctttatttcattcagtgccatggtccctgttgttgtagtaatttatttgtttagttcatttttttttttcttaacagtcaaggggaagagtgattcctcacactgctttcaagctggactgagccagtctcattctgggaaagaaacgctgtgtccagaactcagcagctccatctattttttccagtcgaaagaaactgatctttaggcagtttttacttggccagaaagcagtgctgaatacttgaaactgtgtgctctgttctacttaatgttctgtcagaatgttcttttgtaggcagtatgtcatgatgtaatcatctatctccttgtctgtttccaagttacactgtgaagtctgcgacccttttgaggtggtcatcaaagacacagattccttgtttaaccaagtgtcccaaagcatgtacctgaagttatatcattttttattctaaaaagctatgcagcttatattctgaaaactattaaaacatataccactgttgttgatgta

SEQ ID NO: 446978 - DNA, 1846 bp, Homo sapiens
aggttgctttgtaattcctttatgaaaacttttcacaacctgtttggttattttgatcacacagccaaaaaataactcctgttgtatttggttttcctcccccaagttttggagaatctgtaaagctgttacacccatttcatgagcagttcagtgattactctgggtcccagattctacgtctctgcaaattccaacaaaagaaaaccaagattgctcagtttctagagtctgttgccaacatgtttgcagctgctcagcagctctcgcagaacatcagttcagaaactgcacaactcctcctggtagtctctgatgggcgaggccttttccttgagggcaaagaaagagtcctggcagcagttcaggctgcccggaatgcaaatatctttgtcatctttgttgtattggacaatcccagttcacgggattctatcttggacattaaagtaccgatatttaaaggacctggagagatgcctgaaatccgatcctacatggaagagttcccattcccatactatatcattcttcgagatgtaaacgcacttcctgagacactcagcgatgccctcagacagtggtttgagttggtgacagcctctgaccacccatagaacagaaagaagagtccaaagtgagacttaactgtggtcagaaggtcacattgcttacccaggtgctcccttttggacaactacaaaaaattttattgtaatatttttattttacaacgtgatcttacagcctacagaatgctctctggctcccggctttgcctgggctgaggtttttataccaaacctggaagcagcagcaggtgcctgaactcgtaactagagaagagttatccttcttccctgccttggaagccctggcctgggaggaggtcataccccaccgttggagcccagctgcctgttttcttttgcaggggatctgggcacctgtgccttgaggagatgctgccaggagcatgggactctgacagtcctttgtataaaggactaaagggagctgcccttttgaccctgttctaagctctgccttgccaagcccatagtgtgtgcccaaaagctgtcaagtggccaagacagctcgtttctggagagtatgagggtgtgttttcttattgtgaaaggaactaccttctcttagagggtaggaagaatgtggtgtgtgtgtgttctcataaagcaactggacattataggtgcccaggtcatctataaaaacgatccttgggctgtgtaaaaatgaagtggcttttcagtatcctctttcacacttgctgcttcgggagactatgcaatgatgggaaggtgattgcccctttatttcattcagtgccatggtccctgttgttgtagtaatttatttgtttagttcatttttttttttcttaacagtcaaggggaagagtgattcctcacactgctttcaagctggactgagccagtctcattctgggaaagaaacgctgtgtccagaactcagcagctccatctattttttccagtcgaaagaaactgatctttaggcagtttttacttggccagaaagcagtgctgaatacttgaaactgtgtgctctgttctacttaatgttctgtcagaatgttcttttgtaggcagtatgtcatgatgtaatcatctatctccttgtctgtttccaagttacactgtgaagtctgcgacccttttgaggtggtcatcaaagacacagattccttgtttaaccaagtgtcccaaagcatgtacctgaagttatatcattttttattctaaaaagctatgcagcttatattctgaaaactattaaaacatataccactgttgttgatgta

SEQ ID NO: 446979 - DNA, 3820 bp, Homo sapiens
ccccgcgtccgcccacgcgtccgcaaagagactttcaactagtgccatttgtgagtctctttgctcaacctccatccctggaagaatgaacaaagagactcacaaatggcactagttgaaagtctggaatatgtaagaggagaaattagtaaagccatggctgactttactacctggaagacccatctgcttacttcagatagccaaggaggaaatcaaatgttggacgaaggatttgtggaagatttttcagagcaaatggaaattgccatccgagccatcctctgtgccatccagaacttagaagaaagaaagaatgaaaaagcagaggagaacactgaccaagcaagcccacaagaagattatgcaggctttgagagactgcaatcaggacatctaacaaaactcttagaggatgacttctgggccgatgtgagcactttgcacgtgcagaaaataatttctgccatctccgagctgttggagaggctgaaatcgtacggtgaggatggcacagcagcaaagcacctgttcttcagccaatcctgttccttgctggtgcgcctggtgccggtcctctccagctactcagacctcgtcctcttcttcctgaccatgtctttagcaactcaccgtagtactgcaaagctgctctctgtgcttgcccaggtctttacagagcttgcccagaagggattttgcttgcccaaagaatttatggaagattcagctggagagggagcaactgagttccatgactatgagggaggtggaattggagaaggcgagggcatgaaggatgtgagtgaccagatcggaaatgaagaacaggtggaagatacatttcagaagggtcaagaaaaagacaaagaggatcctgattcaaaatctgatattaagggcgaggataatgccattgagatgtcggaagattttgatgggaaaatgcatgatggggagcttgaagaacaagaagaggatgatgagaaatcagatagtgagggcggagacctggataaacacatgggcgatctcaatggtgaggaagctgacaaactagatgagaggctttggggtgatgatgatgaggaggaagatgaggaggaagaagacaataaaactgaagaaacaggaccaggaatggatgaggaagattctgaacttgttgctaaagatgacaacttggatagtggcaattcaaacaaagataaaagccagcaagataagaaggaagaaaaggaagaagcagaagctgatgatggtggacaaggtgaagacaaaattaatgaacaaatagatgagagggactatgatgaaaatgaggtggacccttaccatggcaatcaggaaaaggtgccagaacccgaggctttggaccttccagatgacttgaaccttgacagtgaagacaagaatggtggtgaggacaccgacaatgaagaaggagaagaagagaatcctttggagataaaagaaaaaccagaagaagcaggtcatgaagctgaggaaagaggagagaccgagaccgaccagaacgaaagtcagagtccacaggagcctgaggaaggccccagtgaagatgacaaggcagaaggggaagaggaaatggacacaggagctgatgaccaagatggagatgctgctcagcatcctgaagaacactctgaggagcagcagcagtctgtggaggaaaaagacaaggaagccgatgaagaaggtggagagaatggccctgctgaccaaggtttccagccccaggaggaagaagaacgggaggactctgatacagaggagcaggtgccagaggctttggagaggaaggagcatgcctcctgtgggcagactggtgtggagaacatgcagaacacacaggccatggagctggctggggccgcacctgagaaggagcaggggaaagaggaacacggaagtggagctgcagatgcaaaccaggcagaaggccatgaatcgaatttcattgcccagttggcctcccagaagcacaccaggaaaaacacacagagttttaagaggaaacctgggcaggctgacaatgaacgttccatgggtgatcacaatgagcgtgtgcacaagaggctgaggactgtggatacggacagccatgccgagcaggggccagctcagcagccccaggcccaggtggaggatgcagatgcattcgagcacattaaacaaggcagtgacgcatacgatgcacagacctatgatgtggccagcaaagaacagcaacagtctgcaaaagactctggcaaagatcaggaagaggaggagatagaggacacccttatggacacagaggagcaggaggagttcaaagcagcagacgtggagcagctgaagccagaggaaatcaagtcgggcaccacagcacccttgggctttgatgagatggaagtggagatccaaactgttaaaacagaggaagaccaagaccccagaacagacaaagcccataaggagacagaaaatgagaaaccagaaagaagccgagagtctaccattcatacagctcatcaattcctcatggacacgatcttccagccctttttaaaagatgtcaatgagctaagacaggagctggagagacagctggaaatgtggcagccacgtgaatctggaaacccagaggaggagaaggttgcagctgagatgtggcagagttacctgatcttaacagcgcctctttcacaacggttatgtgaagagcttcgtctcatattagagcctacccaggcagccaagctgaaaggagactatcgaactgggaaacgactaaacatacggaaagtcattccatacattgctagtcaatttcggaaagacaagatttggcttcgaaggaccaagcccagtaaacgccagtatcagatttgtttggctatcgatgactcttctagtatggtagacaatcataccaagcagcttgcatttgaatctttggctgtgattggaaatgctctaaccctcctggaagtgggtcagattgcagtgtgtagttttggagaatctgtaaagctgttacacccatttcatgagcagttcagtgattactctgggtcccagattctacgtctctgcaaattccaacaaaagaaaaccaagattgctcaggattctatcttggacattaaagtaccgatatttaaaggacctggagagatgcctgaaatccgatcctacatggaagagttcccattcccatactatatcattcttcgagatgtaaacgcacttcctgagacactcagcgatgccctcagacagtggtttgagttggtgacagcctctgaccacccatagaacagaaagaagagtccaaagtgagacttaactgtggtcagaaggtcacattgcttacccagtcaaggggaagagtgattcctcacactgctttcaagctggactgagccagtctcattctgggaaagaaacgctgtgtccagaactcagcagctccatctattttttccagtcgaaagaaactgatctttaggcagtttttacttggccagaaagcagtgctgaatacttgaaactgtgtgctctgttctacttaatgttctgtcagaatgttcttttgtaggcagtatgtcatgatgtaatcatctatctccttgtctgtttccaagttacactgtgaagtctgcgacccttttgaggtggtcatcaaagacacagattccttgtttaaccaagtgtcccaaagcatgtacctgaagttatatcattttttattctaaaaagctatgcagcttatattctgaaaactattaaaacatataccactgttgttgatgta

SEQ ID NO: 446980 - DNA, 2789 bp, Homo sapiens
ccccgcgtccgcccacgcgtccgcaaagagactttcaactagtgccatttgtgagtctctttgctcaacctccatccctggaagaatgaacaaagagactcacaaatggcactagttgaaagtctggaatatgtaagaggagaaattagtaaagccatggctgactttactacctggaagacccatctgcttacttcagatagccaaggaggaaatcaaatgttggacgaaggatttgtggaagatttttcagagcaaatggaaattgccatccgagccatcctctgtgccatccagaacttagaagaaagaaagaatgaaaaagcagaggagaacactgaccaagcaagcccacaagaagattatgcaggctttgagagactgcaatcaggacatctaacaaaactcttagaggatgacttctgggccgatgtgagcactttgcacgtgcagaaaataatttctgccatctccgagctgttggagaggctgaaatcgtacggtgaggatggcacagcagcaaagcacctgttcttcagccaatcctgttccttgctggtgcgcctggtgccggtcctctccagctactcagacctcgtcctcttcttcctgaccatgtctttagcaactcaccgtagtactgcaaagctgctctctgtgcttgcccaggtctttacagagcttgcccagaagggattttgcttgcccaaagaatttatggaagattcagctggagagggagcaactgagttccatgactatgagggaggtggaattggagaaggcgagggcatgaaggatgtgagtgaccagatcggaaatgaagaacaggtggaagatacatttcagaagggtcaagaaaaagacaaagaggatcctgattcaaaatctgatattaagggcgaggataatgccattgagatgtcggaagattttgatgggaaaatgcatgatggggagcttgaagaacaagaagaggatgatgagaaatcagatagtgagggcggagacctggataaacacatgggcgatctcaatggtgaggaagctgacaaactagatgagaggctttggggtgatgatgatgaggaggaagatgaggaggaagaagacaataaaactgaagaaacaggaccaggaatggatgaggaagattctgaacttgttgctaaagatgacaacttggatagtggcaattcaaacaaagataaaagccagcaagataagaaggaagaaaaggaagaagcagaagctgatgatggtggacaaggtgaagacaaaattaatgaacaaatagatgagagggactatgatgaaaatgaggtggacccttaccatggcaatcaggaaaaggtgccagaacccgaggctttggaccttccagatgacttgaaccttgacagtgaagacaagaatggtggtgaggacaccgacaatgaagaaggagaagaagagaatcctttggagataaaagaaaaaccagaagaagcaggtcatgaagctgaggaaagaggagagaccgagaccgaccagaacgaaagtcagagtccacaggagcctgaggaaggccccagtgaagatgacaaggcagaaggggaagaggaaatggacacaggagctgatgaccaagatggagatgctgctcagcatcctgaagaacactctgaggagcagcagcagtctgtggaggaaaaagacaaggaagccgatgaagaaggtggagagaatggccctgctgaccaaggtttccagccccaggaggaagaagaacgggaggactctgatacagaggagcaggtgccagaggctttggagaggaaggagcatgcctcctgtgggcagactggtgtggagaacatgcagaacacacaggccatggagctggctggggccgcacctgagaaggagcaggggaaagaggaacacggaagtggagctgcagatgcaaaccaggcagaaggccatgaatcgaatttcattgcccagttggcctcccagaagcacaccaggaaaaacacacagagttttaagaggaaacctgggcaggctgacaatgaacgttccatgggtgatcacaatgagcgtgtgcacaagaggctgaggactgtggatacggacagccatgccgagcaggggccagctcagcagccccaggcccaggtggaggatgcagatgcattcgagcacattaaacaaggcagtgacgcatacgatgcacagacctatgatgtggccagaattaacggggcaattcctaacccctgttggtcctcagaatcacatggcctatgcacactcccgctaaaccactgaagtccaatttctgggagctcagccagggaatgtgtatttttaaacaagccccctaggttactctgataagtgcaaagtcagagagcgctgctctcatgcactgagcctgagcactcttctattaataaaaaaggagaggagaatcctgggttgggtgcccttcgccttctggcggcagaagagcagagccaggctgtaagcacctgcacccaccgctgggctcaggagttgcgctggagaatagaagggctaatttagtcattcatgcctttttagagcaaattacatgtggagaaggtggggcacactgaattttattttagccaaatgccccttatctccttatacaattgatatttttatattgaacattagaggattggtcatttgtcatcaagtcgtctgtaatacagaaaacgataaatacaacctaacagttcaaacatgacgagttaaataaatgatggttaaaaata

SEQ ID NO: 446981 - DNA, 547 bp, Homo sapiens
attgtcacaagaggcaatgaaggtcattgtataatgataaagaggtcaatttatcaagatgatacaattctaaatatatttgccaccaattttggagcacataaatatgtaaagaaaaaatataactgaagggagaaatagatagcagtacagtaatcataggggtcttcagtgctttcaataatggagaaatcatctagacagaaaatcaataaagaaacagtggatttgaacaacactagacaaaatggacctgatatacagaacattccattcaacagtagcagaatatgcacatttttctcactcaaacatgtaacattctccaggacagattatttgttaggccacaagataagttttaacaaatttaaaattaaaattatatcaagtatgttttctgtcaacagtggcatgaaaccataaatccgtaacaggaggaaaattggaaaattcacaaatatgtggaaattaagcaacacactcctgaacaaccaaaggtcaaagaagaaatgaaaggggaagtaaaaaatatcttgaaacaaac

SEQ ID NO: 446982 - DNA, 5414 bp, Homo sapiens
ggaacagcaggcgagcagtgtgactggggcaggaaagagaagggagggagaggagggtgtagaagggggttaggtcagggaggtttggggctggatcaggtcgtcggtcttgcgggctggtgtaagcgcagaaagcaggcgaacccgcggcgcaataacgttacaaattataatactgtggtagaaacaaattcagattcagatgatgaagacaaactgcatattgtggaagaagaaagtgttacagatgcagctgactgtgaaggtgtaccagaggatgacctgccaacagaccagacagtgttaccagggaggagcagtgaaagagaagggaatgctaagaactgctgggaggatgacagaaaggaagggcaagaaatcctggggcctgaagctcaggcagatgaagcaggatgtacagtaaaagatgatgaatgcgagtcagatgcagaaaatgagcaaaaccatgatcctaatgttgaagagtttctacaacaacaagacactgctgtcatttttcctgaggcacctgaagaggaccagaggcagggcacaccagaagccagtggtcatgatgaaaatggaacaccagatgcattttcacaattactcacctgtccatattgtgatagaggctataaacgctttacctctctgaaagaacacattaaatatcgtcatgaaaagaatgaagataactttagttgctccctgtgcagttacacctttgcatacagaacccaacttgaacgtcacatgacatcacataaatcaggaagagatcaaagacatgtgacgcagtctgggtgtaatcgtaaattcaaatgcactgagtgtggaaaagctttcaaatacaaacatcacctaaaagagcacttaagaattcacagtggagagaagccatatgaatgcccaaactgcaagaaacgcttttcccattctggctcctatagctcacacataagcagtaagaaatgtatcagcttgatacctgtgaatgggcgaccaagaacaggactcaagacatctcagtgttcttcaccgtctctttcagcatcaccaggcagtcccacacgaccacagatacggcaaaagatagagaataaaccccttcaagaacaactttctgttaaccaaattaaaactgaacctgtggattatgaattcaaacccatagtggttgcttcaggaatcaactgttcaacccctttacaaaatggggttttcactggtggtggcccattacaggcaaccagttctcctcagggcatggtgcaagctgttgttctgccaacagttggtttggtgtctcccataagtatcaatttaagtgatattcagaatgtacttaaagtggcggtagatggtaatgtaataaggcaagtgttggagaataatcaagccaatcttgcatccaaagaacaagaaacaatcaatgcttcacccatacaacaaggtggccattctgttatttcagccatcagtcttcctttggttgatcaagatggaacaaccaaaattatcatcaactacagtcttgagcagcctagccaacttcaagttgttcctcaaaatttaaaaaaagaaaatccagtcgctacaaacagttgtaaaagtgaaaagttaccagaagatcttactgttaagtctgagaaggacaaaagctttgaagggggggtgaatgatagcacttgtcttctgtgtgatgattgtccaggagatattaatgcacttccagaattaaagcactatgacctaaagcagcctactcagcctcctccactccctgcagcagaagctgagaagcctgagtcctctgtttcatcagctactggagatggcaatttgtctcctagtcagccacctttaaagaacctcttgtctctcctaaaagcatattatgctttgaatgcacaaccaagtgcagaagagctctcaaaaattgctgattcagtaaacctaccactggatgtagtaaaaaagtggtttgaaaagatgcaagctggacagatttcagtgcagtcttctgaaccatcttctcctgaaccaggcaaagtaaatatccctgccaagaacaatgatcagcctcaatctgcaaatgcaaatgaaccccaggacagcacagtaaatctacaaagtcctttgaagatgactaactccccagttttaccagtgggatcaaccaccaatggttccagaagtagtacaccatccccatcacctctaaacctttcctcatccagaaatacacagggttacttgtacacagctgagggtgcacaagaagagccacaagtagaacctcttgatctttcactaccaaagcaacagggagaattattagaaaggtcaactatcactagtgtttaccagaacagtgtttattctgtccaggaagaacccttgaacttgtcttgcgcaaaaaaggagccacaaaaggacagttgtgttacagactcagaaccagttgtaaatgtaatcccaccaagtgccaaccccataaatatcgctatacctacagtcactgcccagttacccacaatcgtggccattgctgaccagaacagtgttccatgcttaagagcgctagctgccaataagcaaacgattctgattccccaggtggcatacacctactcaactacggtcagccctgcagtccaagaaccacccttgaaagtgatccagccaaatggaaatcaggatgaaagacaagatactagctcagaaggagtatcaaatgtagaggatcagaatgactctgattctacaccgcccaaaaagaaaatgcggaagacagaaaatggaatgtatgcttgtgatttgtgtgacaagatattccaaaagagtagttcattattgagacataaatatgaacacacaggtaaaagacctcatgagtgtggaatctgtaaaaaggcatttaaacacaaacatcatttgattgaacacatgcgattacattctggagaaaagccctatcaatgtgacaaatgtggaaagcgcttctcacactctgggtcttattctcaacacatgaatcatcgctactcctactgtaagagagaagcggaagaacgtgacagcacagagcaggaagaggcagggcctgaaatcctctcgaatgagcacgtgggtgccagggcgtctccctcacagggcgactcggacgagagagagagtttgacaagggaagaggatgaagacagtgaaaaagaggaagaggaggaggataaagagatggaagaattgcaggaagaaaaagaatgtgaaaaaccacaaggggatgaggaagaggaggaggaggaggaagaagtggaagaagaagaggtagaagaggcagagaatgagggagaagaagcaaaaactgaaggtctgatgaaggatgacagggctgaaagtcaagcaagcagcttaggacaaaaagtaggcgagagtagtgagcaagtgtctgaagaaaagacaaatgaagcctaatcgtttttctagaaggaaaataaattctaattgataatgaatttcgttcaatattatccttgcttttcatggaaacacagtaacctgtatgctgtgattcctgttcactactgtgtaaagtaaaaactaaaaaaatacaaaatacaaaacacacacacacacacacacacacacacacacacacacacaaaataaatccgggtgtgcctgaacctcagacctagtaatttttcatgcagttttcaaagttaggaacaagtttgtaacatgcagcagattagaaaaccttaatgactcagagagcaacaatacaagaggttaaaggaagctgattaattagatatgcatctggcattgttttatcttatcagtattatcactcttatgttggtttattcttaagctgtacaattgggagaaattttataattttttattggtaaacatatgctaaatccgcttcagtattttattatgttttttaaaatgtgagaacttctgcactacaaaattcccttcacagagaagtataatgtagttccaacccgtgctaactaccttttataaattcagtctagaaggtagtaatttctaatatttagatgtcttagtagagcgtattatcatttaaagtgtattgttagccttaagaaagcagctgatagaagaactgaagtttcttactcacgtggtttaaaatggagttcaaaagattgccattgagttctgattgcagggactaacaatgttaatctgataaggacagcaaaatcatcagaatcagtgtttgtgattgtgtttgaatatgtggtaacatatgaaggatatgacatgaagctttgtatctcctttggccttaagcaagacctgtgtgctgtaagtgccatttctcagtattttcaaggctctaacccgccttcatccaatgtgtggcctacaataactagcatttgttgatttgtctcttgtatcaaaattcccaaataaaacttaaaaccactgactctgtcagagaaactgaaacactgggacatttcatccttcaattcctcggtattgattttatgttgattgattttcagaatttctctacagaaacgaaagggaaattttctaatctgctttatccatgtacttgcatttcagacatggacatgctattgttatttggctcataactgtttccaaatgttagttattatggacccaatttattaacaacattagctgatttttacctatcagtattattttatttcttttagtttatagatctgtgcaacatttttgtactgtatgtcttcaaacctggcagtattaatacccttcttactgacatatgtacttttagttttagaaaacttttatatttatgtgtcttatttttatatttctttatttattacacagtgtagtgtataatactgtagtttgtattaatacaataatatattttagtatgaaaatttggaaagttgataagatttaaagtagagatgcaattggttctcctgcattgagatttgatttaacagtgttatgttaacatttatacttgccttggactgtagaacagaacttaaatgggaatgtattagttttacaactacaatcaagtcattttacctttacccagtttttaatataaaacttaaattttgaaattcactgtgtgactaatagcatgatgctctgcagttttattaagaaatcagcctaaccatacaactctcatttccttagtaagccaaattaggattaacttctataaacagtgttgggaacaatgtttaacattttgtgccaatttgttcctgtattcatgtatgtaagttacagatctgactcttcatttttaagttccttgttacatcatggtcattttctagttttttaccagactcccatctcacaataaaatgcatcaacaagcctga

SEQ ID NO: 446983 - DNA, 6028 bp, Homo sapiens
ggaacagcaggcgagcagtgtgactggggcaggaaagagaagggagggagaggagggtgtagaagggggttaggtcagggaggtttggggctggatcaggtcgtcggtcttgcgggctggtgtaagcgcagaaagcaggcgaacccgcggcgcaataacgttacaaattataatactgtggtagaaacaaattcagattcagatgatgaagacaaactgcatattgtggaagaagaaagtgttacagatgcagctgactgtgaaggtgtaccagaggatgacctgccaacagaccagacagtgttaccagggaggagcagtgaaagagaagggaatgctaagaactgctgggaggatgacagaaaggaagggcaagaaatcctggggcctgaagctcaggcagatgaagcaggatgtacagtaaaagatgatgaatgcgagtcagatgcagaaaatgagcaaaaccatgatcctaatgttgaagagtttctacaacaacaagacactgctgtcatttttcctgaggcacctgaagaggaccagaggcagggcacaccagaagccagtggtcatgatgaaaatggaacaccagatgcattttcacaattactcacctgtccatattgtgatagaggctataaacgctttacctctctgaaagaacacattaaatatcgtcatgaaaagaatgaagataactttagttgctccctgtgcagttacacctttgcatacagaacccaacttgaacgtcacatgacatcacataaatcaggaagagatcaaagacatgtgacgcagtctgggtgtaatcgtaaattcaaatgcactgagtgtggaaaagctttcaaatacaaacatcacctaaaagagcacttaagaattcacagtggagagaagccatatgaatgcccaaactgcaagaaacgcttttcccattctggctcctatagctcacacataagcagtaagaaatgtatcagcttgatacctgtgaatgggcgaccaagaacaggactcaagacatctcagtgttcttcaccgtctctttcagcatcaccaggcagtcccacacgaccacagatacggcaaaagatagagaataaaccccttcaagaacaactttctgttaaccaaattaaaactgaacctgtggattatgaattcaaacccatagtggttgcttcaggaatcaactgttcaacccctttacaaaatggggttttcactggtggtggcccattacaggcaaccagttctcctcagggcatggtgcaagctgttgttctgccaacagttggtttggtgtctcccataagtatcaatttaagtgatattcagaatgtacttaaagtggcggtagatggtaatgtaataaggcaagtgttggagaataatcaagccaatcttgcatccaaagaacaagaaacaatcaatgcttcacccatacaacaaggtggccattctgttatttcagccatcagtcttcctttggttgatcaagatggaacaaccaaaattatcatcaactacagtcttgagcagcctagccaacttcaagttgttcctcaaaatttaaaaaaagaaaatccagtcgctacaaacagttgtaaaagtgaaaagttaccagaagatcttactgttaagtctgagaaggacaaaagctttgaagggggggtgaatgatagcacttgtcttctgtgtgatgattgtccaggagatattaatgcacttccagaattaaagcactatgacctaaagcagcctactcagcctcctccactccctgcagcagaagctgagaagcctgagtcctctgtttcatcagctactggagatggcaatttgtctcctagtcagccacctttaaagaacctcttgtctctcctaaaagcatattatgctttgaatgcacaaccaagtgcagaagagctctcaaaaattgctgattcagtaaacctaccactggatgtagtaaaaaagtggtttgaaaagatgcaagctggacagatttcagtgcagtcttctgaaccatcttctcctgaaccaggcaaagtaaatatccctgccaagaacaatgatcagcctcaatctgcaaatgcaaatgaaccccaggacagcacagtaaatctacaaagtcctttgaagatgactaactccccagttttaccagtgggatcaaccaccaatggttccagaagtagtacaccatccccatcacctctaaacctttcctcatccagaaatacacagggttacttgtacacagctgagggtgcacaagaagagccacaagtagaacctcttgatctttcactaccaaagcaacagggagaattattagaaaggtcaactatcactagtgtttaccagaacagtgtttattctgtccaggaagaacccttgaacttgtcttgcgcaaaaaaggagccacaaaaggacagttgtgttacagactcagaaccagttgtaaatgtaatcccaccaagtgccaaccccataaatatcgctatacctacagtcactgcccagttacccacaatcgtggccattgctgaccagaacagtgttccatgcttaagagcgctagctgccaataagcaaacgattctgattccccaggtggcatacacctactcaactacggtcagccctgcagtccaagaaccacccttgaaagtgatccagccaaatggaaatcaggatgaaagacaagatactagctcagaaggagtatcaaatgtagaggatcagaatgactctgattctacaccgcccaaaaagaaaatgcggaagacagaaaatggaatgtatgcttgtgatttgtgtgacaagatattccaaaagagtagttcattattgagacataaatatgaacacacaggtaaaagacctcatgagtgtggaatctgtaaaaaggcatttaaacacaaacatcatttgattgaacacatgcgattacattctggagaaaagccctatcaatgtgacaaatgtggaaagcgcttctcacactctgggtcttattctcaacacatgaatcatcgctactcctactgtaagagagaagcggaagaacgtgacagcacagagcaggaagaggcagggcctgaaatcctctcgaatgagcacgtgggtgccagggcgtctccctcacagggcgactcggacgagagagagagtttgacaagggaagaggatgaagacagtgaaaaagaggaagaggaggaggataaagagatggaagaattgcaggaagaaaaagaatgtgaaaaaccacaaggggatgaggaagaggaggaggaggaggaagaagtggaagaagaagaggtagaagaggcagagaatgagggagaagaagcaaaaactgaaggtctgatgaaggatgacagggctgaaagtcaagcaagcagcttaggacaaaaagtaggcgagagtagtgagcaagtgtctgaagaaaagacaaatgaagcctaatcgtttttctagaaggaaaataaattctaattgataatgaatttcgttcaatattatccttgcttttcatggaaacacagtaacctgtatgctgtgattcctgttcactactgtgtaaagtaaaaactaaaaaaatacaaaatacaaaacacacacacacacacacacacacacacacacacacacacaaaataaatccgggtgtgcctgaacctcagacctagtaatttttcatgcagttttcaaagttaggaacaagtttgtaacatgcagcagattagaaaaccttaatgactcagagagcaacaatacaagaggttaaaggaagctgattaattagatatgcatctggcattgttttatcttatcagtattatcactcttatgttggtttattcttaagctgtacaattgggagaaattttataattttttattggtaaacatatgctaaatccgcttcagtattttattatgttttttaaaatgtgagaacttctgcactacaaaattcccttcacagagaagtataatgtagttccaacccgtgctaactaccttttataaattcagtctagaaggtagtaatttctaatatttagatgtcttagtagagcgtattatcatttaaagtgtattgttagccttaagaaagcagctgatagaagaactgaagtttcttactcacgtggtttaaaatggagttcaaaagattgccattgagttctgattgcagggactaacaatgttaatctgataaggacagcaaaatcatcagaatcagtgtttgtgattgtgtttgaatatgtggtaacatatgaaggatatgacatgaagctttgtatctcctttggccttaagcaagacctgtgtgctgtaagtgccatttctcagtattttcaaggctctaacccgccttcatccaatgtgtggcctacaataactagcatttgttgatttgtctcttgtatcaaaattcccaaataaaacttaaaaccactgactctgtcagagaaactgaaacactgggacatttcatccttcaattcctcggtattgattttatgttgattgattttcagaatttctctacagaaacgaaagggaaattttctaatctgctttatccatgtacttgcatttcagacatggacatgctattgttatttggctcataactgtttccaaatgttagttattatggacccaatttattaacaacattagctgatttttacctatcagtattattttatttcttttagtttatagatctgtgcaacatttttgtactgtatgtcttcaaacctggcagtattaatacccttcttactgacatatgtacttttagttttagaaaacttttatatttatgtgtcttatttttatatttctttatttattacacagtgtagtgtataatactgtagtttgtattaatacaataatatattttagtatgaaaatttggaaagttgataagatttaaagtagagatgcaattggttctcctgcattgagatttgatttaacagtgttatgttaacatttatacttgccttggactgtagaacagaacttaaatgggaatgtattagttttacaactacaatcaagtcattttacctttacccagtttttaatataaaacttaaattttgaaattcactgtgtgactaatagcatgatgctctgcagttttattaagaaatcagcctaaccatacaactctcatttccttagtaagccaaattaggattaacttctataaacagtgttgggaacaatgtttaacattttgtgccaatttgttcctgtattcatgtatgtaagttacagatctgactcttcatttttaagttccttgttacatcatggtcattttctagttttttaccagactcccatctcacaataaaatgcatcaacaagcctgaactgctgtcattcttttcatcattatcagtattttctttggaaaactgtgaaatggggtacattgtcatcctgcatttgattcatcttgagctgaatttgggtaacactaaatgttttagacattctccactaaattatggattttcttgtggctaaatgtttctggagaggtcagagttgacaaaacctcttcacaggttgctccttcttcctgaaatccttaatcctccgcatttcatgcttcaggtcatttcagggaagcctgggtttagatgcctttctgactctcagctcctgcacttctgtcatcatacctctgatactattatttatattccttccccactaggaacaggaaccacatttgtcatagtcactctcacattcctcactgcctaacagggtgcctggcataagttgggacaacagatatttgttgaataaaaatataatttgcatgtttatggagctcagctatgttctcactttttttgcttctaattccagaatatatgttaaatgatctaataatttgattattttcttataagtcttattaaacactagtcataatagacacaataaattatgccttctttttcaaaaaaaaaac

SEQ ID NO: 446984 - DNA, 4924 bp, Homo sapiens
  misc_feature (4841)..(4841): n is a, c, g, or t
  misc_feature (4851)..(4851): n is a, c, g, or t
  misc_feature (4856)..(4856): n is a, c, g, or t
  misc_feature (4858)..(4858): n is a, c, g, or t
attttagacacaagcgagaggatcatggcggatggccccaggtgtaagcgcagaaagcaggcgaacccgcggcgcaataacgttacaaattataatactgtggtagaaacaaattcagattcagatgatgaagacaaactgcatattgtggaagaagaaagtgttacagatgcagctgactgtgaaggtgtaccagaggatgacctgccaacagaccagacagtgttaccagggaggagcagtgaaagagaagggaatgctaagaactgctgggaggatgacagaaaggaagggcaagaaatcctggggcctgaagctcaggcagatgaagcaggatgtacagtaaaagatgatgaatgcgagtcagatgcagaaaatgagcaaaaccatgatcctaatgttgaagagtttctacaacaacaagacactgctgtcatttttcctgaggcacctgaagaggaccagaggcagggcacaccagaagccagtggtcatgatgaaaatggaacaccagatgcattttcacaattactcacctgtccatattgtgatagaggctataaacgctttacctctctgaaagaacacattaaatatcgtcatgaaaagaatgaagataactttagttgctccctgtgcagttacacctttgcatacagaacccaacttgaacgtcacatgacatcacataaatcaggaagagatcaaagacatgtgacgcagtctgggtgtaatcgtaaattcaaatgcactgagtgtggaaaagctttcaaatacaaacatcacctaaaagagcacttaagaattcacagtggagagaagccatatgaatgcccaaactgcaagaaacgcttttcccattctggctcctatagctcacacataagcagtaagaaatgtatcagcttgatacctgtgaatgggcgaccaagaacaggactcaagacatctcagtgttcttcaccgtctctttcagcatcaccaggcagtcccacacgaccacagatacggcaaaagatagagaataaaccccttcaagaacaactttctgttaaccaaattaaaactgaacctgtggattatgaattcaaacccatagtggttgcttcaggaatcaactgttcaacccctttacaaaatggggttttcactggtggtggcccattacaggcaaccagttctcctcagggcatggtgcaagctgttgttctgccaacagttggtttggtgtctcccataagtatcaatttaagtgatattcagaatgtacttaaagtggcggtagatggtaatgtaataaggcaagtgttggagaataatcaagccaatcttgcatccaaagaacaagaaacaatcaatgcttcacccatacaacaaggtggccattctgttatttcagccatcagtcttcctttggttgatcaagatggaacaaccaaaattatcatcaactacagtcttgagcagcctagccaacttcaagttgttcctcaaaatttaaaaaaagaaaatccagtcgctacaaacagttgtaaaagtgaaaagttaccagaagatcttactgttaagtctgagaaggacaaaagctttgaagggggggtgaatgatagcacttgtcttctgtgtgatgattgtccaggagatattaatgcacttccagaattaaagcactatgacctaaagcagcctactcagcctcctccactccctgcagcagaagctgagaagcctgagtcctctgtttcatcagctactggagatggcaatttgtctcctagtcagccacctttaaagaacctcttgtctctcctaaaagcatattatgctttgaatgcacaaccaagtgcagaagagctctcaaaaattgctgattcagtaaacctaccactggatgtagtaaaaaagtggtttgaaaagatgcaagctggacagatttcagtgcagtcttctgaaccatcttctcctgaaccaggcaaagtaaatatccctgccaagaacaatgatcagcctcaatctgcaaatgcaaatgaaccccaggacagcacagtaaatctacaaagtcctttgaagatgactaactccccagttttaccagtgggatcaaccaccaatggttccagaagtagtacaccatccccatcacctctaaacctttcctcatccagaaatacacagggttacttgtacacagctgagggtgcacaagaagagccacaagtagaacctcttgatctttcactaccaaagcaacagggagaattattagaaaggtcaactatcactagtgtttaccagaacagtgtttattctgtccaggaagaacccttgaacttgtcttgcgcaaaaaaggagccacaaaaggacagttgtgttacagactcagaaccagttgtaaatgtaatcccaccaagtgccaaccccataaatatcgctatacctacagtcactgcccagttacccacaatcgtggccattgctgaccagaacagtgttccatgcttaagagcgctagctgccaataagcaaacgattctgattccccaggtggcatacacctactcaactacggtcagccctgcagtccaagaaccacccttgaaagtgatccagccaaatggaaatcaggatgaaagacaagatactagctcagaaggagtatcaaatgtagaggatcagaatgactctgattctacaccgcccaaaaagaaaatgcggaagacagaaaatggaatgtatgcttgtgatttgtgtgacaagatattccaaaagagtagttcattattgagacataaatatgaacacacaggtaaaagacctcatgagtgtggaatctgtaaaaaggcatttaaacacaaacatcatttgattgaacacatgcgattacattctggagaaaagccctatcaatgtgacaaatgtggaaagcgcttctcacactctgggtcttattctcaacacatgaatcatcgctactcctactgtaagagagaagcggaagaacgtgacagcacagagcaggaagaggcagggcctgaaatcctctcgaatgagcacgtgggtgccagggcgtctccctcacagggcgactcggacgagagagagagtttgacaagggaagaggatgaagacagtgaaaaagaggaagaggaggaggataaagagatggaagaattgcaggaagaaaaagaatgtgaaaaaccacaaggggatgaggaagaggaggaggaggaggaagaagtggaagaagaagaggtagaagaggcagagaatgagggagaagaagcaaaaactgaaggtctgatgaaggatgacagggctgaaagtcaagcaagcagcttaggacaaaaagtaggcgagagtagtgagcaagtgtctgaagaaaagacaaatgaagcctaatcgtttttctagaaggaaaataaattctaattgataatgaatttcgttcaatattatccttgcttttcatggaaacacagtaacctgtatgctgtgattcctgttcactactgtgtaaagtaaaaactaaaaaaatacaaaatacaaaacacacacacacacacacacacacacacacacacacacacaaaataaatccgggtgtgcctgaacctcagacctagtaatttttcatgcagttttcaaagttaggaacaagtttgtaacatgcagcagattagaaaaccttaatgactcagagagcaacaatacaagaggttaaaggaagctgattaattagatatgcatctggcattgttttatcttatcagtattatcactcttatgttggtttattcttaagctgtacaattgggagaaattttataattttttattggtaaacatatgctaaatccgcttcagtattttattatgttttttaaaatgtgagaacttctgcactacaaaattcccttcacagagaagtataatgtagttccaacccgtgctaactaccttttataaattcagtctagaaggtagtaatttctaatatttagatgtcttagtagagcgtattatcatttaaagtgtattgttagccttaagaaagcagctgatagaagaactgaagtttcttactcacgtggtttaaaatggagttcaaaagattgccattgagttctgattgcagggactaacaatgttaatctgataaggacagcaaaatcatcagaatcagtgtttgtgattgtgtttgaatatgtggtaacatatgaaggatatgacatgaagctttgtatctcctttggccttaagcaagacctgtgtgctgtaagtgccatttctcagtattttcaaggctctaacccgccttcatccaatgtgtggcctacaataactagcatttgttgatttgtctcttgtatcaaaattcccaaataaaacttaaaaccactgactctgtcagagaaactgaaacactgggacatttcatccttcaattcctcggtattgattttatgttgattgattttcagaatttctctacagaaacgaaagggaaattttctaatctgctttatccatgtacttgcatttcagacatggacatgctattgttatttggctcataactgtttccaaatgttagttattatggacccaatttattaacaacattagctgatttttacctatcagtattattttatttcttttagtttatagatctgtgcaacatttttgtactgtatgtcttcaaacctggcagtattaatacccttcttactgacatatgtacttttagttttagaaaacttttatatttatgtgtcttatttttatatttctttatttattacacagtgtagtgtataaatacctgggtaagttttggnaatttaaatnccaantnaataataatttttaggtaatggaaaaaaattttgggaaaagggttggaattaaggaaattttggta

SEQ ID NO: 446985 - DNA, 6010 bp, Homo sapiens
ggaacagcaggcgagcagtgtgactggggcaggaaagagaagggagggagaggagggtgtagaagggggttaggtcagggaggtttggggctggatcaggtcgtcggtcttgcgggctggtgtaagcgcagaaagcaggcgaacccgcggcgcaataacgttttcagtttaaattctcaactggcaattggccgaaaactcccatctgaagacatgatcatccaaatgtcattttgtgatttggctactgtctgcttgacataggaaagcactatcaagaaagactaatggagtgactatcaaaaggaagtcaatgatttcttaagaatttacaacaaaaccctgtcaaagcagcattcttacgtgagaatttcacttacgggagagttcttacaggatttcaagaaggaaagccctgaagagggacactgatttcctcaactgaatttaaaattgttacatgcagacatttttaaaggacaaccttaaacttccaccacaagaggaatataaagaggtccctcctgcaccaagaaagatctgcagatctttttcagtgttcttggaggtgtggggtgtgagaacttgatcagtttgtgtcagccaccttgttctctaaagggaaagcccctcaaaccattttgtattctgtattacacttcagaaagtgtggaagcaaaggtcatctaatctttaaaagagatgggacaacaaagaaattctagcctttggagacatctagaccagcactatatgttacaaattataatactgtggtagaaacaaattcagattcagatgatgaagacaaactgcatattgtggaagaagaaagtgttacagatgcagctgactgtgaaggtgtaccagaggatgacctgccaacagaccagacagtgttaccagggaggagcagtgaaagagaagggaatgctaagaactgctgggaggatgacagaaaggaagggcaagaaatcctggggcctgaagctcaggcagatgaagcaggatgtacagtaaaagatgatgaatgcgagtcagatgcagaaaatgagcaaaaccatgatcctaatgttgaagagtttctacaacaacaagacactgctgtcatttttcctgaggcacctgaagaggaccagaggcagggcacaccagaagccagtggtcatgatgaaaatggaacaccagatgcattttcacaattactcacctgtccatattgtgatagaggctataaacgctttacctctctgaaagaacacattaaatatcgtcatgaaaagaatgaagataactttagttgctccctgtgcagttacacctttgcatacagaacccaacttgaacgtcacatgacatcacataaatcaggaagagatcaaagacatgtgacgcagtctgggtgtaatcgtaaattcaaatgcactgagtgtggaaaagctttcaaatacaaacatcacctaaaagagcacttaagaattcacagtggagagaagccatatgaatgcccaaactgcaagaaacgcttttcccattctggctcctatagctcacacataagcagtaagaaatgtatcagcttgatacctgtgaatgggcgaccaagaacaggactcaagacatctcagtgttcttcaccgtctctttcagcatcaccaggcagtcccacacgaccacagatacggcaaaagatagagaataaaccccttcaagaacaactttctgttaaccaaattaaaactgaacctgtggattatgaattcaaacccatagtggttgcttcaggaatcaactgttcaacccctttacaaaatggggttttcactggtggtggcccattacaggcaaccagttctcctcagggcatggtgcaagctgttgttctgccaacagttggtttggtgtctcccataagtatcaatttaagtgatattcagaatgtacttaaagtggcggtagatggtaatgtaataaggcaagtgttggagaataatcaagccaatcttgcatccaaagaacaagaaacaatcaatgcttcacccatacaacaaggtggccattctgttatttcagccatcagtcttcctttggttgatcaagatggaacaaccaaaattatcatcaactacagtcttgagcagcctagccaacttcaagttgttcctcaaaatttaaaaaaagaaaatccagtcgctacaaacagttgtaaaagtgaaaagttaccagaagatcttactgttaagtctgagaaggacaaaagctttgaagggggggtgaatgatagcacttgtcttctgtgtgatgattgtccaggagatattaatgcacttccagaattaaagcactatgacctaaagcagcctactcagcctcctccactccctgcagcagaagctgagaagcctgagtcctctgtttcatcagctactggagatggcaatttgtctcctagtcagccacctttaaagaacctcttgtctctcctaaaagcatattatgctttgaatgcacaaccaagtgcagaagagctctcaaaaattgctgattcagtaaacctaccactggatgtagtaaaaaagtggtttgaaaagatgcaagctggacagatttcagtgcagtcttctgaaccatcttctcctgaaccaggcaaagtaaatatccctgccaagaacaatgatcagcctcaatctgcaaatgcaaatgaaccccaggacagcacagtaaatctacaaagtcctttgaagatgactaactccccagttttaccagtgggatcaaccaccaatggttccagaagtagtacaccatccccatcacctctaaacctttcctcatccagaaatacacagggttacttgtacacagctgagggtgcacaagaagagccacaagtagaacctcttgatctttcactaccaaagcaacagggagaattattagaaaggtcaactatcactagtgtttaccagaacagtgtttattctgtccaggaagaacccttgaacttgtcttgcgcaaaaaaggagccacaaaaggacagttgtgttacagactcagaaccagttgtaaatgtaatcccaccaagtgccaaccccataaatatcgctatacctacagtcactgcccagttacccacaatcgtggccattgctgaccagaacagtgttccatgcttaagagcgctagctgccaataagcaaacgattctgattccccaggtggcatacacctactcaactacggtcagccctgcagtccaagaaccacccttgaaagtgatccagccaaatggaaatcaggatgaaagacaagatactagctcagaaggagtatcaaatgtagaggatcagaatgactctgattctacaccgcccaaaaagaaaatgcggaagacagaaaatggaatgtatgcttgtgatttgtgtgacaagatattccaaaagagtagttcattattgagacataaatatgaacacacaggtaaaagacctcatgagtgtggaatctgtaaaaaggcatttaaacacaaacatcatttgattgaacacatgcgattacattctggagaaaagccctatcaatgtgacaaatgtggaaagcgcttctcacactctgggtcttattctcaacacatgaatcatcgctactcctactgtaagagagaagcggaagaacgtgacagcacagagcaggaagaggcagggcctgaaatcctctcgaatgagcacgtgggtgccagggcgtctccctcacagggcgactcggacgagagagagagtttgacaagggaagaggatgaagacagtgaaaaagaggaagaggaggaggataaagagatggaagaattgcaggaagaaaaagaatgtgaaaaaccacaaggggatgaggaagaggaggaggaggaggaagaagtggaagaagaagaggtagaagaggcagagaatgagggagaagaagcaaaaactgaaggtctgatgaaggatgacagggctgaaagtcaagcaagcagcttaggacaaaaagtaggcgagagtagtgagcaagtgtctgaagaaaagacaaatgaagcctaatcgtttttctagaaggaaaataaattctaattgataatgaatttcgttcaatattatccttgcttttcatggaaacacagtaacctgtatgctgtgattcctgttcactactgtgtaaagtaaaaactaaaaaaatacaaaatacaaaacacacacacacacacacacacacacacacacacacacacaaaataaatccgggtgtgcctgaacctcagacctagtaatttttcatgcagttttcaaagttaggaacaagtttgtaacatgcagcagattagaaaaccttaatgactcagagagcaacaatacaagaggttaaaggaagctgattaattagatatgcatctggcattgttttatcttatcagtattatcactcttatgttggtttattcttaagctgtacaattgggagaaattttataattttttattggtaaacatatgctaaatccgcttcagtattttattatgttttttaaaatgtgagaacttctgcactacaaaattcccttcacagagaagtataatgtagttccaacccgtgctaactaccttttataaattcagtctagaaggtagtaatttctaatatttagatgtcttagtagagcgtattatcatttaaagtgtattgttagccttaagaaagcagctgatagaagaactgaagtttcttactcacgtggtttaaaatggagttcaaaagattgccattgagttctgattgcagggactaacaatgttaatctgataaggacagcaaaatcatcagaatcagtgtttgtgattgtgtttgaatatgtggtaacatatgaaggatatgacatgaagctttgtatctcctttggccttaagcaagacctgtgtgctgtaagtgccatttctcagtattttcaaggctctaacccgccttcatccaatgtgtggcctacaataactagcatttgttgatttgtctcttgtatcaaaattcccaaataaaacttaaaaccactgactctgtcagagaaactgaaacactgggacatttcatccttcaattcctcggtattgattttatgttgattgattttcagaatttctctacagaaacgaaagggaaattttctaatctgctttatccatgtacttgcatttcagacatggacatgctattgttatttggctcataactgtttccaaatgttagttattatggacccaatttattaacaacattagctgatttttacctatcagtattattttatttcttttagtttatagatctgtgcaacatttttgtactgtatgtcttcaaacctggcagtattaatacccttcttactgacatatgtacttttagttttagaaaacttttatatttatgtgtcttatttttatatttctttatttattacacagtgtagtgtataatactgtagtttgtattaatacaataatatattttagtatgaaaatttggaaagttgataagatttaaagtagagatgcaattggttctcctgcattgagatttgatttaacagtgttatgttaacatttatacttgccttggactgtagaacagaacttaaatgggaatgtattagttttacaactacaatcaagtcattttacctttacccagtttttaatataaaacttaaattttgaaattcactgtgtgactaatagcatgatgctctgcagttttattaagaaatcagcctaaccatacaactctcatttccttagtaagccaaattaggattaacttctataaacagtgttgggaacaatgtttaacattttgtgccaatttgttcctgtattcatgtatgtaagttacagatctgactcttcatttttaagttccttgttacatcatggtcattttctagttttttaccagactcccatctcacaataaaatgcatcaacaagcctga

SEQ ID NO: 446986 - DNA, 5281 bp, Homo sapiens
attttagacacaagcgagaggatcatggcggatggccccaggtgtaagcgcagaaagcaggcgaacccgcggcgcaataacgttacaaattataatactgtggtagaaacaaattcagattcagatgatgaagacaaactgcatattgtggaagaagaaagtgttacagatgcagctgactgtgaaggtgtaccagaggatgacctgccaacagaccagacagtgttaccagggaggagcagtgaaagagaagggaatgctaagaactgctgggaggatgacagaaaggaagggcaagaaatcctggggcctgaagctcaggcagatgaagcaggatgtacagtaaaagatgatgaatgcgagtcagatgcagaaaatgagcaaaaccatgatcctaatgttgaagagtttctacaacaacaagacactgctgtcatttttcctgaggcacctgaagaggaccagaggcagggcacaccagaagccagtggtcatgatgaaaatggaacaccagatgcattttcacaattactcacctgtccatattgtgatagaggctataaacgctttacctctctgaaagaacacattaaatatcgtcatgaaaagaatgaagataactttagttgctccctgtgcagttacacctttgcatacagaacccaacttgaacgtcacatgacatcacataaatcaggaagagatcaaagacatgtgacgcagtctgggtgtaatcgtaaattcaaatgcactgagtgtggaaaagctttcaaatacaaacatcacctaaaagagcacttaagaattcacagtggagagaagccatatgaatgcccaaactgcaagaaacgcttttcccattctggctcctatagctcacacataagcagtaagaaatgtatcagcttgatacctgtgaatgggcgaccaagaacaggactcaagacatctcagtgttcttcaccgtctctttcagcatcaccaggcagtcccacacgaccacagatacggcaaaagatagagaataaaccccttcaagaacaactttctgttaaccaaattaaaactgaacctgtggattatgaattcaaacccatagtggttgcttcaggaatcaactgttcaacccctttacaaaatggggttttcactggtggtggcccattacaggcaaccagttctcctcagggcatggtgcaagctgttgttctgccaacagttggtttggtgtctcccataagtatcaatttaagtgatattcagaatgtacttaaagtggcggtagatggtaatgtaataaggcaagtgttggagaataatcaagccaatcttgcatccaaagaacaagaaacaatcaatgcttcacccatacaacaaggtggccattctgttatttcagccatcagtcttcctttggttgatcaagatggaacaaccaaaattatcatcaactacagtcttgagcagcctagccaacttcaagttgttcctcaaaatttaaaaaaagaaaatccagtcgctacaaacagttgtaaaagtgaaaagttaccagaagatcttactgttaagtctgagaaggacaaaagctttgaagggggggtgaatgatagcacttgtcttctgtgtgatgattgtccaggagatattaatgcacttccagaattaaagcactatgacctaaagcagcctactcagcctcctccactccctgcagcagaagctgagaagcctgagtcctctgtttcatcagctactggagatggcaatttgtctcctagtcagccacctttaaagaacctcttgtctctcctaaaagcatattatgctttgaatgcacaaccaagtgcagaagagctctcaaaaattgctgattcagtaaacctaccactggatgtagtaaaaaagtggtttgaaaagatgcaagctggacagatttcagtgcagtcttctgaaccatcttctcctgaaccaggcaaagtaaatatccctgccaagaacaatgatcagcctcaatctgcaaatgcaaatgaaccccaggacagcacagtaaatctacaaagtcctttgaagatgactaactccccagttttaccagtgggatcaaccaccaatggttccagaagtagtacaccatccccatcacctctaaacctttcctcatccagaaatacacagggttacttgtacacagctgagggtgcacaagaagagccacaagtagaacctcttgatctttcactaccaaagcaacagggagaattattagaaaggtcaactatcactagtgtttaccagaacagtgtttattctgtccaggaagaacccttgaacttgtcttgcgcaaaaaaggagccacaaaaggacagttgtgttacagactcagaaccagttgtaaatgtaatcccaccaagtgccaaccccataaatatcgctatacctacagtcactgcccagttacccacaatcgtggccattgctgaccagaacagtgttccatgcttaagagcgctagctgccaataagcaaacgattctgattccccaggtggcatacacctactcaactacggtcagccctgcagtccaagaaccacccttgaaagtgatccagccaaatggaaatcaggatgaaagacaagatactagctcagaaggagtatcaaatgtagaggatcagaatgactctgattctacaccgcccaaaaagaaaatgcggaagacagaaaatggaatgtatgcttgtgatttgtgtgacaagatattccaaaagagtagttcattattgagacataaatatgaacacacaggtaaaagacctcatgagtgtggaatctgtaaaaaggcatttaaacacaaacatcatttgattgaacacatgcgattacattctggagaaaagccctatcaatgtgacaaatgtggaaagcgcttctcacactctgggtcttattctcaacacatgaatcatcgctactcctactgtaagagagaagcggaagaacgtgacagcacagagcaggaagaggcagggcctgaaatcctctcgaatgagcacgtgggtgccagggcgtctccctcacagggcgactcggacgagagagagagtttgacaagggaagaggatgaagacagtgaaaaagaggaagaggaggaggataaagagatggaagaattgcaggaagaaaaagaatgtgaaaaaccacaaggggatgaggaagaggaggaggaggaggaagaagtggaagaagaagaggtagaagaggcagagaatgagggagaagaagcaaaaactgaaggtctgatgaaggatgacagggctgaaagtcaagcaagcagcttaggacaaaaagtaggcgagagtagtgagcaagtgtctgaagaaaagacaaatgaagcctaatcgtttttctagaaggaaaataaattctaattgataatgaatttcgttcaatattatccttgcttttcatggaaacacagtaacctgtatgctgtgattcctgttcactactgtgtaaagtaaaaactaaaaaaatacaaaatacaaaacacacacacacacacacacacacacacacacacacacacaaaataaatccgggtgtgcctgaacctcagacctagtaatttttcatgcagttttcaaagttaggaacaagtttgtaacatgcagcagattagaaaaccttaatgactcagagagcaacaatacaagaggttaaaggaagctgattaattagatatgcatctggcattgttttatcttatcagtattatcactcttatgttggtttattcttaagctgtacaattgggagaaattttataattttttattggtaaacatatgctaaatccgcttcagtattttattatgttttttaaaatgtgagaacttctgcacttttataaattcagtctagaaggtagtaatttctaatatttagatgtcttagtagagcgtattatcatttaaagtgtattgttagccttaagaaagcagctgatagaagaactgaagtttcttactcacgtggtttaaaatggagttcaaaagattgccattgagttctgattgcagggactaacaatgttaatctgataaggacagcaaaatcatcagaatcagtgtttgtgattgtgtttgaatatgtggtaacatatgaaggatatgacatgaagctttgtatctcctttggccttaagcaagacctgtgtgctgtaagtgccatttctcagtattttcaaggctctaacccgccttcatccaatgtgtggcctacaataactagcatttgttgatttgtctcttgtatcaaaattcccaaataaaacttaaaaccactgactctgtcagagaaactgaaacactgggacatttcatccttcaattcctcggtattgattttatgttgattgattttcagaatttctctacagaaacgaaagggaaattttctaatctgctttatccatgtacttgcatttcagacatggacatgctattgttatttggctcataactgtttccaaatgttagttattatggacccaatttattaacaacattagctgatttttacctatcagtattattttatttcttttagtttatagatctgtgcaacatttttgtactgtatgtcttcaaacctggcagtattaatacccttcttactgacatatgtacttttagttttagaaaacttttatatttatgtgtcttatttttatatttctttatttattacacagtgtagtgtataatactgtagtttgtattaatacaataatatattttagtatgaaaatttggaaagttgataagatttaaagtagagatgcaattggttctcctgcattgagatttgatttaacagtgttatgttaacatttatacttgccttggactgtagaacagaacttaaatgggaatgtattagttttacaactacaatcaagtcattttacctttacccagtttttaatataaaacttaaattttgaaattcactgtgtgactaatagcatgatgctctgcagttttattaagaaatcagcctaaccatacaactctcatttccttagtaagccaaattaggattaacttctataaacagtgttgggaacaatgtttaacattttgtgccaatttgttcctgtattcatgtatgtaagttacagatctgactcttcatttttaagttccttgttacatcatggtcattttctagttttttaccagactcccatctcacaataaaatgcatcaacaagcctga

SEQ ID NO: 446987 - DNA, 5275 bp, Homo sapiens
attttagacacaagcgagaggatcatggcggatggccccaggtgtaagcgcagaaagcaggcgaacccgcggcgcaataacgttacaaattataatactgtggtagaaacaaattcagattcagatgatgaagacaaactgcatattgtggaagaagaaagtgttacagatgcagctgactgtgaaggtgtaccagaggatgacctgccaacagaccagacagtgttaccagggaggagcagtgaaagagaagggaatgctaagaactgctgggaggatgacagaaaggaagggcaagaaatcctggggcctgaagctcaggcagatgaagcaggatgtacagtaaaagatgatgaatgcgagtcagatgcagaaaatgagcaaaaccatgatcctaatgttgaagagtttctacaacaacaagacactgctgtcatttttcctgaggcacctgaagaggaccagaggcagggcacaccagaagccagtggtcatgatgaaaatggaacaccagatgcattttcacaattactcacctgtccatattgtgatagaggctataaacgctttacctctctgaaagaacacattaaatatcgtcatgaaaagaatgaagataactttagttgctccctgtgcagttacacctttgcatacagaacccaacttgaacgtcacatgacatcacataaatcaggaagagatcaaagacatgtgacgcagtctgggtgtaatcgtaaattcaaatgcactgagtgtggaaaagctttcaaatacaaacatcacctaaaagagcacttaagaattcacagtggagagaagccatatgaatgcccaaactgcaagaaacgcttttcccattctggctcctatagctcacacataagcagtaagaaatgtatcagcttgatacctgtgaatgggcgaccaagaacaggactcaagacatctcagtgttcttcaccgtctctttcagcatcaccaggcagtcccacacgaccacagatacggcaaaagatagagaataaaccccttcaagaacaactttctgttaaccaaattaaaaccctttacaaaatggggttttcactggtggtggcccattacaggcaaccagttctcctcagggcatggtgcaagctgttgttctgccaacagttggtttggtgtctcccataagtatcaatttaagtgatattcagaatgtacttaaagtggcggtagatggtaatgtaataaggcaagtgttggagaataatcaagccaatcttgcatccaaagaacaagaaacaatcaatgcttcacccatacaacaaggtggccattctgttatttcagccatcagtcttcctttggttgatcaagatggaacaaccaaaattatcatcaactacagtcttgagcagcctagccaacttcaagttgttcctcaaaatttaaaaaaagaaaatccagtcgctacaaacagttgtaaaagtgaaaagttaccagaagatcttactgttaagtctgagaaggacaaaagctttgaagggggggtgaatgatagcacttgtcttctgtgtgatgattgtccaggagatattaatgcacttccagaattaaagcactatgacctaaagcagcctactcagcctcctccactccctgcagcagaagctgagaagcctgagtcctctgtttcatcagctactggagatggcaatttgtctcctagtcagccacctttaaagaacctcttgtctctcctaaaagcatattatgctttgaatgcacaaccaagtgcagaagagctctcaaaaattgctgattcagtaaacctaccactggatgtagtaaaaaagtggtttgaaaagatgcaagctggacagatttcagtgcagtcttctgaaccatcttctcctgaaccaggcaaagtaaatatccctgccaagaacaatgatcagcctcaatctgcaaatgcaaatgaaccccaggacagcacagtaaatctacaaagtcctttgaagatgactaactccccagttttaccagtgggatcaaccaccaatggttccagaagtagtacaccatccccatcacctctaaacctttcctcatccagaaatacacagggttacttgtacacagctgagggtgcacaagaagagccacaagtagaacctcttgatctttcactaccaaagcaacagggagaattattagaaaggtcaactatcactagtgtttaccagaacagtgtttattctgtccaggaagaacccttgaacttgtcttgcgcaaaaaaggagccacaaaaggacagttgtgttacagactcagaaccagttgtaaatgtaatcccaccaagtgccaaccccataaatatcgctatacctacagtcactgcccagttacccacaatcgtggccattgctgaccagaacagtgttccatgcttaagagcgctagctgccaataagcaaacgattctgattccccaggtggcatacacctactcaactacggtcagccctgcagtccaagaaccacccttgaaagtgatccagccaaatggaaatcaggatgaaagacaagatactagctcagaaggagtatcaaatgtagaggatcagaatgactctgattctacaccgcccaaaaagaaaatgcggaagacagaaaatggaatgtatgcttgtgatttgtgtgacaagatattccaaaagagtagttcattattgagacataaatatgaacacacaggtaaaagacctcatgagtgtggaatctgtaaaaaggcatttaaacacaaacatcatttgattgaacacatgcgattacattctggagaaaagccctatcaatgtgacaaatgtggaaagcgcttctcacactctgggtcttattctcaacacatgaatcatcgctactcctactgtaagagagaagcggaagaacgtgacagcacagagcaggaagaggcagggcctgaaatcctctcgaatgagcacgtgggtgccagggcgtctccctcacagggcgactcggacgagagagagagtttgacaagggaagaggatgaagacagtgaaaaagaggaagaggaggaggataaagagatggaagaattgcaggaagaaaaagaatgtgaaaaaccacaaggggatgaggaagaggaggaggaggaggaagaagtggaagaagaagaggtagaagaggcagagaatgagggagaagaagcaaaaactgaaggtctgatgaaggatgacagggctgaaagtcaagcaagcagcttaggacaaaaagtaggcgagagtagtgagcaagtgtctgaagaaaagacaaatgaagcctaatcgtttttctagaaggaaaataaattctaattgataatgaatttcgttcaatattatccttgcttttcatggaaacacagtaacctgtatgctgtgattcctgttcactactgtgtaaagtaaaaactaaaaaaatacaaaatacaaaacacacacacacacacacacacacacacacacacacacacaaaataaatccgggtgtgcctgaacctcagacctagtaatttttcatgcagttttcaaagttaggaacaagtttgtaacatgcagcagattagaaaaccttaatgactcagagagcaacaatacaagaggttaaaggaagctgattaattagatatgcatctggcattgttttatcttatcagtattatcactcttatgttggtttattcttaagctgtacaattgggagaaattttataattttttattggtaaacatatgctaaatccgcttcagtattttattatgttttttaaaatgtgagaacttctgcactacaaaattcccttcacagagaagtataatgtagttccaacccgtgctaactaccttttataaattcagtctagaaggtagtaatttctaatatttagatgtcttagtagagcgtattatcatttaaagtgtattgttagccttaagaaagcagctgatagaagaactgaagtttcttactcacgtggtttaaaatggagttcaaaagattgccattgagttctgattgcagggactaacaatgttaatctgataaggacagcaaaatcatcagaatcagtgtttgtgattgtgtttgaatatgtggtaacatatgaaggatatgacatgaagctttgtatctcctttggccttaagcaagacctgtgtgctgtaagtgccatttctcagtattttcaaggctctaacccgccttcatccaatgtgtggcctacaataactagcatttgttgatttgtctcttgtatcaaaattcccaaataaaacttaaaaccactgactctgtcagagaaactgaaacactgggacatttcatccttcaattcctcggtattgattttatgttgattgattttcagaatttctctacagaaacgaaagggaaattttctaatctgctttatccatgtacttgcatttcagacatggacatgctattgttatttggctcataactgtttccaaatgttagttattatggacccaatttattaacaacattagctgatttttacctatcagtattattttatttcttttagtttatagatctgtgcaacatttttgtactgtatgtcttcaaacctggcagtattaatacccttcttactgacatatgtacttttagttttagaaaacttttatatttatgtgtcttatttttatatttctttatttattacacagtgtagtgtataatactgtagtttgtattaatacaataatatattttagtatgaaaatttggaaagttgataagatttaaagtagagatgcaattggttctcctgcattgagatttgatttaacagtgttatgttaacatttatacttgccttggactgtagaacagaacttaaatgggaatgtattagttttacaactacaatcaagtcattttacctttacccagtttttaatataaaacttaaattttgaaattcactgtgtgactaatagcatgatgctctgcagttttattaagaaatcagcctaaccatacaactctcatttccttagtaagccaaattaggattaacttctataaacagtgttgggaacaatgtttaacattttgtgccaatttgttcctgtattcatgtatgtaagttacagatctgactcttcatttttaagttccttgttacatcatggtcattttctagttttttaccagactcccatctcacaataaaatgcatcaacaagcctga

SEQ ID NO: 446988 - DNA, 5275 bp, Homo sapiens
attttagacacaagcgagaggatcatggcggatggccccaggtgtaagcgcagaaagcaggcgaacccgcggcgcaataacgttacaaattataatactgtggtagaaacaaattcagattcagatgatgaagacaaactgcatattgtggaagaagaaagtgttacagatgcagctgactgtgaaggtgtaccagaggatgacctgccaacagaccagacagtgttaccagggaggagcagtgaaagagaagggaatgctaagaactgctgggaggatgacagaaaggaagggcaagaaatcctggggcctgaagctcaggcagatgaagcaggatgtacagtaaaagatgatgaatgcgagtcagatgcagaaaatgagcaaaaccatgatcctaatgttgaagagtttctacaacaacaagacactgctgtcatttttcctgaggcacctgaagaggaccagaggcagggcacaccagaagccagtggtcatgatgaaaatggaacaccagatgcattttcacaattactcacctgtccatattgtgatagaggctataaacgctttacctctctgaaagaacacattaaatatcgtcatgaaaagaatgaagataactttagttgctccctgtgcagttacacctttgcatacagaacccaacttgaacgtcacatgacatcacataaatcaggaagagatcaaagacatgtgacgcagtctgggtgtaatcgtaaattcaaatgcactgagtgtggaaaagctttcaaatacaaacatcacctaaaagagcacttaagaattcacagtggagagaagccatatgaatgcccaaactgcaagaaacgcttttcccattctggctcctatagctcacacataagcagtaagaaatgtatcagcttgatacctgtgaatgggcgaccaagaacaggactcaagacatctcagtgttcttcaccgtctctttcagcatcaccaggcagtcccacacgaccacagatacggcaaaagatagagaataaaccccttcaagaacaactttctgttaaccaaattaaaactgaacctgtggattatgaattcaaacccatagtggttgcttcaggaatcaactgttcaacggcatggtgcaagctgttgttctgccaacagttggtttggtgtctcccataagtatcaatttaagtgatattcagaatgtacttaaagtggcggtagatggtaatgtaataaggcaagtgttggagaataatcaagccaatcttgcatccaaagaacaagaaacaatcaatgcttcacccatacaacaaggtggccattctgttatttcagccatcagtcttcctttggttgatcaagatggaacaaccaaaattatcatcaactacagtcttgagcagcctagccaacttcaagttgttcctcaaaatttaaaaaaagaaaatccagtcgctacaaacagttgtaaaagtgaaaagttaccagaagatcttactgttaagtctgagaaggacaaaagctttgaagggggggtgaatgatagcacttgtcttctgtgtgatgattgtccaggagatattaatgcacttccagaattaaagcactatgacctaaagcagcctactcagcctcctccactccctgcagcagaagctgagaagcctgagtcctctgtttcatcagctactggagatggcaatttgtctcctagtcagccacctttaaagaacctcttgtctctcctaaaagcatattatgctttgaatgcacaaccaagtgcagaagagctctcaaaaattgctgattcagtaaacctaccactggatgtagtaaaaaagtggtttgaaaagatgcaagctggacagatttcagtgcagtcttctgaaccatcttctcctgaaccaggcaaagtaaatatccctgccaagaacaatgatcagcctcaatctgcaaatgcaaatgaaccccaggacagcacagtaaatctacaaagtcctttgaagatgactaactccccagttttaccagtgggatcaaccaccaatggttccagaagtagtacaccatccccatcacctctaaacctttcctcatccagaaatacacagggttacttgtacacagctgagggtgcacaagaagagccacaagtagaacctcttgatctttcactaccaaagcaacagggagaattattagaaaggtcaactatcactagtgtttaccagaacagtgtttattctgtccaggaagaacccttgaacttgtcttgcgcaaaaaaggagccacaaaaggacagttgtgttacagactcagaaccagttgtaaatgtaatcccaccaagtgccaaccccataaatatcgctatacctacagtcactgcccagttacccacaatcgtggccattgctgaccagaacagtgttccatgcttaagagcgctagctgccaataagcaaacgattctgattccccaggtggcatacacctactcaactacggtcagccctgcagtccaagaaccacccttgaaagtgatccagccaaatggaaatcaggatgaaagacaagatactagctcagaaggagtatcaaatgtagaggatcagaatgactctgattctacaccgcccaaaaagaaaatgcggaagacagaaaatggaatgtatgcttgtgatttgtgtgacaagatattccaaaagagtagttcattattgagacataaatatgaacacacaggtaaaagacctcatgagtgtggaatctgtaaaaaggcatttaaacacaaacatcatttgattgaacacatgcgattacattctggagaaaagccctatcaatgtgacaaatgtggaaagcgcttctcacactctgggtcttattctcaacacatgaatcatcgctactcctactgtaagagagaagcggaagaacgtgacagcacagagcaggaagaggcagggcctgaaatcctctcgaatgagcacgtgggtgccagggcgtctccctcacagggcgactcggacgagagagagagtttgacaagggaagaggatgaagacagtgaaaaagaggaagaggaggaggataaagagatggaagaattgcaggaagaaaaagaatgtgaaaaaccacaaggggatgaggaagaggaggaggaggaggaagaagtggaagaagaagaggtagaagaggcagagaatgagggagaagaagcaaaaactgaaggtctgatgaaggatgacagggctgaaagtcaagcaagcagcttaggacaaaaagtaggcgagagtagtgagcaagtgtctgaagaaaagacaaatgaagcctaatcgtttttctagaaggaaaataaattctaattgataatgaatttcgttcaatattatccttgcttttcatggaaacacagtaacctgtatgctgtgattcctgttcactactgtgtaaagtaaaaactaaaaaaatacaaaatacaaaacacacacacacacacacacacacacacacacacacacacaaaataaatccgggtgtgcctgaacctcagacctagtaatttttcatgcagttttcaaagttaggaacaagtttgtaacatgcagcagattagaaaaccttaatgactcagagagcaacaatacaagaggttaaaggaagctgattaattagatatgcatctggcattgttttatcttatcagtattatcactcttatgttggtttattcttaagctgtacaattgggagaaattttataattttttattggtaaacatatgctaaatccgcttcagtattttattatgttttttaaaatgtgagaacttctgcactacaaaattcccttcacagagaagtataatgtagttccaacccgtgctaactaccttttataaattcagtctagaaggtagtaatttctaatatttagatgtcttagtagagcgtattatcatttaaagtgtattgttagccttaagaaagcagctgatagaagaactgaagtttcttactcacgtggtttaaaatggagttcaaaagattgccattgagttctgattgcagggactaacaatgttaatctgataaggacagcaaaatcatcagaatcagtgtttgtgattgtgtttgaatatgtggtaacatatgaaggatatgacatgaagctttgtatctcctttggccttaagcaagacctgtgtgctgtaagtgccatttctcagtattttcaaggctctaacccgccttcatccaatgtgtggcctacaataactagcatttgttgatttgtctcttgtatcaaaattcccaaataaaacttaaaaccactgactctgtcagagaaactgaaacactgggacatttcatccttcaattcctcggtattgattttatgttgattgattttcagaatttctctacagaaacgaaagggaaattttctaatctgctttatccatgtacttgcatttcagacatggacatgctattgttatttggctcataactgtttccaaatgttagttattatggacccaatttattaacaacattagctgatttttacctatcagtattattttatttcttttagtttatagatctgtgcaacatttttgtactgtatgtcttcaaacctggcagtattaatacccttcttactgacatatgtacttttagttttagaaaacttttatatttatgtgtcttatttttatatttctttatttattacacagtgtagtgtataatactgtagtttgtattaatacaataatatattttagtatgaaaatttggaaagttgataagatttaaagtagagatgcaattggttctcctgcattgagatttgatttaacagtgttatgttaacatttatacttgccttggactgtagaacagaacttaaatgggaatgtattagttttacaactacaatcaagtcattttacctttacccagtttttaatataaaacttaaattttgaaattcactgtgtgactaatagcatgatgctctgcagttttattaagaaatcagcctaaccatacaactctcatttccttagtaagccaaattaggattaacttctataaacagtgttgggaacaatgtttaacattttgtgccaatttgttcctgtattcatgtatgtaagttacagatctgactcttcatttttaagttccttgttacatcatggtcattttctagttttttaccagactcccatctcacaataaaatgcatcaacaagcctga

SEQ ID NO: 446989 - DNA, 682 bp, Homo sapiens
gcaataatatattttagtattaatacaaactacagtattatacactacactggtaataaataaagaaagtataaaaataagacacataaatataaaagtttctaaaactaaaagtacatatgtcttatttttatatttctttatttattacacagtgtagtgtataatactgtagtttgtattaatacaataatatattttagtatgaaaatttggaaagttgataagatttaaagtagagatgcaattggttctcctgcattgagatttgatttaacagtgttatgttaacatttatacttgccttggactgtagaacagaacttaaatgggaatgtattagttttacaactacaatcaagtcattttacctttacccagtttttaatataaaacttaaattttgaaattcactgtgtgactaatagcatgatgctctgcagttttattaagaaatcagcctaaccatacaactctcatttccttagtaagccaaattaggattaacttctataaacagtgttgggaacaatgtttaacattttgtgccaatttgttcctgtattcatgtatgtaagttacagatctgactcttcatttttaagttccttgttacatcatggtcattttctagttttttaccagactcccatctcacaataaaatgcatcaacaagcctga

SEQ ID NO: 446990 - DNA, 1264 bp, Homo sapiens
cagctgtttaaggaagacagagcaggcattggataatattcttattaagttttcagtttaaattctcaactggcaattggccgaaaactcccatctgaagacatgatcatccaaatgtcattttgtgatttggctactgtctgcttgacataggaaagcactatcaagaaagactaatggagtgactatcaaaaggaagtcaatggacaaccttaaacttccaccacaagaggaatataaagaggtccctcctgcaccaagaaagatctgcagatctttttcagtgttcttggaggtgtggggtgtgagaacttgatcagtttgtgtcagccaccttgttctctaaagggaaagcccctcaaaccattttgtattctgtattacacttcagaaagtgtggaagcaaaggtcatctaatctttaaaagagatgggacaacaaagaaattctagcctttggagacatctagaccagcactatatgttacaaattataatactgtggtagaaacaaattcagattcagatgatgaagacaaactgcatattgtggaagaagaaagtgttacagatgcagctgactgtgaaggtgtaccagaggatgacctgccaacagaccagacagtgttaccagggaggagcagtgaaagagaagggaatgctaagaactgctgggaggatgacagtaagtctgatttttttttgtaatattgtattctcatgattcgttttttaaaatatatattaactgaaaagataaattggatgaaaagtttgaaatcaatagtaaatttggctatcaataaatattaggtgtcctacttactaaaaagtggattatgaagcagaataagcaagttattttgaccatatttacaatgcatataatgtattgaaatttagtagaatttattaaccaggatcaagctttccaaatattgttgatataattgaacctacctttaattttttattgtaaccccgaatgaatactctacttagaaaccaataaatatcatatagatatagtgaaattataattcaatatgcaaaaatcccaaacacatataaatcatggaggtatttttagtgcttgtaaacctctctatacatacatcagaatcctttaagtaaggtggttttttcactttaaatttttacttttactcaaagtatggctgagtggaaggagcggtgaaagtaaggagaccctctacttgctgcactttcagtgagtaaacactgaaagtttaatcttcttcctc

SEQ ID NO: 446991 - DNA, 821 bp, Homo sapiens
cagctgtttaaggaagacagagcaggcattggataatattcttattaagttttcagtttaaattctcaactggcaattggccgaaaactcccatctgaagacatgatcatccaaatgtcattttgtgatttggctactgtctgcttgacataggaaagcactatcaagaaagactaatggagtgactatcaaaaggaagtcaatggacaaccttaaacttccaccacaagaggaatataaagaggtccctcctgcaccaagaaagatctgcagatctttttcagtgttcttggaggtgtggggtgtgagaacttgatcagtttgtgtcagccaccttgttctctaaagggaaagcccctcaaaccattttgtattctgtattacacttcagaaagtgtggaagcaaaggtcatctaatctttaaaagagatgggacaacaaagaaattctagcctttggagacatctagaccagcactatatgttacaaattataatactgtggtagaaacaaattcagattcagatgatgaagacaaactgcatattgtggaagaagaaagtgttacagatgcagctgactgtgaaggtgtaccagaggatgacctgccaacagaccagacagtgttaccagggaggagcagtgaaagagaagggaatgctaagaactgctgggaggatgacatggcatgaaaccataaatccgtaacaggaggaaaattggaaaattcacaaatatgtggaaattaagcaacacactcctgaacaaccaaaggtcaaagaagaaatgaaaggggaagtaaaaaatatcttgaaacaaac

SEQ ID NO: 446992 - DNA, 324 bp, Homo sapiens
acataggaaagcactatcaagaaagactaatggagtgactatcaaaaggaagtcaatggtaagagttttcatttaaattgtgtgtgtgtgtgtgtgtgtgtgtaaagcctaccaatgtattatatttgaattaaaattttagaacttttaaaatctaggacataatgacaagtgtttgaattttatatgtctgtcacttatattttaataaaatatatgcaaagaatggttttatagataagagattttacatacttaatgttgataaatagtataaaagtatggaaaatcaattatatagttcatgtctggtttaaaaattca

SEQ ID NO: 446993 - DNA, 817 bp, Homo sapiens
agaaaattatataggtcggtgaaatgggataagaaaaaacatacttgaaagagtagaatgtaattacttttgatacttgagaattatttgaagttataaagattggtggaaatattatacacatatgctgagaagattccatgattggttagcagaacatgtacctcagacttagttactagcgttcatcacatctatgtaggttttgaagctaaaaagtttattctaaatacagttctgtcacaagcatgcatggcagtcttctttttaaaattgataccgcttgttttagggaaatgaggatacataaaaatttatatgtaataattcagtgaatataatttgtttgtttgtttgtttaggagagaagccatatgaatgcccaaactgcaagaaacgcttttcccattctggctcctatagctcacacataagcagtaagaaatgtatcagcttgatacctgtgaatgggcgaccaagaacaggactcaagacatctcagtgttcttcaccgtctctttcagcatcaccaggcagtcccacacgaccacagatacggcaaaagatagagaataaaccccttcaagaacaactttctgttaaccaaattaaaactgaacctgtggattatgaattcaaacccatagtggttgcttcaggaatcaactgttcaacccctttacaaaatggggttttcactggtggtggcccattacaggcaaccagttctcctcagggcatggtgcaagctgttgttctgccaacagttggtttggtgtctcccataagtatcaatttaagtgatattcagaatgta

SEQ ID NO: 446994 - DNA, 5337 bp, Homo sapiens
attttagacacaagcgagaggatcatggcggatggccccaggtgtaagcgcagaaagcaggcgaacccgcggcgcaataacgttacaaattataatactgtggtagaaacaaattcagattcagatgatgaagacaaactgcatattgtggaagaagaaagtgttacagatgcagctgactgtgaaggtgtaccagaggatgacctgccaacagaccagacagtgttaccagggaggagcagtgaaagagaagggaatgctaagaactgctgggaggatgacagaaaggaagggcaagaaatcctggggcctgaagctcaggcagatgaagcaggatgtacagtaaaagatgatgaatgcgagtcagatgcagaaaatgagcaaaaccatgatcctaatgttgaagagtttctacaacaacaagacactgctgtcatttttcctgaggcacctgaagaggaccagaggcagggcacaccagaagccagtggtcatgatgaaaatggaacaccagatgcattttcacaattactcacctgtccatattgtgatagaggctataaacgctttacctctctgaaagaacacattaaatatcgtcatgaaaagaatgaagataactttagttgctccctgtgcagttacacctttgcatacagaacccaacttgaacgtcacatgacatcacataaatcaggaagagatcaaagacatgtgacgcagtctgggtgtaatcgtaaattcaaatgcactgagtgtggaaaagctttcaaatacaaacatcacctaaaagagcacttaagaattcacagtggagagaagccatatgaatgcccaaactgcaagaaacgcttttcccattctggctcctatagctcacacataagcagtaagaaatgtatcagcttgatacctgtgaatgggcgaccaagaacaggactcaagacatctcagtgttcttcaccgtctctttcagcatcaccaggcagtcccacacgaccacagatacggcaaaagatagagaataaaccccttcaagaacaactttctgttaaccaaattaaaactgaacctgtggattatgaattcaaacccatagtggttgcttcaggaatcaactgttcaacccctttacaaaatggggttttcactggtggtggcccattacaggcaaccagttctcctcagggcatggtgcaagctgttgttctgccaacagttggtttggtgtctcccataagtatcaatttaagtgatattcagaatgtacttaaagtggcggtagatggtaatgtaataaggcaagtgttggagaataatcaagccaatcttgcatccaaagaacaagaaacaatcaatgcttcacccatacaacaaggtggccattctgttatttcagccatcagtcttcctttggttgatcaagatggaacaaccaaaattatcatcaactacagtcttgagcagcctagccaacttcaagttgttcctcaaaatttaaaaaaagaaaatccagtcgctacaaacagttgtaaaagtgaaaagttaccagaagatcttactgttaagtctgagaaggacaaaagctttgaagggggggtgaatgatagcacttgtcttctgtgtgatgattgtccaggagatattaatgcacttccagaattaaagcactatgacctaaagcagcctactcagcctcctccactccctgcagcagaagctgagaagcctgagtcctctgtttcatcagctactggagatggcaatttgtctcctagtcagccacctttaaagaacctcttgtctctcctaaaagcatattatgctttgaatgcacaaccaagtgcagaagagctctcaaaaattgctgattcagtaaacctaccactggatgtagtaaaaaagtggtttgaaaagatgcaagctggacagatttcagtgcagtcttctgaaccatcttctcctgaaccaggcaaagtaaatatccctgccaagaacaatgatcagcctcaatctgcaaatgcaaatgaaccccaggacagcacagtaaatctacaaagtcctttgaagatgactaactccccagttttaccagtgggatcaaccaccaatggttccagaagtagtacaccatccccatcacctctaaacctttcctcatccagaaatacacagggttacttgtacacagctgagggtgcacaagaagagccacaagtagaacctcttgatctttcactaccaaagcaacagggagaattattagaaaggtcaactatcactagtgtttaccagaacagtgtttattctgtccaggaagaacccttgaacttgtcttgcgcaaaaaaggagccacaaaaggacagttgtgttacagactcagaaccagttgtaaatgtaatcccaccaagtgccaaccccataaatatcgctatacctacagtcactgcccagttacccacaatcgtggccattgctgaccagaacagtgttccatgcttaagagcgctagctgccaataagcaaacgattctgattccccaggtggcatacacctactcaactacggtcagccctgcagtccaagaaccacccttgaaagtgatccagccaaatggaaatcaggatgaaagacaagatactagctcagaaggagtatcaaatgtagaggatcagaatgactctgattctacaccgcccaaaaagaaaatgcggaagacagaaaatggaatgtatgcttgtgatttgtgtgacaagatattccaaaagagtagttcattattgagacataaatatgaacacacaggtaaaagacctcatgagtgtggaatctgtaaaaaggcatttaaacacaaacatcatttgattgaacacatgcgattacattctggagaaaagccctatcaatgtgacaaatgtggaaagcgcttctcacactctgggtcttattctcaacacatgaatcatcgctactcctactgtaagagagaagcggaagaacgtgacagcacagagcaggaagaggcagggcctgaaatcctctcgaatgagcacgtgggtgccagggcgtctccctcacagggcgactcggacgagagagagagtttgacaagggaagaggatgaagacagtgaaaaagaggaagaggaggaggataaagagatggaagaattgcaggaagaaaaagaatgtgaaaaaccacaaggggatgaggaagaggaggaggaggaggaagaagtggaagaagaagaggtagaagaggcagagaatgagggagaagaagcaaaaactgaaggtctgatgaaggatgacagggctgaaagtcaagcaagcagcttaggacaaaaagtaggcgagagtagtgagcaagtgtctgaagaaaagacaaatgaagcctaatcgtttttctagaaggaaaataaattctaattgataatgaatttcgttcaatattatccttgcttttcatggaaacacagtaacctgtatgctgtgattcctgttcactactgtgtgtgtgtgcgcgtgcattgattactatccatttctttagtcaacgctctccacttcctgatttctgctttaaggaaaactgtgaactttctgcttcatgtatcagttttaaagcatcccaggcaaagatcatctacagattctaggaattctctcccctgaaatcaaaacctggagacttttttttcttattttagttgagaagttcataaactgctcaaggattagttttccaggactctgcggaggaacggcaggaagaacctcagagagggcagaggtgacttcaaagtgctggggactccgtcctgagggtcacttggccctgagcccctgcgtgcccttgcggaagcccagaagcttcttcctgctgcacctcccgtttccgctgctgctgacgtttatgcatttcatgatggggtccaacaagaacacctgacttgggtgaagttgtgcaatattggaggctgactgtagggctgggcagctgggagacaggctcatggctcatggctcatggctcagggcggtgcctgccctgggccgggacccccctccccaccccccacctaggctttttgggttttgttcaaggaaggtaaagtgagaggtttaggtcagtgtttttaagtttttgttttttttttaaagcaaatcctgtatatgtatctacatgggagataggtagacactacttatttgttacattttgtactatacgtttgtgttccaggtttcagcttccctcgctcctgttgttaagaagcgtccctgtcagcacaggtgtgcattgaggaaggggccccagggccttcgctccctcagcactggggtggaggcggcaggaaggggcggcccttacctggcaggtctgggcgcacctttagcaggtggactccgtggggctccaccagccagaagcctctggaaggcaacgaaggcaatgctgctccctgagtccagtccccgcccccaaacccagcccaggtgccttcagctacttcggcttcttaaaccctgcagtgttaaacagaggcattgagaaaggggaaaggcgggtatttttaaaagccaaagattgacccaagttacttgagggtagggaggcgggcccagtgcaggaggctgcatccctggcctgctggtgcccaccgggggctgtgcctgtgccgggccgcaggaagctggctgcccccattcctgctgctgctgctgctgctgctctgtggctgtttcaaagactgggcgaaaggctgtccggagggcagaccaggtgccttgccgcagagaaaacaccaaagtctcctgttcgctcataaagaagtttttgggatgggagagaatccagaccatcttggggcagccaggcccttgccttcatttttacagaggtagcacaactgattccaacacaaaaccccttcccctttttaaaatgatttctgttctaatgccatagatcaaaggcctcagaaaccattgtgtgtttcctctttgaagcaatgacaagcactttactttcacggtggtttttgttttttcttattgctgtggaacctcttttggaggacgttaaaggcgtgttttacttgtttttttaagagtgtgtgatgtgtgttttgtagatttcttgacagtgctgtaatacagacggcaatgcaatagcctatttaaagaactacgtgatctgattgagatgtacatagtttttttttttaccataactgaattattttatctcttatgttatcatgagaaatgtatgccaaatgattagttgatgtatgttttttaatttaatatttaaataaaatatttggaagg

SEQ ID NO: 446995 - DNA, 5336 bp, Homo sapiens
attttagacacaagcgagaggatcatggcggatggccccaggtgtaagcgcagaaagcaggcgaacccgcggcgcaataacgttacaaattataatactgtggtagaaacaaattcagattcagatgatgaagacaaactgcatattgtggaagaagaaagtgttacagatgcagctgactgtgaaggtgtaccagaggatgacctgccaacagaccagacagtgttaccagggaggagcagtgaaagagaagggaatgctaagaactgctgggaggatgacagaaaggaagggcaagaaatcctggggcctgaagctcaggcagatgaagcaggatgtacagtaaaagatgatgaatgcgagtcagatgcagaaaatgagcaaaaccatgatcctaatgttgaagagtttctacaacaacaagacactgctgtcatttttcctgaggcacctgaagaggaccagaggcagggcacaccagaagccagtggtcatgatgaaaatggaacaccagatgcattttcacaattactcacctgtccatattgtgatagaggctataaacgctttacctctctgaaagaacacattaaatatcgtcatgaaaagaatgaagataactttagttgctccctgtgcagttacacctttgcatacagaacccaacttgaacgtcacatgacatcacataaatcaggaagagatcaaagacatgtgacgcagtctgggtgtaatcgtaaattcaaatgcactgagtgtggaaaagctttcaaatacaaacatcacctaaaagagcacttaagaattcacagtggagagaagccatatgaatgcccaaactgcaagaaacgcttttcccattctggctcctatagctcacacataagcagtaagaaatgtatcagcttgatacctgtgaatgggcgaccaagaacaggactcaagacatctcagtgttcttcaccgtctctttcagcatcaccaggcagtcccacacgaccacagatacggcaaaagatagagaataaaccccttcaagaacaactttctgttaaccaaattaaaactgaacctgtggattatgaattcaaacccatagtggttgcttcaggaatcaactgttcaacccctttacaaaatggggttttcactggtggtggcccattacaggcaaccagttctcctcagggcatggtgcaagctgttgttctgccaacagttggtttggtgtctcccataagtatcaatttaagtgatattcagaatgtacttaaagtggcggtagatggtaatgtaataaggcaagtgttggagaataatcaagccaatcttgcatccaaagaacaagaaacaatcaatgcttcacccatacaacaaggtggccattctgttatttcagccatcagtcttcctttggttgatcaagatggaacaaccaaaattatcatcaactacagtcttgagcagcctagccaacttcaagttgttcctcaaaatttaaaaaaagaaaatccagtcgctacaaacagttgtaaaagtgaaaagttaccagaagatcttactgttaagtctgagaaggacaaaagctttgaagggggggtgaatgatagcacttgtcttctgtgtgatgattgtccaggagatattaatgcacttccagaattaaagcactatgacctaaagcagcctactcagcctcctccactccctgcagcagaagctgagaagcctgagtcctctgtttcatcagctactggagatggcaatttgtctcctagtcagccacctttaaagaacctcttgtctctcctaaaagcatattatgctttgaatgcacaaccaagtgcagaagagctctcaaaaattgctgattcagtaaacctaccactggatgtagtaaaaaagtggtttgaaaagatgcaagctggacagatttcagtgcagtcttctgaaccatcttctcctgaaccaggcaaagtaaatatccctgccaagaacaatgatcagcctcaatctgcaaatgcaaatgaaccccaggacagcacagtaaatctacaaagtcctttgaagatgactaactccccagttttaccagtgggatcaaccaccaatggttccagaagtagtacaccatccccatcacctctaaacctttcctcatccagaaatacacagggttacttgtacacagctgagggtgcacaagaagagccacaagtagaacctcttgatctttcactaccaaagcaacagggagaattattagaaaggtcaactatcactagtgtttaccagaacagtgtttattctgtccaggaagaacccttgaacttgtcttgcgcaaaaaaggagccacaaaaggacagttgtgttacagactcagaaccagttgtaaatgtaatcccaccaagtgccaaccccataaatatcgctatacctacagtcactgcccagttacccacaatcgtggccattgctgaccagaacagtgttccatgcttaagagcgctagctgccaataagcaaacgattctgattccccaggtggcatacacctactcaactacggtcagccctgcagtccaagaaccacccttgaaagtgatccagccaaatggaaatcaggatgaaagacaagatactagctcagaaggagtatcaaatgtagaggatcagaatgactctgattctacaccgcccaaaaagaaaatgcggaagacagaaaatggaatgtatgcttgtgatttgtgtgacaagatattccaaaagagtagttcattattgagacataaatatgaacacacaggtaaaagacctcatgagtgtggaatctgtaaaaaggcatttaaacacaaacatcatttgattgaacacatgcgattacattctggagaaaagccctatcaatgtgacaaatgtggaaagcgcttctcacactctgggtcttattctcaacacatgaatcatcgctactcctactgtaagagagaagcggaagaacgtgacagcacagagcaggaagaggcagggcctgaaatcctctcgaatgagcacgtgggtgccagggcgtctccctcacagggcgactcggacgagagagagagtttgacaagggaagaggatgaagacagtgaaaaagaggaagaggaggaggataaagagatggaagaattgcaggaagaaaaagaatgtgaaaaaccacaaggggatgaggaagaggaggaggaggaggaagaagtggaagaagaagaggtagaagaggcagagaatgagggagaagaagcaaaaactgaaggtctgatgaaggatgacagggctgaaagtcaagcaagcagcttaggacaaaaagtaggcgagagtagtgagcaagtgtctgaagaaaagacaaatgaagcctaatcgtttttctagaaggaaaataaattctaattgataatgaatttcgttcaatattatccttgcttttcatggaaacacagtaacctgtatgctgtgattcctgttcactactgtgtaaagtaaaaactaaaaaaatacaaaatacaaaacacacacacacacacacacacacacacacacacacacacaaaataaatccgggtgtgcctgaacctcagacctagtaatttttcatgcagttttcaaagttaggaacaagtttgtaacatgcagcagattagaaaaccttaatgactcagagagcaacaatacaagaggttaaaggaagctgattaattagatatgcatctggcattgttttatcttatcagtattatcactcttatgttggtttattcttaagctgtacaattgggagaaattttataattttttattggtaaacatatgctaaatccgcttcagtattttattatgttttttaaaatgtgagaacttctgcactacaaaattcccttcacagagaagtataatgtagttccaacccgtgctaactaccttttataaattcagtctagaaggtagtaatttctaatatttagatgtcttagtagagcgtattatcatttaaagtgtattgttagccttaagaaagcagctgatagaagaactgaagtttcttactcacgtggtttaaaatggagttcaaaagattgccattgagttctgattgcagggactaacaatgttaatctgataaggacagcaaaatcatcagaatcagtgtttgtgattgtgtttgaatatgtggtaacatatgaaggatatgacatgaagctttgtatctcctttggccttaagcaagacctgtgtgctgtaagtgccatttctcagtattttcaaggctctaacccgccttcatccaatgtgtggcctacaataactagcatttgttgatttgtctcttgtatcaaaattcccaaataaaacttaaaaccactgactctgtcagagaaactgaaacactgggacatttcatccttcaattcctcggtattgattttatgttgattgattttcagaatttctctacagaaacgaaagggaaattttctaatctgctttatccatgtacttgcatttcagacatggacatgctattgttatttggctcataactgtttccaaatgttagttattatggacccaatttattaacaacattagctgatttttacctatcagtattattttatttcttttagtttatagatctgtgcaacatttttgtactgtatgtcttcaaacctggcagtattaatacccttcttactgacatatgtacttttagttttagaaaacttttatatttatgtgtcttatttttatatttctttatttattacacagtgtagtgtataatactgtagtttgtattaatacaataatatattttagtatgaaaatttggaaagttgataagatttaaagtagagatgcaattggttctcctgcattgagatttgatttaacagtgttatgttaacatttatacttgccttggactgtagaacagaacttaaatgggaatgtattagttttacaactacaatcaagtcattttacctttacccagtttttaatataaaacttaaattttgaaattcactgtgtgactaatagcatgatgctctgcagttttattaagaaatcagcctaaccatacaactctcatttccttagtaagccaaattaggattaacttctataaacagtgttgggaacaatgtttaacattttgtgccaatttgttcctgtattcatgtatgtaagttacagatctgactcttcatttttaagttccttgttacatcatggtcattttctagttttttaccagactcccatctcacaataaaatgcatcaacaagcctga

SEQ ID NO: 446996 - DNA, 5737 bp, Homo sapiens
cagctgtttaaggaagacagagcaggcattggataatattcttattaagttttcagtttaaattctcaactggcaattggccgaaaactcccatctgaagacatgatcatccaaatgtcattttgtgatttggctactgtctgcttgacataggaaagcactatcaagaaagactaatggagtgactatcaaaaggaagtcaatggacaaccttaaacttccaccacaagaggaatataaagaggtccctcctgcaccaagaaagatctgcagatctttttcagtgttcttggaggtgtggggtgtgagaacttgatcagtttgtgtcagccaccttgttctctaaagggaaagcccctcaaaccattttgtattctgtattacacttcagaaagtgtggaagcaaaggtcatctaatctttaaaagagatgggacaacaaagaaattctagcctttggagacatctagaccagcactatatgttacaaattataatactgtggtagaaacaaattcagattcagatgatgaagacaaactgcatattgtggaagaagaaagtgttacagatgcagctgactgtgaaggtgtaccagaggatgacctgccaacagaccagacagtgttaccagggaggagcagtgaaagagaagggaatgctaagaactgctgggaggatgacagaaaggaagggcaagaaatcctggggcctgaagctcaggcagatgaagcaggatgtacagtaaaagatgatgaatgcgagtcagatgcagaaaatgagcaaaaccatgatcctaatgttgaagagtttctacaacaacaagacactgctgtcatttttcctgaggcacctgaagaggaccagaggcagggcacaccagaagccagtggtcatgatgaaaatggaacaccagatgcattttcacaattactcacctgtccatattgtgatagaggctataaacgctttacctctctgaaagaacacattaaatatcgtcatgaaaagaatgaagataactttagttgctccctgtgcagttacacctttgcatacagaacccaacttgaacgtcacatgacatcacataaatcaggaagagatcaaagacatgtgacgcagtctgggtgtaatcgtaaattcaaatgcactgagtgtggaaaagctttcaaatacaaacatcacctaaaagagcacttaagaattcacagtggagagaagccatatgaatgcccaaactgcaagaaacgcttttcccattctggctcctatagctcacacataagcagtaagaaatgtatcagcttgatacctgtgaatgggcgaccaagaacaggactcaagacatctcagtgttcttcaccgtctctttcagcatcaccaggcagtcccacacgaccacagatacggcaaaagatagagaataaaccccttcaagaacaactttctgttaaccaaattaaaactgaacctgtggattatgaattcaaacccatagtggttgcttcaggaatcaactgttcaacccctttacaaaatggggttttcactggtggtggcccattacaggcaaccagttctcctcagggcatggtgcaagctgttgttctgccaacagttggtttggtgtctcccataagtatcaatttaagtgatattcagaatgtacttaaagtggcggtagatggtaatgtaataaggcaagtgttggagaataatcaagccaatcttgcatccaaagaacaagaaacaatcaatgcttcacccatacaacaaggtggccattctgttatttcagccatcagtcttcctttggttgatcaagatggaacaaccaaaattatcatcaactacagtcttgagcagcctagccaacttcaagttgttcctcaaaatttaaaaaaagaaaatccagtcgctacaaacagttgtaaaagtgaaaagttaccagaagatcttactgttaagtctgagaaggacaaaagctttgaagggggggtgaatgatagcacttgtcttctgtgtgatgattgtccaggagatattaatgcacttccagaattaaagcactatgacctaaagcagcctactcagcctcctccactccctgcagcagaagctgagaagcctgagtcctctgtttcatcagctactggagatggcaatttgtctcctagtcagccacctttaaagaacctcttgtctctcctaaaagcatattatgctttgaatgcacaaccaagtgcagaagagctctcaaaaattgctgattcagtaaacctaccactggatgtagtaaaaaagtggtttgaaaagatgcaagctggacagatttcagtgcagtcttctgaaccatcttctcctgaaccaggcaaagtaaatatccctgccaagaacaatgatcagcctcaatctgcaaatgcaaatgaaccccaggacagcacagtaaatctacaaagtcctttgaagatgactaactccccagttttaccagtgggatcaaccaccaatggttccagaagtagtacaccatccccatcacctctaaacctttcctcatccagaaatacacagggttacttgtacacagctgagggtgcacaagaagagccacaagtagaacctcttgatctttcactaccaaagcaacagggagaattattagaaaggtcaactatcactagtgtttaccagaacagtgtttattctgtccaggaagaacccttgaacttgtcttgcgcaaaaaaggagccacaaaaggacagttgtgttacagactcagaaccagttgtaaatgtaatcccaccaagtgccaaccccataaatatcgctatacctacagtcactgcccagttacccacaatcgtggccattgctgaccagaacagtgttccatgcttaagagcgctagctgccaataagcaaacgattctgattccccaggtggcatacacctactcaactacggtcagccctgcagtccaagaaccacccttgaaagtgatccagccaaatggaaatcaggatgaaagacaagatactagctcagaaggagtatcaaatgtagaggatcagaatgactctgattctacaccgcccaaaaagaaaatgcggaagacagaaaatggaatgtatgcttgtgatttgtgtgacaagatattccaaaagagtagttcattattgagacataaatatgaacacacaggtaaaagacctcatgagtgtggaatctgtaaaaaggcatttaaacacaaacatcatttgattgaacacatgcgattacattctggagaaaagccctatcaatgtgacaaatgtggaaagcgcttctcacactctgggtcttattctcaacacatgaatcatcgctactcctactgtaagagagaagcggaagaacgtgacagcacagagcaggaagaggcagggcctgaaatcctctcgaatgagcacgtgggtgccagggcgtctccctcacagggcgactcggacgagagagagagtttgacaagggaagaggatgaagacagtgaaaaagaggaagaggaggaggataaagagatggaagaattgcaggaagaaaaagaatgtgaaaaaccacaaggggatgaggaagaggaggaggaggaggaagaagtggaagaagaagaggtagaagaggcagagaatgagggagaagaagcaaaaactgaaggtctgatgaaggatgacagggctgaaagtcaagcaagcagcttaggacaaaaagtaggcgagagtagtgagcaagtgtctgaagaaaagacaaatgaagcctaatcgtttttctagaaggaaaataaattctaattgataatgaatttcgttcaatattatccttgcttttcatggaaacacagtaacctgtatgctgtgattcctgttcactactgtgtaaagtaaaaactaaaaaaatacaaaatacaaaacacacacacacacacacacacacacacacacacacacacaaaataaatccgggtgtgcctgaacctcagacctagtaatttttcatgcagttttcaaagttaggaacaagtttgtaacatgcagcagattagaaaaccttaatgactcagagagcaacaatacaagaggttaaaggaagctgattaattagatatgcatctggcattgttttatcttatcagtattatcactcttatgttggtttattcttaagctgtacaattgggagaaattttataattttttattggtaaacatatgctaaatccgcttcagtattttattatgttttttaaaatgtgagaacttctgcactacaaaattcccttcacagagaagtataatgtagttccaacccgtgctaactaccttttataaattcagtctagaaggtagtaatttctaatatttagatgtcttagtagagcgtattatcatttaaagtgtattgttagccttaagaaagcagctgatagaagaactgaagtttcttactcacgtggtttaaaatggagttcaaaagattgccattgagttctgattgcagggactaacaatgttaatctgataaggacagcaaaatcatcagaatcagtgtttgtgattgtgtttgaatatgtggtaacatatgaaggatatgacatgaagctttgtatctcctttggccttaagcaagacctgtgtgctgtaagtgccatttctcagtattttcaaggctctaacccgccttcatccaatgtgtggcctacaataactagcatttgttgatttgtctcttgtatcaaaattcccaaataaaacttaaaaccactgactctgtcagagaaactgaaacactgggacatttcatccttcaattcctcggtattgattttatgttgattgattttcagaatttctctacagaaacgaaagggaaattttctaatctgctttatccatgtacttgcatttcagacatggacatgctattgttatttggctcataactgtttccaaatgttagttattatggacccaatttattaacaacattagctgatttttacctatcagtattattttatttcttttagtttatagatctgtgcaacatttttgtactgtatgtcttcaaacctggcagtattaatacccttcttactgacatatgtacttttagttttagaaaacttttatatttatgtgtcttatttttatatttctttatttattacacagtgtagtgtataatactgtagtttgtattaatacaataatatattttagtatgaaaatttggaaagttgataagatttaaagtagagatgcaattggttctcctgcattgagatttgatttaacagtgttatgttaacatttatacttgccttggactgtagaacagaacttaaatgggaatgtattagttttacaactacaatcaagtcattttacctttacccagtttttaatataaaacttaaattttgaaattcactgtgtgactaatagcatgatgctctgcagttttattaagaaatcagcctaaccatacaactctcatttccttagtaagccaaattaggattaacttctataaacagtgttgggaacaatgtttaacattttgtgccaatttgttcctgtattcatgtatgtaagttacagatctgactcttcatttttaagttccttgttacatcatggtcattttctagttttttaccagactcccatctcacaataaaatgcatcaacaagcctga

SEQ ID NO: 446997 - DNA, 4873 bp, Homo sapiens
attttagacacaagcgagaggatcatggcggatggccccaggtgtaagcgcagaaagcaggcgaacccgcggcgcaataacgttacaaattataatactgtggtagaaacaaattcagattcagatgatgaagacaaactgcatattgtggaagaagaaagtgttacagatgcagctgactgtgaaggtgtaccagaggatgacctgccaacagaccagacagtgttaccagggaggagcagtgaaagagaagggaatgctaagaactgctgggaggatgacagaaaggaagggcaagaaatcctggggcctgaagctcaggcagatgaagcaggatgtacagtaaaagatgatgaatgcgagtcagatgcagaaaatgagcaaaaccatgatcctaatgttgaagagtttctacaacaacaagacactgctgtcatttttcctgaggcacctgaagaggaccagaggcagggcacaccagaagccagtggtcatgatgaaaatggaacaccagatgcattttcacaattactcacctgtccatattgtgatagaggctataaacgctttacctctctgaaagaacacattaaatatcgtcatgaaaagaatgaagataactttagttgctccctgtgcagttacacctttgcatacagaacccaacttgaacgtcacatgacatcacataaatcaggaagagatcaaagacatgtgacgcagtctgggtgtaatcgtaaattcaaatgcactgagtgtggaaaagctttcaaatacaaacatcacctaaaagagcacttaagaattcacagtggagagaagccatatgaatgcccaaactgcaagaaacgcttttcccattctggctcctatagctcacacataagcagtaagaaatgtatcagcttgatacctgtgaatgggcgaccaagaacaggactcaagacatctcagtgttcttcaccgtctctttcagcatcaccaggcagtcccacacgaccacagatacggcaaaagatagagaataaaccccttcaagaacaactttctgttaaccaaattaaaactgaacctgtggattatgaattcaaacccatagtggttgcttcaggaatcaactgttcaacccctttacaaaatggggttttcactggtggtggcccattacaggcaaccagttctcctcagggcatggtgcaagctgttgttctgccaacagttggtttggtgtctcccataagtatcaatttaagtgatattcagaatgtacttaaagtggcggtagatggtaatgtaataaggcaagtgttggagaataatcaagccaatcttgcatccaaagaacaagaaacaatcaatgcttcacccatacaacaaggtggccattctgttatttcagccatcagtcttcctttggttgatcaagatggaacaaccaaaattatcatcaactacagtcttgagcagcctagccaacttcaagttgttcctcaaaatttaaaaaaagaaaatccagtcgctacaaacagttgtaaaagtgaaaagttaccagaagatcttactgttaagtctgagaaggacaaaagctttgaagggggggtgaatgatagcacttgtcttctgtgtgatgattgtccaggagatattaatgcacttccagaattaaagcactatgacctaaagcagcctactcagcctcctccactccctgcagcagaagctgagaagcctgagtcctctgtttcatcagctactggagatggcaatttgtctcctagtcagccacctttaaagaacctcttgtctctcctaaaagcatattatgctttgaatgcacaaccaagtgcagaagagctctcaaaaattgctgattcagtaaacctaccactggatgtagtaaaaaagtggtttgaaaagatgcaagctggacagatttcagtgcagtcttctgaaccatcttctcctgaaccaggcaaagtaaatatccctgccaagaacaatgatcagcctcaatctgcaaatgcaaatgaaccccaggacagcacagtaaatctacaaagtcctttgaagatgactaactccccagttttaccagtgggatcaaccaccaatggttccagaagtagtacaccatccccatcacctctaaacctttcctcatccagaaatacacagggttacttgtacacagctgagggtgcacaagaagagccacaagtagaacctcttgatctttcactaccaaagcaacagggagaattattagaaaggtcaactatcactagtgtttaccagaacagtgtttattctgtccaggaagaacccttgaacttgtcttgcgcaaaaaaggagccacaaaaggacagttgtgttacagactcagaaccagttgtaaatgtaatcccaccaagtgccaaccccataaatatcgctatacctacagtcactgcccagttacccacaatcgtggccattgctgaccagaacagtgttccatgcttaagagcgctagctgccaataagcaaacgattctgattccccaggtggcatacacctactcaactacggtcagccctgcagtccaagaaccacccttgaaagtgatccagccaaatggaaatcaggatgaaagacaagatactagctcagaaggagtatcaaatgtagaggatcagaatgactctgattctacaccgcccaaaaagaaaatgcggaagaaaaagaatgtgaaaaaccacaaggggatgaggaagaggaggaggaggaggaagaagtggaagaagaagaggtagaagaggcagagaatgagggagaagaagcaaaaactgaaggtctgatgaaggatgacagggctgaaagtcaagcaagcagcttaggacaaaaagtaggcgagagtagtgagcaagtgtctgaagaaaagacaaatgaagcctaatcgtttttctagaaggaaaataaattctaattgataatgaatttcgttcaatattatccttgcttttcatggaaacacagtaacctgtatgctgtgattcctgttcactactgtgtaaagtaaaaactaaaaaaatacaaaatacaaaacacacacacacacacacacacacacacacacacacacacaaaataaatccgggtgtgcctgaacctcagacctagtaatttttcatgcagttttcaaagttaggaacaagtttgtaacatgcagcagattagaaaaccttaatgactcagagagcaacaatacaagaggttaaaggaagctgattaattagatatgcatctggcattgttttatcttatcagtattatcactcttatgttggtttattcttaagctgtacaattgggagaaattttataattttttattggtaaacatatgctaaatccgcttcagtattttattatgttttttaaaatgtgagaacttctgcactacaaaattcccttcacagagaagtataatgtagttccaacccgtgctaactaccttttataaattcagtctagaaggtagtaatttctaatatttagatgtcttagtagagcgtattatcatttaaagtgtattgttagccttaagaaagcagctgatagaagaactgaagtttcttactcacgtggtttaaaatggagttcaaaagattgccattgagttctgattgcagggactaacaatgttaatctgataaggacagcaaaatcatcagaatcagtgtttgtgattgtgtttgaatatgtggtaacatatgaaggatatgacatgaagctttgtatctcctttggccttaagcaagacctgtgtgctgtaagtgccatttctcagtattttcaaggctctaacccgccttcatccaatgtgtggcctacaataactagcatttgttgatttgtctcttgtatcaaaattcccaaataaaacttaaaaccactgactctgtcagagaaactgaaacactgggacatttcatccttcaattcctcggtattgattttatgttgattgattttcagaatttctctacagaaacgaaagggaaattttctaatctgctttatccatgtacttgcatttcagacatggacatgctattgttatttggctcataactgtttccaaatgttagttattatggacccaatttattaacaacattagctgatttttacctatcagtattattttatttcttttagtttatagatctgtgcaacatttttgtactgtatgtcttcaaacctggcagtattaatacccttcttactgacatatgtacttttagttttagaaaacttttatatttatgtgtcttatttttatatttctttatttattacacagtgtagtgtataatactgtagtttgtattaatacaataatatattttagtatgaaaatttggaaagttgataagatttaaagtagagatgcaattggttctcctgcattgagatttgatttaacagtgttatgttaacatttatacttgccttggactgtagaacagaacttaaatgggaatgtattagttttacaactacaatcaagtcattttacctttacccagtttttaatataaaacttaaattttgaaattcactgtgtgactaatagcatgatgctctgcagttttattaagaaatcagcctaaccatacaactctcatttccttagtaagccaaattaggattaacttctataaacagtgttgggaacaatgtttaacattttgtgccaatttgttcctgtattcatgtatgtaagttacagatctgactcttcatttttaagttccttgttacatcatggtcattttctagttttttaccagactcccatctcacaataaaatgcatcaacaagcctga

SEQ ID NO: 446998 - DNA, 3619 bp, Homo sapiens
attttagacacaagcgagaggatcatggcggatggccccaggtgtaagcgcagaaagcaggcgaacccgcggcgcaataacgttacaaattataatactgtggtagaaacaaattcagattcagatgatgaagacaaactgcatattgtggaagaagaaagtgttacagatgcagctgactgtgaaggtgtaccagaggatgacctgccaacagaccagacagtgttaccagggaggagcagtgaaagagaagggaatgctaagaactgctgggaggatgacagaaaggaagggcaagaaatcctggggcctgaagctcaggcagatgaagcaggatgtacagtaaaagatgatgaatgcgagtcagatgcagaaaatgagcaaaaccatgatcctaatgttgaagagtttctacaacaacaagacactgctgtcatttttcctgaggcacctgaagaggaccagaggcagggcacaccagaagccagtggtcatgatgaaaatggaacaccagatgcattttcacaattactcacctgtccatattgtgatagaggctataaacgctttacctctctgaaagaacacattaaatatcgtcatgaaaagaatgaagataactttagttgctccctgtgcagttacacctttgcatacagaacccaacttgaacgtcacatgacatcacataaatcaggaagagatcaaagacatgtgacgcagtctgggtgtaatcgtaaattcaaatgcactgagtgtggaaaagctttcaaatacaaacatcacctaaaagagcacttaagaattcacagtggagagaagccatatgaatgcccaaactgcaagaaacgcttttcccattctggctcctatagctcacacataagcagtaagaaatgtatcagcttgatacctgtgaatgggcgaccaagaacaggactcaagacatctcagtgttcttcaccgtctctttcagcatcaccaggcagtcccacacgaccacagatacggcaaaagatagagaataaaccccttcaagaacaactttctgttaaccaaattaaaactgaacctgtggattatgaattcaaacccatagtggttgcttcaggaatcaactgttcaacccctttacaaaatggggttttcactggtggtggcccattacaggcaaccagttctcctcagggcatggtgcaagctgttgttctgccaacagttggtttggtgtctcccataagtatcaatttaagtgatattcagaatgtacttaaagtggcggtagatggtaatgtaataaggcaagtgttggagaataatcaagccaatcttgcatccaaagaacaagaaacaatcaatgcttcacccatacaacaaggtggccattctgttatttcagccatcagtcttcctttggttgatcaagatggaacaaccaaaattatcatcaactacagtcttgagcagcctagccaacttcaagttgttcctcaaaatttaaaaaaagaaaatccagtcgctacaaacagttgtaaaagtgaaaagttaccagaagatcttactgttaagtctgagaaggacaaaagctttgaagggggggtgaatgatagcacttgtcttctgtgtgatgattgtccaggagatattaatgcacttccagaattaaagcactatgacctaaagcagcctactcagcctcctccactccctgcagcagaagctgagaagcctgagtcctctgtttcatcagctactggagatggcaatttgtctcctagtcagccacctttaaagaacctcttgtctctcctaaaagcatattatgctttgaatgcacaaccaagtgcagaagagctctcaaaaattgctgattcagtaaacctaccactggatgtagtaaaaaagtggtttgaaaagatgcaagctggacagatttcagtgcagtcttctgaaccatcttctcctgaaccaggcaaagtaaatatccctgccaagaacaatgatcagcctcaatctgcaaatgcaaatgaaccccaggacagcacagtaaatctacaaagtcctttgaagatgactaactccccagttttaccagtgggatcaaccaccaatggttccagaagtagtacaccatccccatcacctctaaacctttcctcatccagaaatacacagggttacttgtacacagctgagggtgcacaagaagagccacaagtagaacctcttgatctttcactaccaaagcaacagggagaattattagaaaggtcaactatcactagtgtttaccagaacagtgtttattctgtccaggaagaacccttgaacttgtcttgcgcaaaaaaggagccacaaaaggacagttgtgttacagactcagaaccagttgtaaatgtaatcccaccaagtgccaaccccataaatatcgctatacctacagtcactgcccagttacccacaatcgtggccattgctgaccagaacagtgttccatgcttaagagcgctagctgccaataagcaaacgattctgattccccaggtggcatacacctactcaactacggtcagccctgcagtccaagaaccacccttgaaagtgatccagccaaatggaaatcaggatgaaagacaagatactagctcagaaggagtatcaaatgtagaggatcagaatgactctgattctacaccgcccaaaaagaaaatgcggaagacagaaaatggaatgtatgcttgtgatttgtgtgacaagatattccaaaagagtagttcattattgagacataaatatgaacacacaggtaaaagacctcatgagtgtggaatctgtaaaaaggcatttaaacacaaacatcatttgattgaacacatgcgattacattctggagaaaagccctatcaatgtgacaaatgtggaaagcgcttctcacactctgggtcttattctcaacacatgaatcatcgctactcctactgtaagagagaagcggaagaacgtgacagcacagagcaggaagaggcagggcctgaaatcctctcgaatgagcacgtgggtgccagggcgtctccctcacagggcgactcggacgagagagagagtttgacaagggaagaggatgaagacagtgaaaaagaggaagaggaggaggataaagagatggaagaattgcaggaagaaaaagaatgtgaaaaaccacaaggggatgaggaagaggaggaggaggaggaagaagtggaagaagaagaggtagaagaggcagagaatgagggagaagaagcaaaaactgaaggtctgatgaaggatgacagggctgaaagtcaagcaagcagcttaggacaaaaagtaggcgagagtagtgagcaagtgtctgaagaaaagacaaatgaagcctaatcgtttttctagaaggaaaataaattctaattgataatgaatttcgttcaatattatccttgcttttcatggaaacacagtaacctgtatgctgtgattcctgttcactactgtgtaaagtaaaaactaaaaaaatacaaaatacaaaacacacacacacacacacacacacacacacacacacacacacacacacacaaaataaatccgggcccgttcc

SEQ ID NO: 446999 - DNA, 4055 bp, Homo sapiens
gcgggaacggcgcgggtggtagaggaggagccgcgggctcgattctctaaccatggcacaggtagagaaacgtggaggtttgctccggaaatcttcagcctccaaaaaaccactgaaggaaaaagtggtgctgatgtatgatgagatcttcatgacagaggaccccagtaagtgcagtcctcggttttgggaggagctctttctcatgaaggtgaatttagagtacctagaaggcaagctggaatctcttgatggtgaggagttaatgaagatcaaggacaatattaattgcttattccaacactgcatccaggctctgggagaggagcatccaattcgggttgtcaatgcattgcagaccctgtgcgcactcattcgaggagtccatcaaaagaataagtctacctctgggtttgacattatcaacatgctgatgggctttgacaaggcggagctgtgcatgaagaacttgatggagagtttggattcattgctttgtgcagaaggttctgaaagtctgaagagtttatgtctgaaacttctcctttgcttagtgaccgtgacagataacatcagccagaacactattctcgagtatgtaatgatcaacagcatatttgaagcaattttacagatactttcccatcccccaagtcgtagggagcatgggtatgatgctgtcgtcctcttggctttgctggtgaactatagaaaatatgagtctgtgaatccttatattgtgaagctgtctatcgtggatgatgaggccacactcaatggaatgggacttgtaattgctcaggctttatctgagtacaacaggcagtataaagacaaggaagaagaacaccaaagtggttttttctctgctttaacaaatatggtgggcagcatgttcatagcagatgcccatgagaaaatctcagtacaaaccaatgaggccattcttctggcactttatgaagctgttcatttaaatcgcaacttcatcacagtattagctcagagccatccagaaatgggcttggtgacgacccctgtcagtcctgctcctacaaccccagtcacaccacttgggaccacaccgccttcctctgatgttataagttctgtggaactcccactggatgcagatgtacagaccagtaatctactgataacctttttaaagtatagctcaattgtcatgcaggacaccaaagatgaacacaggcttcacagtggcaaactctgtctgattatccttacatgtattgcagaggatcaatatgccaatgcatttttgcatgatgacaacatgaattttcgagtaaacttacatagaatgcctatgagacacaggaagaaggcagcagacaagaatcttccctgccgtcctttagtatgtgcagtactggacctgatggtagagtttattgtaacacacatgatgaaggagtttcctatggatctctatatacgctgcatccaggtagtacacaaactgctctgctaccagaagaagtgtcgggtacgcctgcattacacctggcgggagctctggtcagccttgataaatttgctgaagttccttatgtcaaatgagactgtacttttggccaaacacaacatttttacattagcccttatgattgtgaacctatttaatatgtttatcacatatggcgacacatttctgccaacccccagcagctatgatgaactttactatgagattatccgcatgcaccagagctttgacaacctctactccatggtcctgaggctttctaccaatgcaggccagtggaaggaagcagctagcaaggtgacccatgcattggttaatatcagagccatcatcaaccactttaaccccaaaattgagtcctacgctgctgtgaatcacatatcccaactgtcagaggagcaggtgctggaggtggtgagagccaactatgacacgctcacgctgaagctgcaggatggcctggaccagtatgagcgctactcagagcagcacaaggaagctgccttcttcaaagagctggttcgatccattagcaccaacgtccggagaaacctggtcttccacacactcagccaagaagtcctgctcaaggagttctccactatctcctgaggccacgcctacctgagcagcctctgactgcccttacccatgaggatcatgggctggagggggagcgaggggagagggggctgcccccgaggttggagagaaacacagataccaagttctcttggtgaagaccgcacttcaatggagcttgggcagcaggggcaggagggtcaagccagggataatcttatttggggaggaatgggtgggcacagtggggagaggcctccaggaatgtggggacttccagagtgggctccctaaacagcccctcacatttccaatcttgaggttacaagctgtagctactgactaattttcgggagctggtgaggcaagcctcagggtaatgccagcaccctgaaagtcagtggctctgctcggcttctgaaaacagatcaactctcagatatagctggagctacatcctgcttcctttgggcctggggctgtgcttggcttgaaatctgtgtcccctgcctgcactggcactttgtccagtcatcgggacctttggctcagatttagggtaagataggaatagggtacctttttccttttttttctgagacggagtctcactctgtcgcccaggctggaatgcagtggcgtgatctcggctttactgcagcctccgcttcctgggttcaagcgattctcctgcctcagcctcccgagtagctgggactacaggagcgtgtgccacgcccggctaattttttgtatttttagtagagatggggtttcaccatgttacccaggatggtctcaatatcctgagttcatgatccacccaccttggcctcccaaagtgctgggattacaggcgtgagccaccacacccagccagttttcctattttctgaattcagaattgacttctctgggaaaactggagatgagaatctgcccagtgctctgctgtccagtcaccgccttttgaattttagttttggcaccaggagtaccgttagctttccccttcttctggcccatttgactcatcagcacaatagggtcaccaccttaacttttaatttctaatctgctttactgtctttagggtgtgtatgaaataaacattgacaggctttctggagccctcaaggtgcctactttgctggttccctttccagcagctcccccacctcccttagccccccctcctctggcagcctctcctgcctctgctgagctcccctccacgtgttccacccccttaccctgctgttgtttacatccaacctgcctgagaatttcctctggggaggaatctattcctgtcatggtctagtgcctgggagggagagaactttctgggggtagggtgccctccatctgaaacaggccaggtgagcatcatgcataaggcctccattctgtccgctcagattctgggtggggccacaggcaaatctcctgacttatggggagttggcttgtggttcctcccttggatagcctccatggaaccactataggctttcccaacagctgcctctgaaatagctgctgcttcgagatcctccctttttaaagcactttctaaagccctcaggatggcgggagcaaacagcactggtatattctaggagtaagtgcaggaattcagcagtgagagcatgtctgggaccacctggactgccatccatttaacctcaaatctctttgggatactcgccctccctgggaaccagagttctggctctaacattgagcagctatgcactagttccagagaagccactaacaggctgccatgtgtagatgtaggttcttaagagatcacaggctgggtcatctgatcactggatggatagctcagcctggggcatttagtgttttccctggtgataaatccccaaggcagctggatttggagctggtggcaagttgaaattattaaaaattgatttgtgtgggactgtcaaaa

SEQ ID NO: 447000 - DNA, 329 bp, Homo sapiens
ccagtatgagcgctactcagagcagcacaaggaagctgccttcttcaaagagctggtgagtgccccaccgcctctgcctgtgtcttaggggcccgcccccagccactgggttctgcagtttatctgcagtttatctgcagataaaacaagacttgaggggtctgctgggatggggtatgcaacttctctcccccattgtaccaggcagtaagagaagatgctattcgaggtagtattgcctacttctcctttgcagccatggagacagcccttgcacagctccagctgggcctggggtttgacgtgtgttcccagcagcagatctggct

SEQ ID NO: 447001 - DNA, 669 bp, Homo sapiens
gcgggaacggcgcgggtggtagaggaggagccgcgggctcgattctctaaccatggcacaggtagagaaacgtggaggtttgctccggaaatcttcagcctccaaaaaaccactgaaggaaaaagtggtgctgatgtatgatgagatcttcatgacagaggaccccagtaagtgcagtcctcggttttgggaggagctctttctcatgaaggtgaatttagagtacctagaaggcaagctggaatctcttgatggtgaggagttaatgaagatcaaggacaatattaattgcttattccaacactgcatccaggctctgggagaggagcatccaattcgggttgtcaatgcattgcagaccctgtgcgcactcattcgaggagtccatcaaaagaataagtctacctctgggtttgacattatcaacatgctgatgggctttgacaaggcggagctgtgcatgaaggtgaggcataagctgcagatgtgcctgtggatggcagcttctgacagctgttcctggacactatcagcagacaaatgtactcaaagatttggactcagaaagatacagatgattgaatttggccttgcatttagatgtttttatttcacagatttgctttatctgaataaaggaaaattttaaattcaaatttgaatggaggt

SEQ ID NO: 447002 - DNA, 1417 bp, Homo sapiens
gcgggaacggcgcgggtggtagaggaggagccgcgggctcgattctctaaccatggcacaggtagagaaacgtggaggtttgctccggaaatcttcagcctccaaaaaaccactgaaggaaaaagtggtgctgatgtatgatgagatcttcatgacagaggaccccagtaagtgcagtcctcggttttgggaggagctctttctcatgaaggtgaatttagagtacctagaaggcaagctggaatctcttgatggtgaggagttaatgaagatcaaggacaatattaattgcttattccaacactgcatccaggctctgggagaggagcatccaattcgggttgtcaatgcattgcagaccctgtgcgcactcattcgaggagtccatcaaaagaataagtctacctctgggtttgacattatcaacatgctgatgggctttgacaaggcggagctgtgcatgaagaacttgatggagagtttggattcattgctttgtgcagaaggttctgaaagtctgaagagtttatgtctgaaacttctcctttgcttagtgaccgtgacagataacatcagccagaacactattctcgagtatgtaatgatcaacagcatatttgaagcaattttacagatactttcccatcccccaagtcgtagggagcatgggtatgatgctgtcgtcctcttggctttgctggtgaactatagaaaatatgagtctgtgaatccttatattgtgaagctgtctatcgtggatgatgaggccacactcaatggaatgggacttgtaattgctcaggctttatctgagtacaacaggcagtataaagacaaggaagaagaacaccaaagtggttttttctctgctttaacaaatatggtgggcagcatgttcatagcagatgcccatgagaaaatctcagtacaaaccaatgaggccattcttctggcactttatgaagctgttcatttaaatcgcaacttcatcacagtattagctcagagccatccagaaatgggcttggtgacgacccctgtcagtcctgctcctacaaccccagtcacaccacttgggaccacaccgccttcctctgatgttataagttctgtggaactcccactggatgcagatgtacagaccagtaatctactgataacctttttaaagtatagctcaattgtcatgcaggacaccaaagatgaacacaggcttcacagtggcaaactctgtctgattatccttacatgtattgcagagcctatgagacacaggaagaaggcagcagacaagaatcttccctgccgtcctttagtatgtgcagtactggacctgatggtagagtttattgtaacacacatgatgaaggagtttcctatggatctctatatgtaagtacaaatatgtacacattta

SEQ ID NO: 447003 - DNA, 1008 bp, Homo sapiens
ggggtcgcgctgcacagcctgcggcgcagcggaggcggaccgcagtcgagtctgcagagtgttgggtctgtagccagcaaattacttcatcatctagattatccattcagttgatcctaattagcaaggataacaagaatcgtccgcactaaagtcccctgcagcgtgaccatgtcgagaccccggaagaggctggctgggacttctggttcagacaagggactatcaggaaaacgcaccaaaactgagaactcaggtgaggcattagctaaagtggaggactccaaccctcagaagacttcagccactaaaaactgtttgaagaatctaagcagccactggctgatgaagtcagagccagagagccgcctagagaaaggtgtagatgtgaagttcagcattgaggatctcaaagcacagcccaaacagacaacatgctgggatggtgttcgtaactaccaggctcggaacttccttagagccatgaagctgggagaagaagccttcttctaccatagcaactgcaaagagccaggcatcgcaggactcatgaagatcgtgaaagaggcttacccagaccacacacagtttgagaaaaacaatccccattatgacccatctagcaaagaggacaaccctaagtggtccatggtggatgtacagtttgttcggatgatgaaacgtttcattcccctggctgagctcaaatcctatcatcaagctcacaaagctactggtggccccttaaaaaatatggttctcttcactcgccagagattatcaatccagcccctgacccaggaagagtttgattttgttttgagcctggaggaaaaggaaccaagttaactgagatactgctgctggaatgggcgagacattgctgcaaagaagtcaagcttttttcagacaaaaggtgtgagggggcttgcttggtatgcttacctgggcttgtgtacctcagtggtttttgtgtacttttttcaataaaatatcaaagttgaagaa

SEQ ID NO: 447004 - DNA, 857 bp, Homo sapiens
ggggtcgcgctgcacagcctgcggcgcagcggaggcggaccgcagtcgagtctgcagagtgttgggtctgtagccagcaaattacttcatcatctagattatccattcagttgatcctaattagcaaggataacaagaatcgtccgcactaaagtcccctgcagcgtgaccatgtcgagaccccggaagaggctggctgggacttctggttcagacaagggactatcaggaaaacgcaccaaaactgagaactcaggtgaggcattagctaaagtggaggactccaaccctcagaagacttcagccactaaaaactgtttgaagaatctaagcagccactggctgatgaagtcagagccagagagccgcctagagaaaggtgtagatgtgaagttcagcattgaggatctcaaagcacagcccaaacagacaacatgctgggatggtgttcgtaactaccaggctcggaacttccttagagccatgaagctgggagaagaagccttcttctaccatagcaactgcaaagagccaggcatcgcaggactcatgaagatcgtgaaagaggcttacccagaccacacacagtttgagaaaaacaatccccattatgacccatctagcaaagaggacaaccctaagtggtccatgaagagtttgattttgttttgagcctggaggaaaaggaaccaagttaactgagatactgctgctggaatgggcgagacattgctgcaaagaagtcaagcttttttcagacaaaaggtgtgagggggcttgcttggtatgcttacctgggcttgtgtacctcagtggtttttgtgtacttttttcaataaaatatcaaagttgaagaa

SEQ ID NO: 447005 - DNA, 518 bp, Homo sapiens
cagagtctgtacctagtctatatattagactatatattgtttccaaatatctgagcccccattggctgtacagcaaggcagatgggttaagaatgtgcagggaagaaatgaaagttggatatggattaaaagattggctgtggagctgactgcaggcagatgattcaaagcttttgttttggtttcagatcgtgaaagaggcttacccagaccacacacagtttgagaaaaacaatccccattatgacccatctagcaaagaggacaaccctaagtggtccatgagattatcaatccagcccctgacccaggaagagtttgattttgttttgagcctggaggaaaaggaaccaagttaactgagatactgctgctggaatgggcgagacattgctgcaaagaagtcaagcttttttcagacaaaaggtgtgagggggcttgcttggtatgcttacctgggcttgtgtacctcagtggtttttgtgtacttttttcaataaaatatcaaagttgaagaa

SEQ ID NO: 447006 - DNA, 1171 bp, Homo sapiens
ggggtcgcgctgcacagcctgcggcgcagcggaggcggaccgcagtcgagtctgcagagtgttgggtctgtagccagcaaattacttcatcatctagattatccattcagttgatcctaattagcaaggataacaagaatcgtccgcactaaagtcccctgcagcgtgaccatgtcgagaccccggaagaggctggctgggacttctggttcagacaagggactatcaggaaaacgcaccaaaactgagaactcaggtgaggcattagctaaagtggaggactccaaccctcagaagacttcagccactaaaaactgtttgaagaatctaagcagccactggctgatgaagtcagagccagagagccgcctagagaaaggtgtagatgtgaagttcagcattgaggatctcaaagcacagcccaaacagacaacatgctgggatggtgttcgtaactaccaggctcggaacttccttagagccatgaagctgggagaagaagccttcttctaccatagcaactgcaaagagccaggcatcgcaggactcatgaagatcgtgaaagaggcttacccagaccacacacagtttgagaaaaacaatccccattatgacccatctagcaaagaggacaaccctaagtggtccatggtggatgtacagtttgttcggatgatgaaacgtttcattcccctggctgagctcaaatcctatcatcaagctcacaaagctactggtggccccttaaaaaatatggttctcttcactcgccagagattatcaatccagcccctgacccaggaagagtttgattttgttttgagcctggaggaaaaggaaccaagttaactgagatactgctgctggaatgggcgagacattgctgcaaagaagtcaagcttttttcagacaaaaggtgtgagggggcttgcttggtatgcttacctgggcttgtgtacctcagtggtttttgtgtacttttttcaataaaatatcaaagttgaagaaaaaaaaaaaaaggggggccgcccaaataccgcagggccagtaccgaccgctttgttcaagggccaaagggctttaaaaacacggcctcaacggggaagtccggctggaccctttgggaggaaccaaaagcacaaaagtagccaccgcggcagcgtaaaagact

SEQ ID NO: 447007 - DNA, 960 bp, Homo sapiens
taatttttatagataaggaaagcttcttaacagtaagattaagttcctacagctggtaatggatccatgatttgaatccaggtctgactccaaagctaagctttttccattatgaaacattgcctttaacaagcatgatcttttctttttgcttctcctattgcagacaagggactatcaggaaaacgcaccaaaactgagaactcaggtgaggcattagctaaagtggaggactccaaccctcagaagacttcagccactaaaaactgtttgaagaatctaagcagccactggctgatgaagtcagagccagagagccgcctagagaaaggtgtagatgtgaagttcagcattgaggatctcaaagcacagcccaaacagacaacatgctgggatggtgttcgtaactaccaggctcggaacttccttagagccatgaagctgggagaagaagccttcttctaccatagcaactgcaaagagccaggcatcgcaggactcatgaagatcgtgaaagaggcttacccagaccacacacagtttgagaaaaacaatccccattatgacccatctagcaaagaggacaaccctaagtggtccatggtggatgtacagtttgttcggatgatgaaacgtttcattcccctggctgagctcaaatcctatcatcaagctcacaaagctactggtggccccttaaaaaatatggttctcttcactcgccagagattatcaatccagcccctgacccaggaagagtttgattttgttttgagcctggaggaaaaggaaccaagttaactgagatactgctgctggaatgggcgagacattgctgcaaagaagtcaagcttttttcagacaaaaggtgtgagggggcttgcttggtatgcttacctgggcttgtgtacctcagtggtttttgtgtacttttttcaataaaatatcaaagttgaagaa

SEQ ID NO: 447008 - DNA, 1214 bp, Homo sapiens
ggggtcgcgctgcacagcctgcggcgcagcggaggcggaccgcagtcgagtctgcagagtgttgggtctgtagccagcaaattacttcatcatctagattatccattcagttgatcctaattagcaaggataacaagaatcgtccgcactaaagtcccctgcagcgtgaccatgtcgagaccccggaagaggctggctgggacttctggttcagacaagggactatcaggaaaacgcaccaaaactgagaactcaggtgaggcattagctaaagtggaggactccaaccctcagaagacttcagccactaaaaactgtttgaagaatctaagcagccactggctgatgaagtcagagccagagagccgcctagagaaaggtgtagatgtgaagttcagcattgaggatctcaaagcacagcccaaacagacaacatgctgggatggtgttcgtaactaccaggctcggaacttccttagagccatgaagctgggagaagaagccttcttctaccatagcaactgcaaagagccaggcatcgcaggactcatgaagatcgtgaaagaggcttacccagaccacacacagtttgagaaaaacaatccccattatgacccatctagcaaagaggacaaccctaagtggtccatggtaaagactatgctttctatttcatgacaggggaaggatgaaccaggggaagaagacggttggggtgactgtaggtcaaggtacacggcccagcacttactcagatgaggtgatactgagataggagcttcctgtgggcggttaaaaatacagtgggcacagtcagcctagacacgtctttctgtcatgtacactgttgtcacatagtggatgtacagtttgttcggatgatgaaacgtttcattcccctggctgagctcaaatcctatcatcaagctcacaaagctactggtggccccttaaaaaatatggttctcttcactcgccagagattatcaatccagcccctgacccaggaagagtttgattttgttttgagcctggaggaaaaggaaccaagttaactgagatactgctgctggaatgggcgagacattgctgcaaagaagtcaagcttttttcagacaaaaggtgtgagggggcttgcttggtatgcttacctgggcttgtgtacctcagtggtttttgtgtacttttttcaataaaatatcaaagttgaagaa

SEQ ID NO: 447009 - DNA, 785 bp, Homo sapiens
ggggtcgcgctgcacagcctgcggcgcagcggaggcggaccgcagtcgagtctgcagagtgttggaatcgtccgcactaaagtcccctgcagcgtgaccatgtcgagaccccggaagaggctggctgggacttctggttcagacaagggactatcaggaaaacgcaccaaaactgagaactcaggtgaggcattagctaaagtggaggactccaaccctcagaagacttcagccactaaaaactgtttgaagaatctaagcagccactggctgatgaagtcagagccagagagccgcctagagaaaggtgtagatgtgaagttcagcattgaggatctcaaagcacagcccaaacagacaacatgctgggatggtgttcgtaactaccaggctcggaacttccttagagccatgaagctgggagaagaagccttcttctaccatagcaactgcaaagagccaggcatcgcaggactcatgaagatcgtgaaagaggcttacccagaccacacacagtttgagaaaaacaatccccattatgacccatctagcaaagaggacaaccctaagtggtccatgaagagtttgattttgttttgagcctggaggaaaaggaaccaagttaactgagatactgctgctggaatgggcgagacattgctgcaaagaagtcaagcttttttcagacaaaaggtgtgagggggcttgcttggtatgcttacctgggcttgtgtacctcagtggtttttgtgtacttttttcaataaaatatcaaagttgaagaa

SEQ ID NO: 447010 - DNA, 641 bp, Homo sapiens
cagagtctgtacctagtctatatattagactatatattgtttccaaatatctgagcccccattggctgtacagcaaggcagatgggttaagaatgtgcagggaagaaatgaaagttggatatggattaaaagattggctgtggagctgactgcaggcagatgattcaaagcttttgttttggtttcagatcgtgaaagaggcttacccagaccacacacagtttgagaaaaacaatccccattatgacccatctagcaaagaggacaaccctaagtggtccatggtggatgtacagtttgttcggatgatgaaacgtttcattcccctggctgagctcaaatcctatcatcaagctcacaaagctactggtggccccttaaaaaatatggttctcttcactcgccagagattatcaatccagcccctgacccaggaagagtttgattttgttttgagcctggaggaaaaggaaccaagttaactgagatactgctgctggaatgggcgagacattgctgcaaagaagtcaagcttttttcagacaaaaggtgtgagggggcttgcttggtatgcttacctgggcttgtgtacctcagtggtttttgtgtacttttttcaataaaatatcaaagttgaagaa

SEQ ID NO: 447011 - DNA, 1123 bp, Homo sapiens
ggggtcgcgctgcacagcctgcggcgcagcggaggcggaccgcagtcgagtctgcagagtgttgggtctgtagccagcaaattacttcatcatctagattatccattcagttgatcctaattagcaaggataacaagaaggtaacacaaggcttacttatattcacccaacaaaagtgtctctgtggagccacttcccagtgaactacatactgagataggggttcctggatgagaaggaccaaggacagaaccgagaagagtttaggggcaggttatgcgagatggaaatggcgcagataacggagggaaggatttgagggctcaaacgtaggcgtctgtgtttcgcaaaagttggagacgttctaggctgcctctcgttgcctccatctcgctctgcgcgggttttggaggacattagcattctttcttgtatctccgttgattccagaatcgtccgcactaaagtcccctgcagcgtgaccatgtcgagaccccggaagaggctggctgggacttctggttcagacaagggactatcaggaaaacgcaccaaaactgagaactcaggtgaggcattagctaaagtggaggactccaaccctcagaagacttcagccactaaaaactgtttgaagaatctaagcagccactggctgatgaagtcagagccagagagccgcctagagaaaggtgtagatgtgaagttcagcattgaggatctcaaagcacagcccaaacagacaacatgctgggatggtgttcgtaactaccaggctcggaacttccttagagccatgaagctgggagaagaagccttcttctaccatagcaactgcaaagagccaggcatcgcaggactcatgaaggttagttgggcaggttttggtgtgaatcccttttcctccagggagactaacttaagtagatataaagggatataccttaattaggcaacaaaaaagtacactcccccccaccccatcccccttttacaggaatagggaaaaactgccctggccccttcctatctgataactcaaagcaggccttcattcaggtccgactagcacagacttcactccacctctaagtcttgatctcactcgaaaacaggcctgatg

SEQ ID NO: 447012 - DNA, 895 bp, Homo sapiens
tttaacaggtgaggcggaatccccaggtttaagaacttggaagtttcaggaatacatattaagaattatgtatttaggtataaatgagatcagaaagaacagcccaaagaatagagtggtgggatggtgttcgtaactaccaggctcggaacttccttagagccatgaagctgggagaagaagccttcttctaccatagcaactgcaaagagccaggcatcgcaggactcatgaagatcgtgaaagaggcttacccagaccacacacagtttgagaaaaacaatccccattatgacccatctagcaaagaggacaaccctaagtggtccatggtaaagactatgctttctatttcatgacaggggaaggatgaaccaggggaagaagacggttggggtgactgtaggtcaaggtacacggcccagcacttactcagatgaggtgatactgagataggagcttcctgtgggcggttaaaaatacagtgggcacagtcagcctagacacgtctttctgtcatgtacactgttgtcacatagtggatgtacagtttgttcggatgatgaaacgtttcattcccctggctgagctcaaatcctatcatcaagctcacaaagctactggtggccccttaaaaaatatggttctcttcactcgccagagattatcaatccagcccctgacccaggaagagtttgattttgttttgagcctggaggaaaaggaaccaagttaactgagatactgctgctggaatgggcgagacattgctgcaaagaagtcaagcttttttcagacaaaaggtgtgagggggcttgcttggtatgcttacctgggcttgtgtacctcagtggtttttgtgtacttttttcaataaaatatcaaagttgaagaa

SEQ ID NO: 447013 - DNA, 367 bp, Homo sapiens
gatactgagataggagcttcctgtgggcggttaaaaatacagtgggcacagtcagcctagacacgtctttctgtcatgtacactgttgtcacatagtggatgtacagtttgttcggatgatgaaacgtttcattcccctggctgagctcaaatcctatcatcaagctcacaaagctactggtggccccttaaaaaatatggttctcttcactcgccagagattatcaatccagcccctgacccagggtaagagtgggccctctcctttattgtccatataccagaatgacctcatgaattcccacttactagctgattaaacttgggcatggtacttcacctttctcagtcagcatcctcacctgta

SEQ ID NO: 447014 - DNA, 798 bp, Homo sapiens
cgctgcacagcctgcggcgcagcggaggcggaccgcagtcgagtctgcagagtgttgggtctgtagccagcaaattacttcatcatctagattatccattcagttgatcctaattagcaaggataacaagaaggtaacacaaggcttacttatattcacccaacaaaagtgtctctgtggagccacttcccagtgaactacatactgagataggggttcctggatgagaaggaccaaggacagaaccgagaagagtttaggggcaggttatgcgagatggaaatggcgcagataacggagggaaggatttgagggctcaaacgtaggcgtctgtgtttcgcaaaagttggagacgttctaggctgcctctcgttgcctccatctcgctctgcgcgggttttggaggacattagcattctttcttgtatctccgttgattccagaatcgtccgcactaaagtcccctgcagcgtgaccatgtcgagaccccggaagaggctggctgggacttctggttcaggtgagctgcccctaggctgcacaaaggcagcccaagaaaaaacttttctcgaagagcctgtttagtactcatttttcactccctgctttttgagaaccctttgtgatatttttactccattatccttaatcactctccatcttctttacttgtctcaccaagctcctacctacagttcctttttcttgtttattcaggcaatggttgttgtgcacaaagactctttgagataccaggtggcgtgctaaagaatataaagcgcctgcttgcgggtgaac

SEQ ID NO: 447015 - DNA, 1321 bp, Homo sapiens
ggggtcgcgctgcacagcctgcggcgcagcggaggcggaccgcagtcgagtctgcagagtgttgggtctgtagccagcaaattacttcatcatctagattatccattcagttgatcctaattagcaaggataacaagaaggtaacacaaggcttacttatattcacccaacaaaagtgtctctgtggagccacttcccagtgaactacatactgagataggggttcctggatgagaaggaccaaggacagaaccgagaagagtttaggggcaggttatgcgagatggaaatggcgcagataacggagggaaggatttgagggctcaaacgtaggcgtctgtgtttcgcaaaagttggagacgttctaggctgcctctcgttgcctccatctcgctctgcgcgggttttggaggacattagcattctttcttgtatctccgttgattccagaatcgtccgcactaaagtcccctgcagcgtgaccatgtcgagaccccggaagaggctggctgggacttctggttcagacaagggactatcaggaaaacgcaccaaaactgagaactcaggtgaggcattagctaaagtggaggactccaaccctcagaagacttcagccactaaaaactgtttgaagaatctaagcagccactggctgatgaagtcagagccagagagccgcctagagaaaggtgtagatgtgaagttcagcattgaggatctcaaagcacagcccaaacagacaacatgctgggatggtgttcgtaactaccaggctcggaacttccttagagccatgaagctgggagaagaagccttcttctaccatagcaactgcaaagagccaggcatcgcaggactcatgaagatcgtgaaagaggcttacccagaccacacacagtttgagaaaaacaatccccattatgacccatctagcaaagaggacaaccctaagtggtccatggtggatgtacagtttgttcggatgatgaaacgtttcattcccctggctgagctcaaatcctatcatcaagctcacaaagctactggtggccccttaaaaaatatggttctcttcactcgccagagattatcaatccagcccctgacccaggaagagtttgattttgttttgagcctggaggaaaaggaaccaagttaactgagatactgctgctggaatgggcgagacattgctgcaaagaagtcaagcttttttcagacaaaaggtgtgagggggcttgcttggtatgcttacctgggcttgtgtacctcagtggtttttgtgtacttttttcaataaaatatcaaagttgaagaa

SEQ ID NO: 447016 - DNA, 936 bp, Homo sapiens
ggggtcgcgctgcacagcctgcggcgcagcggaggcggaccgcagtcgagtctgcagagtgttggaatcgtccgcactaaagtcccctgcagcgtgaccatgtcgagaccccggaagaggctggctgggacttctggttcagacaagggactatcaggaaaacgcaccaaaactgagaactcaggtgaggcattagctaaagtggaggactccaaccctcagaagacttcagccactaaaaactgtttgaagaatctaagcagccactggctgatgaagtcagagccagagagccgcctagagaaaggtgtagatgtgaagttcagcattgaggatctcaaagcacagcccaaacagacaacatgctgggatggtgttcgtaactaccaggctcggaacttccttagagccatgaagctgggagaagaagccttcttctaccatagcaactgcaaagagccaggcatcgcaggactcatgaagatcgtgaaagaggcttacccagaccacacacagtttgagaaaaacaatccccattatgacccatctagcaaagaggacaaccctaagtggtccatggtggatgtacagtttgttcggatgatgaaacgtttcattcccctggctgagctcaaatcctatcatcaagctcacaaagctactggtggccccttaaaaaatatggttctcttcactcgccagagattatcaatccagcccctgacccaggaagagtttgattttgttttgagcctggaggaaaaggaaccaagttaactgagatactgctgctggaatgggcgagacattgctgcaaagaagtcaagcttttttcagacaaaaggtgtgagggggcttgcttggtatgcttacctgggcttgtgtacctcagtggtttttgtgtacttttttcaataaaatatcaaagttgaagaa

SEQ ID NO: 447017 - DNA, 1155 bp, Homo sapiens
ggggtcgcgctgcacagcctgcggcgcagcggaggcggaccgcagtcgagtctgcagagtgttgggtctgtagccagcaaattacttcatcatctagattatccattcagttgatcctaattagcaaggataacaagaatcgtccgcactaaagtcccctgcagcgtgaccatgtcgagaccccggaagaggctggctgggacttctggttcaggcacattctgattgtcttgggatgaaatcgaatcatcaccatttttctacaatgtcctgaatgaactgtttctttcaacttttattggcaccttcaaggagcagaaaggagatgggccaggagccacagtgagcaagaaggaaagacacaagggactatcaggaaaacgcaccaaaactgagaactcaggtgaggcattagctaaagtggaggactccaaccctcagaagacttcagccactaaaaactgtttgaagaatctaagcagccactggctgatgaagtcagagccagagagccgcctagagaaaggtgtagatgtgaagttcagcattgaggatctcaaagcacagcccaaacagacaacatgctgggatggtgttcgtaactaccaggctcggaacttccttagagccatgaagctgggagaagaagccttcttctaccatagcaactgcaaagagccaggcatcgcaggactcatgaagatcgtgaaagaggcttacccagaccacacacagtttgagaaaaacaatccccattatgacccatctagcaaagaggacaaccctaagtggtccatggtggatgtacagtttgttcggatgatgaaacgtttcattcccctggctgagctcaaatcctatcatcaagctcacaaagctactggtggccccttaaaaaatatggttctcttcactcgccagagattatcaatccagcccctgacccaggaagagtttgattttgttttgagcctggaggaaaaggaaccaagttaactgagatactgctgctggaatgggcgagacattgctgcaaagaagtcaagcttttttcagacaaaaggtgtgagggggcttgcttggtatgcttacctgggcttgtgtacctcagtggtttttgtgtacttttttcaataaaatatcaaagttgaagaa

SEQ ID NO: 447018 - DNA, 1156 bp, Homo sapiens
ggggtcgcgctgcacagcctgcggcgcagcggaggcggaccgcagtcgagtctgcagagtgttgggtctgtagccagcaaattacttcatcatctagattatccattcagttgatcctaattagcaaggataacaagaatcgtccgcactaaagtcccctgcagcgtgaccatgtcgagaccccggaagaggctggctgggacttctggttcagacaagggactatcaggaaaacgcaccaaaactgagaactcaggtgaggcattagctaaagtggaggactccaaccctcagaagacttcagccactaaaaactgtttgaagaatctaagcagccactggctgatgaagtcagagccagagagccgcctagagaaaggtgtagatgtgaagttcagcattgaggatctcaaagcacagcccaaacagacaacatgctgggatggtgttcgtaactaccaggctcggaacttccttagagccatgaagctgggagaagaagccttcttctaccatagcaactgcaaagagccaggcatcgcaggactcatgaagatcgtgaaagaggcttacccagaccacacacagtttgagaaaaacaatccccattatgacccatctagcaaagaggacaaccctaagtggtccatggtggatgtacagtttgttcggatgatgaaacgtttcattcccctggctgagctcaaatcctatcatcaagctcacaaagctactggtggccccttaaaaaatatggttctcttcactcgccagagttacctgttactattacccagtactctatagtgcttggcacctggtaaatagttttgaacgaatgactgctcgccttagtaccatgtaagatgtacctgtgcctggcacaactttcctgttcaagaggggacattaaaaactaatccttcctttttccctttttttttttgtagaagagtttgattttgttttgagcctggaggaaaaggaaccaagttaactgagatactgctgctggaatgggcgagacattgctgcaaagaagtcaagcttttttcagacaaaaggtgtgagggggcttgcttggtatgcttacctgggcttgtgtacctcagtggtttttgtgtacttttttcaataaaatatcaaagttgaagaa

SEQ ID NO: 447019 - DNA, 1101 bp, Homo sapiens
ggggtcgcgctgcacagcctgcggcgcagcggaggcggaccgcagtcgagtctgcagagtgttgggtctgtagccagcaaattacttcatcatctagattatccattcagttgatcctaattagcaaggataacaagaaggtaacacaaggcttacttatattcacccaacaaaagtgtctctgtggagccacttcccagtgaactacatactgagataggggttcctggatgagaaggaccaaggacagaaccgagaagagtttaggggcaggttatgcgagatggaaatggcgcagataacggagggaaggatttgagggctcaaacgtaggcgtctgtgtttcgcaaaagttggagacgttctaggctgcctctcgttgcctccatctcgctctgcgcgggttttggaggacattagcattctttcttgtatctccgttgattccagaatcgtccgcactaaagtcccctgcagcgtgaccatgtcgagaccccggaagaggctggctgggacttctggttcagacaagggactatcaggaaaacgcaccaaaactgagaactcaggtgaggcattagctaaagtggaggactccaaccctcagaagacttcagccactaaaaactgtttgaagaatctaagcagccactggctgatgaagtcagagccagagagccgcctagagaaaggtgtagatgtgaagttcagcattgaggatctcaaagcacagcccaaacagacaacatgctgggatggtgttcgtaactaccaggctcggaacttccttagagccatgaagctgggagaagaagccttcttctaccatagcaactgcaaagagccaggcatcgcaggactcatgaagatcgtgaaagaggcttacccagaccacacacagtttgagaaaaacaatccccattatgacccatctagcaaagaggacaaccctaagtggtccatgaagagtttgatttagctatcttgagacactaggaggtgaaacgagaactctacgttaatatctgatatactacctgcctcgcggatcgcgagtcgacgacactagctccaaagaagtcaccttttttcagacagtgt

SEQ ID NO: 447020 - DNA, 879 bp, Homo sapiens
ggggtcgcgctgcacagcctgcggcgcagcggaggcggaccgcagtcgagtctgcagagtgttggaatcgtccgcactaaagtcccctgcagcgtgaccatgtcgagaccccggaagaggctggctgggacttctggttcagacaagggactatcaggaaaacgcaccaaaactgagaactcaggtgaggcattagctaaagtggaggactccaaccctcagaagacttcagccactaaaaactgtttgaagaatctaagcagccactggctgatgaagtcagagccagagagccgcctagagaaaggtgtagatgtgaagttcagcattgaggatctcaaagcacagcccaaacagacaacatgctgggatggtgttcgtaactaccaggctcggaacttccttagagccatgaagctgggagaagaagccttcttctaccatagcaactgcaaagagccaggcatcgcaggactcatgaagatcgtgaaagaggcttacccagaccacacacagtttgaggtggatgtacagtttgttcggatgatgaaacgtttcattcccctggctgagctcaaatcctatcatcaagctcacaaagctactggtggccccttaaaaaatatggttctcttcactcgccagagattatcaatccagcccctgacccaggaagagtttgattttgttttgagcctggaggaaaaggaaccaagttaactgagatactgctgctggaatgggcgagacattgctgcaaagaagtcaagcttttttcagacaaaaggtgtgagggggcttgcttggtatgcttacctgggcttgtgtacctcagtggtttttgtgtacttttttcaataaaatatcaaagttgaagaa

SEQ ID NO: 447021 - DNA, 1783 bp, Homo sapiens
ttccagtccgctcccggttcctggctccagctaggctcggcagaaataggagcgcgcaggcgcgacgtgcggctcgcagaacggcgagtagcggagcgggacccgctggaatcatcatccagggacgtgccagaaaccacaagaaaacatggggagggttttcctcacgggagaaaaagccaattccatattaaaacgctacccaagagctaatgggttttttgaagaaataagacagggcaacattgagcgtgagtgcaaagaagaattctgtacatttgaagaagcaagagaagcttttgaaaataatgaaaaaactaaggagttttggagcacctacacaaaagcgcaacaaggggagagtaaccgaggaagtgactggtttcagttttaccttacctttccgttaatctttggcctcttcattatcctccttgtcattttcctaatctggagatgcttcctaagaaacaaaactcgtagacagacagtgactgaaggccacattcctttccctcagcaccttaatattatcaccccaccccccccaccagatgaagtgtttgacagcagtggattgtctccaggctttctgggatatgtagttgggcgctcagattccgtctctactcgcctgtccaattgtgatcccccgccaacctatgaggaagccactggccaagtgaacctgcagaggagtgaaacagaacctcatttagacccacccccagagtatgaggacatagtcaactccaactcagccagtgccattcctatggtgcctgtggtcaccaccatcaaatgaagctgcaaacttctttttactctaatcatttttaaaatactaatggaagaactttctagcactttaccactacataaatgttcattgacttattttattggactcttaccgcataccacttcacacttgttttattttctttagttttgtttcttgttatagaatcattatccatgctcatttttgctaggggaaatatatgaagagggaaaacatactaatgggggtctttctgtgatgtgatgagacatacatgtaagtgtatatatgtgtgtataggcatatatacgtgtgtatgcatcaacacagtatatgtaaaactgtcttaaaaatccattaacttctacctaaatcacctggaaggagagcattactcaccaaaattgcaaaacaagggtatcaagaatttgtgtaatagccagtgacatgctgtagatttttgcaaactggatgtacttagcatgttttctaattctgactggcttttgttaacttgataattcttcatctaccttaaaaagaaaaaaattacacatagtcattcttgatgttataaatagagaaaaagtgtgtgtgagcaataatgcataagctactgataacttgcttacagcagatagcaataaggtatttggtggcattcggcttgttttgtaatagggattttttttttggttgaccactcccccacacttccaaaattaaacagtgttttcttagcatcttgaatatctcctgcggtgtatattaacatcttgatgagacagatttccaggcaacaaaataatttctaaaatggatatatgtgtggattaatgacaggcagtaaatacccattactcctttactcatagctggtaaaattattcccactgttttattgccttttactgtacgttctacactctgtcctactcccacagaattttcaagcccttaagagtttagttaaaataaaatttttgaaattattgtctt

SEQ ID NO: 447022 - DNA, 4483 bp, Homo sapiens
ttccagtccgctcccggttcctggctccagctaggctcggcagaaataggagcgcgcaggcgcgacgtgcggctcgcagaacggcgagtagcggagcgggacccgctggaatcatcatccagggacgtgccagaaaccacaagaaaacatggggagggttttcctcacgggagaaaaagccaattccatattaaaacgctacccaagagctaatgggttttttgaagaaataagacagggcaacattgagcgtgagtgcaaagaagaattctgtacatttgaagaagcaagagaagcttttgaaaataatgaaaaaactaaggagttttggagcacctacacaaaagcgcaacaaggggagagtaaccgaggaagtgactggtttcagttttaccttacctttccgttaatctttggcctcttcattatcctccttgtcattttcctaatctggagatgcttcctaagaaacaaaactcgtagacagacagtgactgaaggccacattcctttccctcagcaccttaatattatcaccccaccccccccaccagatgaagtgtttgacagcagtggattgtctccaggctttctgggatatgtagttgggcgctcagattccgtctctactcgcctgtccaattgtgatcccccgccaacctatgaggaagccactggccaagtgaacctgcagaggagtgaaacagaacctcatttagacccacccccagagtatgaggacatagtcaactccaactcagccagtgccattcctatggtgcctgtggtcaccaccatcaaatgaagctgcaaacttctttttactctaatcatttttaaaatactaatggaagaactttctagcactttaccactacataaatgttcattgacttattttattggactcttaccgcataccacttcacacttgttttattttctttagttttgtttcttgttatagaatcattatccatgctcatttttgctaggggaaatatatgaagagggaaaacatactaatgggggtctttctgtgatgtgatgagacatacatgtaagtgtatatatgtgtgtataggcatatatacgtgtgtatgcatcaacacagtatatgtaaaactgtcttaaaaatccattaacttctacctaaatcacctggaaggagagcattactcaccaaaattgcaaaacaagggtatcaagaatttgtgtaatagccagtgacatgctgtagatttttgcaaactggatgtacttagcatgttttctaattctgactggcttttgttaacttgataattcttcatctaccttaaaaagaaaaaaattacacatagtcattcttgatgttataaatagagaaaaagtgtgtgtgagcaataatgcataagctactgataacttgcttacagcagatagcaataaggtatttggtggcattcggcttgttttgtaatagggattttttttttggttgaccactcccccacacttccaaaattaaacagtgttttcttagcatcttgaatatctcctgcggtgtatattaacatcttgatgagacagatttccaggcaacaaaataatttctaaaatggatatatgtgtggattaatgacaggcagtaaatacccattactcctttactcatagctggtaaaattattcccactgttttattgccttttactgtacgttctacactctgtcctactcccacagaattttcaagcccttaagagtttagttaaaataaaatttttgaaattattgtcttaatatttttatataggctgatgtctttgcctcaagattgttaggaggtaattttccattgaattatcaactgtgatttttatattgccctccaagtggtagaagaagattgcaaagtccatgttatgctaggtgcacaataaatctagtaatagccccacacagatctcatcattgttgctacttccttttgtattttcatcaggtatttttttaactgtagggtttttacttttttcttggagcagagagaacaggctgtaaatgggttgccaacataagctggctgagaaataaaagaaaacaagacagttgttcataaagtttcattttgtatgcactgatggcaaattcattaggtcagttaagggaaatatttgtaccacttccaaacttttcagcgttggataaaatgattgatgaggcaggcagaaggaatgtaggtttcaggtgtgtcatttcctgctgcttccagctccatccctacagactcctccccgagtcctgccctggaaccaaaggaaggaggaacactgaggggaatcctgaagtaggagtcagatgacctgaactcagatctccctctatcacatgcttgccaccactgtaccttgagcaagaatcatatctgaccctcaacctcctcaactctaaaatggggataacatcatttgtcctgcacttctctaagggctttacaaggatcaaataagatggtgtgtatgtaagaaatttgtaaaatgtgaagagctatctacactaagttcgtaatgttattattattgtgcttcatggagaattttcccctctgttttcctaaattgtatgagagctttcacacagtgagaaatagagcaggctgccccataaatgggtaacatattcctaatctgagtgtgtgggctgttagagaacccctgccatgctctggtctgttctgaaactgtgccaactgaaagatgatagtccacacagcacaaacaggtttaagcaaatgatagaaagggaagtaaggcgtgtgtgctagttaataggtttagtagcttttatggactaaaaatgattgattgtatcttgaccctggtctcagaaatgacatttttacttttgccatgagtacacatcagatatctttggcttctatttaaagctaaaggtagaagtgtttgatccagtgaactgtgtatgtatgtgtggggtttttttctttatttttaaatgaaaattaagacaccttttgtgtggacatgtttttgtctttaatgtcaggctttagattagaccagcagttttcaaagtatggccaatggacccctgggttccttgagagcctttcaggggggactatgagatcaaaatatttttattataatgtgaagacattgtcttttcactctatctcaaaaaaagtgttgcaaatgtaaaacattgccatcttctcacaaatctctttttttgtttttgaaaatatggccatttttcataaaatgttatttgtgttagcatgtaatgggtttactatgtttaaataagttaatactttaaaaattttcaggtttttttagtatggtgaatattgatagatataaacctcatgaacaaaagtactttggcatccagattctcaataaatgttaagagcgtaagtgtaagggggtccagagaccaaaagttttagagctacaggattagacataggagcaggatattctgttagtgtgatttcttgcaactttattttacattttaaactgctgatattggatataatgctgctttttagagacacctaaattgcagtatcagaatgaatgttgatgtttgaagccaaaaagccaaatgcttaaactgatcaatgactgtagctttttagactgttggtcaaagaacattctacttcacagtaatagctctatcagccacagatctcatggtggctgttgcatgataatgataggataaacaaaataccactgtcttcaagaaacattatcttaggtttgtttgtttggtttgagtttgatttggcttttatattttttaaaatcccttttgctaccccatctggttttataaactgagtttcttagcattcgttaaaattaaggggtttgtttggaataatatatattttttatgcttttgtctttcttacctgattgatattacattcacctttgattgttttttaaaagtttatttttacagaatatatttagtacctttcttaaggagtaactgaattgaatcaaccagtttgcatttaaataaaagaacaggctcagtggtcttcctgtagaatggtttacatgcctgcatgtgcagtagttgtgtctggaatcctagaattggcactttctgcctccttgctctaaatgtcacaaaaaattatacttccttaaagtaaatgtaatgatttcttcttttcctattgaccagtacagatagatatgttgtgtttgcttcatttttaatgatgacttcaagattgatgatgtgatccaataactgtggaggtagctttaacttggttctgtgtaaatagtatgtattttattataatatttctcattttaagatgcttggtttacattaaattatggtatttaactatttttatgtttatactaggtagggtctttcttatgtttctgtgtttttggtatgctaaataaagctatttttaaacccaaaaaaaaaa

SEQ ID NO: 447023 - DNA, 4413 bp, Homo sapiens
tggctatgttttctaaagagcatctagcagttttcatctggtatatcaacttgccacataggttttttatacttatatttctttttagttttcctcacgggagaaaaagccaattccatattaaaacgctacccaagagctaatgggttttttgaagaaataagacagggcaacattgagcgtgagtgcaaagaagaattctgtacatttgaagaagcaagagaagcttttgaaaataatgaaaaaactaaggagttttggagcacctacacaaaagcgcaacaaggggagagtaaccgaggaagtgactggtttcagttttaccttacctttccgttaatctttggcctcttcattatcctccttgtcattttcctaatctggagatgcttcctaagaaacaaaactcgtagacagacagtgactgaaggccacattcctttccctcagcaccttaatattatcaccccaccccccccaccagatgaagtgtttgacagcagtggattgtctccaggctttctgggatatgtagttgggcgctcagattccgtctctactcgcctgtccaattgtgatcccccgccaacctatgaggaagccactggccaagtgaacctgcagaggagtgaaacagaacctcatttagacccacccccagagtatgaggacatagtcaactccaactcagccagtgccattcctatggtgcctgtggtcaccaccatcaaatgaagctgcaaacttctttttactctaatcatttttaaaatactaatggaagaactttctagcactttaccactacataaatgttcattgacttattttattggactcttaccgcataccacttcacacttgttttattttctttagttttgtttcttgttatagaatcattatccatgctcatttttgctaggggaaatatatgaagagggaaaacatactaatgggggtctttctgtgatgtgatgagacatacatgtaagtgtatatatgtgtgtataggcatatatacgtgtgtatgcatcaacacagtatatgtaaaactgtcttaaaaatccattaacttctacctaaatcacctggaaggagagcattactcaccaaaattgcaaaacaagggtatcaagaatttgtgtaatagccagtgacatgctgtagatttttgcaaactggatgtacttagcatgttttctaattctgactggcttttgttaacttgataattcttcatctaccttaaaaagaaaaaaattacacatagtcattcttgatgttataaatagagaaaaagtgtgtgtgagcaataatgcataagctactgataacttgcttacagcagatagcaataaggtatttggtggcattcggcttgttttgtaatagggattttttttttggttgaccactcccccacacttccaaaattaaacagtgttttcttagcatcttgaatatctcctgcggtgtatattaacatcttgatgagacagatttccaggcaacaaaataatttctaaaatggatatatgtgtggattaatgacaggcagtaaatacccattactcctttactcatagctggtaaaattattcccactgttttattgccttttactgtacgttctacactctgtcctactcccacagaattttcaagcccttaagagtttagttaaaataaaatttttgaaattattgtcttaatatttttatataggctgatgtctttgcctcaagattgttaggaggtaattttccattgaattatcaactgtgatttttatattgccctccaagtggtagaagaagattgcaaagtccatgttatgctaggtgcacaataaatctagtaatagccccacacagatctcatcattgttgctacttccttttgtattttcatcaggtatttttttaactgtagggtttttacttttttcttggagcagagagaacaggctgtaaatgggttgccaacataagctggctgagaaataaaagaaaacaagacagttgttcataaagtttcattttgtatgcactgatggcaaattcattaggtcagttaagggaaatatttgtaccacttccaaacttttcagcgttggataaaatgattgatgaggcaggcagaaggaatgtaggtttcaggtgtgtcatttcctgctgcttccagctccatccctacagactcctccccgagtcctgccctggaaccaaaggaaggaggaacactgaggggaatcctgaagtaggagtcagatgacctgaactcagatctccctctatcacatgcttgccaccactgtaccttgagcaagaatcatatctgaccctcaacctcctcaactctaaaatggggataacatcatttgtcctgcacttctctaagggctttacaaggatcaaataagatggtgtgtatgtaagaaatttgtaaaatgtgaagagctatctacactaagttcgtaatgttattattattgtgcttcatggagaattttcccctctgttttcctaaattgtatgagagctttcacacagtgagaaatagagcaggctgccccataaatgggtaacatattcctaatctgagtgtgtgggctgttagagaacccctgccatgctctggtctgttctgaaactgtgccaactgaaagatgatagtccacacagcacaaacaggtttaagcaaatgatagaaagggaagtaaggcgtgtgtgctagttaataggtttagtagcttttatggactaaaaatgattgattgtatcttgaccctggtctcagaaatgacatttttacttttgccatgagtacacatcagatatctttggcttctatttaaagctaaaggtagaagtgtttgatccagtgaactgtgtatgtatgtgtggggtttttttctttatttttaaatgaaaattaagacaccttttgtgtggacatgtttttgtctttaatgtcaggctttagattagaccagcagttttcaaagtatggccaatggacccctgggttccttgagagcctttcaggggggactatgagatcaaaatatttttattataatgtgaagacattgtcttttcactctatctcaaaaaaagtgttgcaaatgtaaaacattgccatcttctcacaaatctctttttttgtttttgaaaatatggccatttttcataaaatgttatttgtgttagcatgtaatgggtttactatgtttaaataagttaatactttaaaaattttcaggtttttttagtatggtgaatattgatagatataaacctcatgaacaaaagtactttggcatccagattctcaataaatgttaagagcgtaagtgtaagggggtccagagaccaaaagttttagagctacaggattagacataggagcaggatattctgttagtgtgatttcttgcaactttattttacattttaaactgctgatattggatataatgctgctttttagagacacctaaattgcagtatcagaatgaatgttgatgtttgaagccaaaaagccaaatgcttaaactgatcaatgactgtagctttttagactgttggtcaaagaacattctacttcacagtaatagctctatcagccacagatctcatggtggctgttgcatgataatgataggataaacaaaataccactgtcttcaagaaacattatcttaggtttgtttgtttggtttgagtttgatttggcttttatattttttaaaatcccttttgctaccccatctggttttataaactgagtttcttagcattcgttaaaattaaggggtttgtttggaataatatatattttttatgcttttgtctttcttacctgattgatattacattcacctttgattgttttttaaaagtttatttttacagaatatatttagtacctttcttaaggagtaactgaattgaatcaaccagtttgcatttaaataaaagaacaggctcagtggtcttcctgtagaatggtttacatgcctgcatgtgcagtagttgtgtctggaatcctagaattggcactttctgcctccttgctctaaatgtcacaaaaaattatacttccttaaagtaaatgtaatgatttcttcttttcctattgaccagtacagatagatatgttgtgtttgcttcatttttaatgatgacttcaagattgatgatgtgatccaataactgtggaggtagctttaacttggttctgtgtaaatagtatgtattttattataatatttctcattttaagatgcttggtttacattaaattatggtatttaactatttttatgtttatactaggtagggtctttcttatgtttctgtgtttttggtatgctaaataaagctatttttaaacccaaaaaaaaaa

SEQ ID NO: 447024 - DNA, 4429 bp, Homo sapiens
ttccagtccgctcccggttcctggctccagctaggctcggcagaaataggagcgcgcaggcgcgacgtgcggctcgcagaacggcgagtagcggagcgggacccgctggaatcatcatccagggacgtgccagaaaccacaagaaaacatggggagggttttcctcacgggagaaaaagccaattccatattaaaacgctacccaagagctaatgggttttttgaagaaataagacagggcaacattgagcgtgagtgcaaagaagaattctgtacatttgaagaagcaagagaagcttttgaaaataatgaaaaaactaaggagttttggagcacctacacaaaagcgcaacaaggggagagtaaccgaggaagtgactggtttcagttttaccttacctttccgttaatctttggcctcttcattatcctccttgtcattttcctaatctggagatgcttcctaagaaacaaaactcgtagacagacagtgactgaaggccacattcctttccctcagcaccttaatattatcaccccaccccccccaccagatgaagtgtttgacagcagtggattgtctccaggctttctgggatatgtagttgggcgctcagattccgtctctactcgcctgtccaattgtgatcccccgccaacctatgaggaagccactggccaagtgaacctgcagaggagtgaaacagaacctcatttagacccacccccagagtatgaggacatagtcaactccaactcagccagtgccattcctatggtgcctgtggtcaccaccatcaaatgaagctgcaaacttctttttactctaatcatttttaaaatactaatggaagaactttctagcactttaccactacataaatgttcattgacttattttattggactcttaccgcataccacttcacacttgttttattttctttagttttgtttcttgttatagaatcattatccatgctcatttttgctaggggaaatatatgaagagggaaaacatactaatgggggtctttctgtgatgtgatgagacatacatgtaagtgtatatatgtgtgtataggcatatatacgtgtgtatgcatcaacacagtatatgtaaaactgtcttaaaaatccattaacttctacctaaatcacctggaaggagagcattactcaccaaaattgcaaaacaagggtatcaagaatttgtgtaatagccagtgacatgctgtagatttttgcaaactggatgtacttagcatgttttctaattctgactggcttttgttaacttgataattcttcatctaccttaaaaagaaaaaaattacacatagtcattcttgatgttataaatagagaaaaagtgtgtgtgagcaataatgcataagctactgataacttgcttacagcagatagcaataaggtatttggtggcattcggcttgttttgtaatagggattttttttttggttgaccactcccccacacttccaaaattaaacagtgttttcttagcatcttgaatatctcctgcggtgtatattaacatcttgatgagacagatttccaggcaacaaaataatttctaaaatggatatatgtgtggattaatgacaggcagtaaatacccattactcctttactcatagctggtaaaattattcccactgttttattgccttttactgtacgttctacactctgtcctactcccacagaattttcaagcccttaagagtttagttaaaataaaatttttgaaattattgtcttaatatttttatataggctgatgtctttgcctcaagattgttaggaggtaattttccattgaattatcaactgtgatttttatattgccctccaagtggtagaagaagattgcaaagtccatgttatgctaggtgcacaataaatctagtaatagccccacacagatctcatcattgttgctacttccttttgtattttcatcaggtatttttttaactgtagggtttttacttttttcttggagcagagagaacaggctgtaaatgggttgccaacataagctggctgagaaataaaagaaaacaagacagttgttcataaagtttcattttgtatgcactgatggcaaattcattaggtcagttaagggaaatatttgtaccacttccaaacttttcagcgttggataaaatgattgatgaggcaggcagaaggaatgtaggtttcaggtgtgtcatttcctgctgcttccagctccatccctacagactcctccccgagtcctgccctggaaccaaaggaaggaggaacactgaggggaatcctgaagtaggagtcagatgacctgaactcagatctccctctatcacatgcttgccaccactgtaccttgagcaagaatcatatctgaccctcaacctcctcaactctaaaatggggataacatcatttgtcctgcacttctctaagggctttacaaggatcaaataagatggtgtgtatgtaagaaatttgtaaaatgtgaagagctatctacactaagttcgtaatgttattattattgtgcttcatggagaattttcccctctgttttcctaaattgtatgagagctttcacacagtgagaaatagagcaggctgccccataaatgggtaacatattcctaatctgagtgtgtgggctgttagagaacccctgccatgctctggtctgttctgaaactgtgccaactgaaagatgatagtccacacagcacaaacaggtttaagcaaatgatagaaagggaagtaaggcgtgtgtgctagttaataggtttagtagcttttatggactaaaaatgattgattgtatcttgaccctggtctcagaaatgacatttttacttttgccatgagtacacatcagatatctttggcttctatttaaagctaaaggtagaagtgtttgatccagtgaactgtgtatgtatgtgtggggtttttttctttatttttaaatgaaaattaagacaccttttgtgtggacatgtttttgtctttaatgtcaggctttagattagaccagcagttttcaaagtatggccaatggacccctgggttccttgagagcctttcaggggggactatgagatcaaaatatttttattataatgtgaagacattgtcttttcactctatctcaaaaaaagtgttgcaaatgtaaaacattgccatcttctcacaaatctctttttttgtttttgaaaatatggccatttttcataaaatgttatttgtgttagcatgtaatgggtttactatgtttaaataagttaatactttaaaaattttcaggtttttttagtatggtgaatattgatagatataaacctcatgaacaaaagtactttggcatccagattctcaataaatgttaagagcgtaagtgtaagggggtccagagaccaaaagttttagagctacaggattagacataggagcaggatattctgttagtgtgatttcttgcaactttattttacattttaaactgctgatattggatataatgctgctttttagagacacctaaattgcagtatcagaatgaatgttgatgtttgaagccaaaaagccaaatgcttaaactgatcaatgactgtagctttttagactgttggtcaaagaacattctacttcacagtaatagctctatcagccacagatctcatggtggctgttgcatgataatgataggataaacaaaataccactgtcttcaagaaacattatcttaggtttgtttgtttggtttgagtttgatttggcttttatattttttaaaatcccttttgctaccccatctggttttataaactgagtttcttagcattcgttaaaattaaggggtttgtttggaataatatatattttttatgcttttgtctttcttacctgattgatattacattcacctttgattgttttttaaaagtttatttttacagaatatatttagtacctttcttaaggagtaactgaattgaatcaaccagtttgcatttaaataaaagaacaggctcagtggtcttcctgtagaatggtttacatgcctgcatgtgcagtagttgtgtctggaatcctagaattggcactttctgcctccttgctctaaatgtcacaaatacagatagatatgttgtgtttgcttcatttttaatgatgacttcaagattgatgatgtgatccaataactgtggaggtagctttaacttggttctgtgtaaatagtatgtattttattataatatttctcattttaagatgcttggtttacattaaattatggtatttaactatttttatgtttatactaggtagggtctttcttatgtttctgtgtttttggtatgctaaataaagctatttttaaacccaaaaaaaaaa

SEQ ID NO: 447025 - DNA, 4500 bp, Homo sapiens
cacgcgtccgcgagtagcggagcgggacccgctgatgctcaccccatttagagaaagaaatccacctccccaaccccaatcaagaacctgctattgtatatcatcatagagccagattacctagggaatcatcatccagggacgtgccagaaaccacaagaaaacatggggagggttttcctcacgggagaaaaagccaattccatattaaaacgctacccaagagctaatgggttttttgaagaaataagacagggcaacattgagcgtgagtgcaaagaagaattctgtacatttgaagaagcaagagaagcttttgaaaataatgaaaaaactaaggagttttggagcacctacacaaaagcgcaacaaggggagagtaaccgaggaagtgactggtttcagttttaccttacctttccgttaatctttggcctcttcattatcctccttgtcattttcctaatctggagatgcttcctaagaaacaaaactcgtagacagacagtgactgaaggccacattcctttccctcagcaccttaatattatcaccccaccccccccaccagatgaagtgtttgacagcagtggattgtctccaggctttctgggatatgtagttgggcgctcagattccgtctctactcgcctgtccaattgtgatcccccgccaacctatgaggaagccactggccaagtgaacctgcagaggagtgaaacagaacctcatttagacccacccccagagtatgaggacatagtcaactccaactcagccagtgccattcctatggtgcctgtggtcaccaccatcaaatgaagctgcaaacttctttttactctaatcatttttaaaatactaatggaagaactttctagcactttaccactacataaatgttcattgacttattttattggactcttaccgcataccacttcacacttgttttattttctttagttttgtttcttgttatagaatcattatccatgctcatttttgctaggggaaatatatgaagagggaaaacatactaatgggggtctttctgtgatgtgatgagacatacatgtaagtgtatatatgtgtgtataggcatatatacgtgtgtatgcatcaacacagtatatgtaaaactgtcttaaaaatccattaacttctacctaaatcacctggaaggagagcattactcaccaaaattgcaaaacaagggtatcaagaatttgtgtaatagccagtgacatgctgtagatttttgcaaactggatgtacttagcatgttttctaattctgactggcttttgttaacttgataattcttcatctaccttaaaaagaaaaaaattacacatagtcattcttgatgttataaatagagaaaaagtgtgtgtgagcaataatgcataagctactgataacttgcttacagcagatagcaataaggtatttggtggcattcggcttgttttgtaatagggattttttttttggttgaccactcccccacacttccaaaattaaacagtgttttcttagcatcttgaatatctcctgcggtgtatattaacatcttgatgagacagatttccaggcaacaaaataatttctaaaatggatatatgtgtggattaatgacaggcagtaaatacccattactcctttactcatagctggtaaaattattcccactgttttattgccttttactgtacgttctacactctgtcctactcccacagaattttcaagcccttaagagtttagttaaaataaaatttttgaaattattgtcttaatatttttatataggctgatgtctttgcctcaagattgttaggaggtaattttccattgaattatcaactgtgatttttatattgccctccaagtggtagaagaagattgcaaagtccatgttatgctaggtgcacaataaatctagtaatagccccacacagatctcatcattgttgctacttccttttgtattttcatcaggtatttttttaactgtagggtttttacttttttcttggagcagagagaacaggctgtaaatgggttgccaacataagctggctgagaaataaaagaaaacaagacagttgttcataaagtttcattttgtatgcactgatggcaaattcattaggtcagttaagggaaatatttgtaccacttccaaacttttcagcgttggataaaatgattgatgaggcaggcagaaggaatgtaggtttcaggtgtgtcatttcctgctgcttccagctccatccctacagactcctccccgagtcctgccctggaaccaaaggaaggaggaacactgaggggaatcctgaagtaggagtcagatgacctgaactcagatctccctctatcacatgcttgccaccactgtaccttgagcaagaatcatatctgaccctcaacctcctcaactctaaaatggggataacatcatttgtcctgcacttctctaagggctttacaaggatcaaataagatggtgtgtatgtaagaaatttgtaaaatgtgaagagctatctacactaagttcgtaatgttattattattgtgcttcatggagaattttcccctctgttttcctaaattgtatgagagctttcacacagtgagaaatagagcaggctgccccataaatgggtaacatattcctaatctgagtgtgtgggctgttagagaacccctgccatgctctggtctgttctgaaactgtgccaactgaaagatgatagtccacacagcacaaacaggtttaagcaaatgatagaaagggaagtaaggcgtgtgtgctagttaataggtttagtagcttttatggactaaaaatgattgattgtatcttgaccctggtctcagaaatgacatttttacttttgccatgagtacacatcagatatctttggcttctatttaaagctaaaggtagaagtgtttgatccagtgaactgtgtatgtatgtgtggggtttttttctttatttttaaatgaaaattaagacaccttttgtgtggacatgtttttgtctttaatgtcaggctttagattagaccagcagttttcaaagtatggccaatggacccctgggttccttgagagcctttcaggggggactatgagatcaaaatatttttattataatgtgaagacattgtcttttcactctatctcaaaaaaagtgttgcaaatgtaaaacattgccatcttctcacaaatctctttttttgtttttgaaaatatggccatttttcataaaatgttatttgtgttagcatgtaatgggtttactatgtttaaataagttaatactttaaaaattttcaggtttttttagtatggtgaatattgatagatataaacctcatgaacaaaagtactttggcatccagattctcaataaatgttaagagcgtaagtgtaagggggtccagagaccaaaagttttagagctacaggattagacataggagcaggatattctgttagtgtgatttcttgcaactttattttacattttaaactgctgatattggatataatgctgctttttagagacacctaaattgcagtatcagaatgaatgttgatgtttgaagccaaaaagccaaatgcttaaactgatcaatgactgtagctttttagactgttggtcaaagaacattctacttcacagtaatagctctatcagccacagatctcatggtggctgttgcatgataatgataggataaacaaaataccactgtcttcaagaaacattatcttaggtttgtttgtttggtttgagtttgatttggcttttatattttttaaaatcccttttgctaccccatctggttttataaactgagtttcttagcattcgttaaaattaaggggtttgtttggaataatatatattttttatgcttttgtctttcttacctgattgatattacattcacctttgattgttttttaaaagtttatttttacagaatatatttagtacctttcttaaggagtaactgaattgaatcaaccagtttgcatttaaataaaagaacaggctcagtggtcttcctgtagaatggtttacatgcctgcatgtgcagtagttgtgtctggaatcctagaattggcactttctgcctccttgctctaaatgtcacaaaaaattatacttccttaaagtaaatgtaatgatttcttcttttcctattgaccagtacagatagatatgttgtgtttgcttcatttttaatgatgacttcaagattgatgatgtgatccaataactgtggaggtagctttaacttggttctgtgtaaatagtatgtattttattataatatttctcattttaagatgcttggtttacattaaattatggtatttaactatttttatgtttatactaggtagggtctttcttatgtttctgtgtttttggtatgctaaataaagctatttttaaacccaaaaaaaaaa

SEQ ID NO: 447026 - DNA, 4440 bp, Homo sapiens
cggccgcgctgggttcctagctggggaaacgtgatccaggcgaagcgccccaggaaggattgggggaatcatcatccagggacgtgccagaaaccacaagaaaacatggggagggttttcctcacgggagaaaaagccaattccatattaaaacgctacccaagagctaatgggttttttgaagaaataagacagggcaacattgagcgtgagtgcaaagaagaattctgtacatttgaagaagcaagagaagcttttgaaaataatgaaaaaactaaggagttttggagcacctacacaaaagcgcaacaaggggagagtaaccgaggaagtgactggtttcagttttaccttacctttccgttaatctttggcctcttcattatcctccttgtcattttcctaatctggagatgcttcctaagaaacaaaactcgtagacagacagtgactgaaggccacattcctttccctcagcaccttaatattatcaccccaccccccccaccagatgaagtgtttgacagcagtggattgtctccaggctttctgggatatgtagttgggcgctcagattccgtctctactcgcctgtccaattgtgatcccccgccaacctatgaggaagccactggccaagtgaacctgcagaggagtgaaacagaacctcatttagacccacccccagagtatgaggacatagtcaactccaactcagccagtgccattcctatggtgcctgtggtcaccaccatcaaatgaagctgcaaacttctttttactctaatcatttttaaaatactaatggaagaactttctagcactttaccactacataaatgttcattgacttattttattggactcttaccgcataccacttcacacttgttttattttctttagttttgtttcttgttatagaatcattatccatgctcatttttgctaggggaaatatatgaagagggaaaacatactaatgggggtctttctgtgatgtgatgagacatacatgtaagtgtatatatgtgtgtataggcatatatacgtgtgtatgcatcaacacagtatatgtaaaactgtcttaaaaatccattaacttctacctaaatcacctggaaggagagcattactcaccaaaattgcaaaacaagggtatcaagaatttgtgtaatagccagtgacatgctgtagatttttgcaaactggatgtacttagcatgttttctaattctgactggcttttgttaacttgataattcttcatctaccttaaaaagaaaaaaattacacatagtcattcttgatgttataaatagagaaaaagtgtgtgtgagcaataatgcataagctactgataacttgcttacagcagatagcaataaggtatttggtggcattcggcttgttttgtaatagggattttttttttggttgaccactcccccacacttccaaaattaaacagtgttttcttagcatcttgaatatctcctgcggtgtatattaacatcttgatgagacagatttccaggcaacaaaataatttctaaaatggatatatgtgtggattaatgacaggcagtaaatacccattactcctttactcatagctggtaaaattattcccactgttttattgccttttactgtacgttctacactctgtcctactcccacagaattttcaagcccttaagagtttagttaaaataaaatttttgaaattattgtcttaatatttttatataggctgatgtctttgcctcaagattgttaggaggtaattttccattgaattatcaactgtgatttttatattgccctccaagtggtagaagaagattgcaaagtccatgttatgctaggtgcacaataaatctagtaatagccccacacagatctcatcattgttgctacttccttttgtattttcatcaggtatttttttaactgtagggtttttacttttttcttggagcagagagaacaggctgtaaatgggttgccaacataagctggctgagaaataaaagaaaacaagacagttgttcataaagtttcattttgtatgcactgatggcaaattcattaggtcagttaagggaaatatttgtaccacttccaaacttttcagcgttggataaaatgattgatgaggcaggcagaaggaatgtaggtttcaggtgtgtcatttcctgctgcttccagctccatccctacagactcctccccgagtcctgccctggaaccaaaggaaggaggaacactgaggggaatcctgaagtaggagtcagatgacctgaactcagatctccctctatcacatgcttgccaccactgtaccttgagcaagaatcatatctgaccctcaacctcctcaactctaaaatggggataacatcatttgtcctgcacttctctaagggctttacaaggatcaaataagatggtgtgtatgtaagaaatttgtaaaatgtgaagagctatctacactaagttcgtaatgttattattattgtgcttcatggagaattttcccctctgttttcctaaattgtatgagagctttcacacagtgagaaatagagcaggctgccccataaatgggtaacatattcctaatctgagtgtgtgggctgttagagaacccctgccatgctctggtctgttctgaaactgtgccaactgaaagatgatagtccacacagcacaaacaggtttaagcaaatgatagaaagggaagtaaggcgtgtgtgctagttaataggtttagtagcttttatggactaaaaatgattgattgtatcttgaccctggtctcagaaatgacatttttacttttgccatgagtacacatcagatatctttggcttctatttaaagctaaaggtagaagtgtttgatccagtgaactgtgtatgtatgtgtggggtttttttctttatttttaaatgaaaattaagacaccttttgtgtggacatgtttttgtctttaatgtcaggctttagattagaccagcagttttcaaagtatggccaatggacccctgggttccttgagagcctttcaggggggactatgagatcaaaatatttttattataatgtgaagacattgtcttttcactctatctcaaaaaaagtgttgcaaatgtaaaacattgccatcttctcacaaatctctttttttgtttttgaaaatatggccatttttcataaaatgttatttgtgttagcatgtaatgggtttactatgtttaaataagttaatactttaaaaattttcaggtttttttagtatggtgaatattgatagatataaacctcatgaacaaaagtactttggcatccagattctcaataaatgttaagagcgtaagtgtaagggggtccagagaccaaaagttttagagctacaggattagacataggagcaggatattctgttagtgtgatttcttgcaactttattttacattttaaactgctgatattggatataatgctgctttttagagacacctaaattgcagtatcagaatgaatgttgatgtttgaagccaaaaagccaaatgcttaaactgatcaatgactgtagctttttagactgttggtcaaagaacattctacttcacagtaatagctctatcagccacagatctcatggtggctgttgcatgataatgataggataaacaaaataccactgtcttcaagaaacattatcttaggtttgtttgtttggtttgagtttgatttggcttttatattttttaaaatcccttttgctaccccatctggttttataaactgagtttcttagcattcgttaaaattaaggggtttgtttggaataatatatattttttatgcttttgtctttcttacctgattgatattacattcacctttgattgttttttaaaagtttatttttacagaatatatttagtacctttcttaaggagtaactgaattgaatcaaccagtttgcatttaaataaaagaacaggctcagtggtcttcctgtagaatggtttacatgcctgcatgtgcagtagttgtgtctggaatcctagaattggcactttctgcctccttgctctaaatgtcacaaaaaattatacttccttaaagtaaatgtaatgatttcttcttttcctattgaccagtacagatagatatgttgtgtttgcttcatttttaatgatgacttcaagattgatgatgtgatccaataactgtggaggtagctttaacttggttctgtgtaaatagtatgtattttattataatatttctcattttaagatgcttggtttacattaaattatggtatttaactatttttatgtttatactaggtagggtctttcttatgtttctgtgtttttggtatgctaaataaagctatttttaaacccaaaaaaaaaa

SEQ ID NO: 447027 - DNA, 3186 bp, Homo sapiens
ttttctctgcttttcgctaccccggtcactctcatttctctcccctattccttgtctcttcccccatccccctttctcctgtcctccccctgcctctacagtggttctccccgctgagctgccaccagctgctgggccccgggctgctgcggctgggccgcctatggctgcggtccccctcccatacagccccggcccctggtctctggctgtcagggtttggcctccttcgtggtgaccacctcttcctgtgctcagcgccgggcccaggccccccagcccctgaggacatggtgcatctgcggcggctacaggagatcagtgtggtttctgcagctgacaccccagataagaaagagcatttggtcctggtggagacaggaaggaccctgtatctgcaaggagagggccggctggacttcacggcatggaacgcagccattgggggcgcggctggtgggggcggcacagggctgcaggagcagcagatgagccggggtgacatccccatcatcgtggatgcctgcatcagttttgttacccagcatgggctccggctggaaggtgtataccggaaagggggcgctcgtgcccgcagcctgagactcctggctgagttccgtcgggatgcccggtcggtgaagctccgaccaggggagcactttgtggaggatgtcactgacacactcaaacgcttctttcgtgagctcgatgaccctgtgacctctgcacggttgctgcctcgctggagggaggctgctggtattcctaagatccctgagagccaaggcccaaccaggatctctgccttcccccaccagaatccatggtttggcagccctccgccccatcacttcccaccctgggggatcatccagagacttggctcagggggaggtgggaagggggcagagacacatccatcctgcatttgtgcctaaaaatccctccctctgtaccagctgccactctttcttcccgggtcctccccaaccctcctccattccatccccagagctgccccagaagaatcagcgcctggagaaatataaagatgtgattggctgcctgccgcgggtcaaccgccgcacactggccaccctcattgggcatctctatcgggtgcagaaatgtgcggctctaaaccagatgtgcacgcggaacttggctctgctgtttgcacccagcgtgttccagacggatgggcgaggggagcacgaggtgcgagtgctgcaagagctcattgatggctacatctctgtctttgatatcgattctgaccaggtagctcagattgacttggaggtcagtcttatcaccacctggaaggacgtgcagctgtctcaggctggagacctcatcatggaagtttatatagagcagcagctcccagacaactgtgtcaccctgaaggtgtccccaaccctgactgctgaggagctgactaaccaggtactggagatgcgggggacagcagctgggatggacttgtgggtgacttttgagattcgcgagcatggggagctggagcggccactgcatcccaaggaaaaggtcttagagcaggctttacaatggtgccagctcccagagccctgctcagcttccctgctcttgaaaaaagtccccctggcccaagctggctgcctcttcacaggtatccgacgtgagagcccacgggtggggctgttgcggtgtcgtgaggagccacctcgcttgctgggaagccgcttccaggagaggttctttctgctgcgtggccgctgcctgctgctgctcaaggagaagaaaagctctaaaccagaacgggagtggcctttggaaggtgccaaggtctacctgggaatccgcaagaagttaaagcccccaacaccgtggggcttcacattgatactagagaagatgcacctctacttgtcctgcactgacgaggatgaaatgtgggattggaccaccagcatccttaaagcccagcacgatgaccagcagccagtggtcttacgacgccattcctcctctgaccttgcccgtcagaagtttggcactatgcctttgctgcctatccgtggggatgacagtggagccaccctcctctctgccaatcagaccctgcggcgactacacaaccggaggaccctgtccatgttctttccaatgaagtcatcccaggggtctgtggaggagcaagaggagctggaggagcctgtgtacgaggagccagtgtatgaggaagtaggggccttccctgagttgatccaggacacttctacctccttctccaccacacgggagtggacagtgaagccagagaaccccctcaccagccagaagtcattggatcaaccctttctctccaagtcaagcacccttggccaggaggagaggccacctgagccccctccaggccccccttcaaagagcagtccccaggcacgggggtccctagaggaacagctgctccaggagctcagcagcctcatcctgaggaaaggagagaccactgcaggcctgggaagtccttcccagccatccagcccccaatcccccagccccactggccttccaacacagacacctggcttccccacccaacccccatgcacttccagtccaccctccagccagcccctcacatgaccctaggaccagcagtctgagagggtaggtaccagaagacccagaaactcttatcgtggcactgttgcagcttcctctgccctggctggaaagactccagaatccagtgtggtgctgtggaaggagcactggactaaaggcttcagtggctgcgtgtcccaggacaggtcatggcccctctctgggcccagcccatttatctataccatgaggtaactgaagtaaggagagcagtgaatgtcaaactgtgtttcttagagccataagccccacatattatccctgaacaagggcagctcctgctttatatatttgatacgtaggggttccatgagagattttgggttttaaaggaatggttttactgcattaaagaaaaaaaatgctttggaaaccagaggcctgggtgatgttaaagtctatcctgtcccacttcctacattctgggactaccgtgaagcctggagtagggagagcgagtttgggagctgggactcggggagtcaaaaatagatgagtaattgtcaataaacctgggaaccaaaagac

SEQ ID NO: 447028 - DNA, 3160 bp, Homo sapiens
ttttctctgcttttcgctaccccggtcactctcatttctctcccctattccttgtctcttcccccatccccctttctcctgtcctccccctgcctctacagtggttctccccgctgagctgccaccagctgctgggccccgggctgctgcggctgggccgcctatggctgcggtccccctcccatacagccccggcccctggtctctggctgtcagggtttggcctccttcgtggtgaccacctcttcctgtgctcagcgccgggcccaggccccccagcccctgaggacatggtgcatctgcggcggctacaggagatcagtgtggtttctgcagctgacaccccagataagaaagagcatttggtcctggtggagacaggaaggaccctgtatctgcaaggagagggccggctggacttcacggcatggaacgcagccattgggggcgcggctggtgggggcggcacagggctgcaggagcagcagatgagccggggtgacatccccatcatcgtggatgcctgcatcagttttgttacccagcatgggctccggctggaaggtgtataccggaaagggggcgctcgtgcccgcagcctgagactcctggctgagttccgtcgggatgcccggtcggtgaagctccgaccaggggagcactttgtggaggatgtcactgacacactcaaacgcttctttcgtgagctcgatgaccctgtgacctctgcacggttgctgcctcgctggagggaggctgctgagctgccccagaagaatcagcgcctggagaaatataaagatgtgattggctgcctgccgcgggtcaaccgccgcacactggccaccctcattgggcatctctatcgggtgcagaaatgtgcggctctaaaccagatgtgcacgcggaacttggctctgctgtttgcacccagcgtgttccagacggatgggcgaggggagcacgaggtgcgagtgctgcaagagctcattgatggctacatctctgtctttgatatcgattctgaccaggtagctcagattgacttggaggtcagtcttatcaccacctggaaggacgtgcagctgtctcaggctggagacctcatcatggaagtttatatagagcagcagctcccagacaactgtgtcaccctgaaggtgtccccaaccctgactgctgaggagctgactaaccaggtactggagatgcgggggacagcagctgggatggacttgtgggtgacttttgagattcgcgagcatggggagctggagcggccactgcatcccaaggaaaaggtcttagagcaggctttacaatggtgccagctcccagagccctgctcagcttccctgctcttgaaaaaagtccccctggcccaagctggctgcctcttcacaggtatccgacgtgagagcccacgggtggggctgttgcggtgtcgtgaggagccacctcgcttgctgggaagccgcttccaggagaggttctttctgctgcgtggccgctgcctgctgctgctcaaggagaagaaagtgaggccctggggccagaggtgtgggatgctgggtggccatggagaggagccatgactgcacccaccctctgactccacagcccatactctcatcaatctcattgcttccctgcccccgacttctgtgaccctgtgaccacagaccccattgcttccatgacgtcttgacctcattaaccatgatctctcatctctccatctcgctgactctgtttctgttctcagagctctaaaccagaacgggagtggcctttggaaggtgccaaggtctacctgggaatccgcaagaagttaaagcccccaacaccgtggggcttcacattgatactagagaagatgcacctctacttgtcctgcactgacgaggatgaaatgtgggattggaccaccagcatccttaaagcccagcacgatgaccagcagccagtggtcttacgacgccattcctcctctgaccttgcccgtcagaagtttggcactatgcctttgctgcctatccgtggggatgacagtggagccaccctcctctctgccaatcagaccctgcggcgactacacaaccggaggaccctgtccatgttctttccaatgaagtcatcccaggggtctgtggaggagcaagaggagctggaggagcctgtgtacgaggagccagtgtatgaggaagtaggggccttccctgagttgatccaggacacttctacctccttctccaccacacgggagtggacagtgaagccagagaaccccctcaccagccagaagtcattggatcaaccctttctctccaagtcaagcacccttggccaggaggagaggccacctgagccccctccaggccccccttcaaagagcagtccccaggcacgggggtccctagaggaacagctgctccaggagctcagcagcctcatcctgaggaaaggagagaccactgcaggcctgggaagtccttcccagccatccagcccccaatcccccagccccactggccttccaacacagacacctggcttccccacccaacccccatgcacttccagtccaccctccagccagcccctcacatgaccctaggaccagcagtctgagagggtaggtaccagaagacccagaaactcttatcgtggcactgttgcagcttcctctgccctggctggaaagactccagaatccagtgtggtgctgtggaaggagcactggactaaaggcttcagtggctgcgtgtcccaggacaggtcatggcccctctctgggcccagcccatttatctataccatgaggtaactgaagtaaggagagcagtgaatgtcaaactgtgtttcttagagccataagccccacatattatccctgaacaagggcagctcctgctttatatatttgatacgtaggggttccatgagagattttgggttttaaaggaatggttttactgcattaaagaaaaaaaatgctttggaaaccagaggcctgggtgatgttaaagtctatcctgtcccacttcctacattctgggactaccgtgaagcctggagtagggagagcgagtttgggagctgggactcggggagtcaaaaatagatgagtaattgtcaataaacctgggaaccaaaagac

SEQ ID NO: 447029 - DNA, 2873 bp, Homo sapiens
ttttctctgcttttcgctaccccggtcactctcatttctctcccctattccttgtctcttcccccatccccctttctcctgtcctccccctgcctctacagtggttctccccgctgagctgccaccagctgctgggccccgggctgctgcggctgggccgcctatggctgcggtccccctcccatacagccccggcccctggtctctggctgtcagggtttggcctccttcgtggtgaccacctcttcctgtgctcagcgccgggcccaggccccccagcccctgaggacatggtgcatctgcggcggctacaggagatcagtgtggtttctgcagctgacaccccagataagaaagagcatttggtcctggtggagacaggaaggaccctgtatctgcaaggagagggccggctggacttcacggcatggaacgcagccattgggggcgcggctggtgggggcggcacagggctgcaggagcagcagatgagccggggtgacatccccatcatcgtggatgcctgcatcagttttgttacccagcatgggctccggctggaaggtgtataccggaaagggggcgctcgtgcccgcagcctgagactcctggctgagttccgtcgggatgcccggtcggtgaagctccgaccaggggagcactttgtggaggatgtcactgacacactcaaacgcttctttcagctgccccagaagaatcagcgcctggagaaatataaagatgtgattggctgcctgccgcgggtcaaccgccgcacactggccaccctcattgggcatctctatcgggtgcagaaatgtgcggctctaaaccagatgtgcacgcggaacttggctctgctgtttgcacccagcgtgttccagacggatgggcgaggggagcacgaggtgcgagtgctgcaagagctcattgatggctacatctctgtctttgatatcgattctgaccaggtagctcagattgacttggaggtcagtcttatcaccacctggaaggacgtgcagctgtctcaggctggagacctcatcatggaagtttatatagagcagcagctcccagacaactgtgtcaccctgaaggtgtccccaaccctgactgctgaggagctgactaaccaggtactggagatgcgggggacagcagctgggatggacttgtgggtgacttttgagattcgcgagcatggggagctggagcggccactgcatcccaaggaaaaggtcttagagcaggctttacaatggtgccagctcccagagccctgctcagcttccctgctcttgaaaaaagtccccctggcccaagctggctgcctcttcacaggtatccgacgtgagagcccacgggtggggctgttgcggtgtcgtgaggagccacctcgcttgctgggaagccgcttccaggagaggttctttctgctgcgtggccgctgcctgctgctgctcaaggagaagaaaagctctaaaccagaacgggagtggcctttggaaggtgccaaggtctacctgggaatccgcaagaagttaaagcccccaacaccgtggggcttcacattgatactagagaagatgcacctctacttgtcctgcactgacgaggatgaaatgtgggattggaccaccagcatccttaaagcccagcacgatgaccagcagccagtggtcttacgacgccattcctcctctgaccttgcccgtcagaagtttggcactatgcctttgctgcctatccgtggggatgacagtggagccaccctcctctctgccaatcagaccctgcggcgactacacaaccggaggaccctgtccatgttctttccaatgaagtcatcccaggggtctgtggaggagcaagaggagctggaggagcctgtgtacgaggagccagtgtatgaggaagtaggggccttccctgagttgatccaggacacttctacctccttctccaccacacgggagtggacagtgaagccagagaaccccctcaccagccagaagtcattggatcaaccctttctctccaagtcaagcacccttggccaggaggagaggccacctgagccccctccaggccccccttcaaagagcagtccccaggcacgggggtccctagaggaacagctgctccaggagctcagcagcctcatcctgaggaaaggagagaccactgcaggcctgggaagtccttcccagccatccagcccccaatcccccagccccactggccttccaacacagacacctggcttccccacccaacccccatgcacttccagtccaccctccagccagcccctcacatgaccctaggaccagcagtctgagagggtaggtaccagaagacccagaaactcttatcgtggcactgttgcagcttcctctgccctggctggaaagactccagaatccagtgtggtgctgtggaaggagcactggactaaaggcttcagtggctgcgtgtcccaggacaggtcatggcccctctctgggcccagcccatttatctataccatgaggtaactgaagtaaggagagcagtgaatgtcaaactgtgtttcttagagccataagccccacatattatccctgaacaagggcagctcctgctttatatatttgatacgtaggggttccatgagagattttgggttttaaaggaatggttttactgcattaaagaaaaaaaatgctttggaaaccagaggcctgggtgatgttaaagtctatcctgtcccacttcctacattctgggactaccgtgaagcctggagtagggagagcgagtttgggagctgggactcggggagtcaaaaatagatgagtaattgtcaataaacctgggaaccaaaagac

SEQ ID NO: 447030 - DNA, 2782 bp, Homo sapiens
ttttctctgcttttcgctaccccggtcactctcatttctctcccctattccttgtctcttcccccatccccctttctcctgtcctccccctgcctctacagtggttctccccgctgagctgccaccagctgctgggccccgggctgctgcggctgggccgcctatggctgcggtccccctcccatacagccccggcccctggtctctggctgtcagggtttggcctccttcgtggtgaccacctcttcctgtgctcagcgccgggcccaggccccccagcccctgaggacatggtgcatctgcggcggctacaggagatcagtgtggtttctgcagctgacaccccagataagaaagagcatttggtcctggtggagacaggaaggaccctgtatctgcaaggagagggccggctggacttcacggcatggaacgcagccattgggggcgcggctggtgggggcggcacagggctgcaggagcagcagatgagccggggtgacatccccatcatcgtggatgcctgcatcagttttgttacccagcatgggctccggctggaaggtgtataccggaaagggggcgctcgtgcccgcagcctgagactcctggctgagttccgtcgggatgcccggtcggtgaagctccgaccaggggagcactttgtggaggatgtcactgacacactcaaacgcttctttcgtgagctcgatgaccctgtgacctctgcacggttgctgcctcgctggagggaggctgctgagctgccccagaagaatcagcgcctggagaaatataaagatgtgattggctgcctgccgcgggtcaaccgccgcacactggccaccctcattgggcatctctatcgggtgcagaaatgtgcggctctaaaccagatgtgcacgcggaacttggctctgctgtttgcacccagcgtgttccagacggatgggcgaggggagcacgaggtgcgagtgctgcaagagctcattgatggctacatctctgtctttgatatcgattctgaccaggtagctcagattgacttggaggtcagtcttatcaccacctggaaggacgtgcagctgtctcaggctggagacctcatcatggaagtttatatagagcagcagctcccagacaactgtgtcaccctgaaggtgtccccaaccctgactgctgaggagctgactaaccaggtactggagatgcgggggacagcagctgggatggacttgtgggtgacttttgagattcgcgagcatggggagctggagcggccactgcatcccaaggaaaaggtcttagagcaggctttacaatggtgccagctcccagagccctgctcagcttccctgctcttgaaaaaagtccccctggcccaagctggctgcctcttcacaggtatccgacgtgagagcccacgggtggggctgttgcggtgtcgtgaggagccacctcgcttgctgggaagccgcttccaggagaggttctttctgctgcgtggccgctgcctgctgctgctcaaggagaagaaaagctctaaaccagaacgggagtggcctttggaaggtgccaaggtctacctgggaatccgcaagaagttaaagcccccaacaccgtggggcttcacattgatactagagaagatgcacctctacttgtcctgcactgacgaggatgaaatgtgggattggaccaccagcatccttaaagcccagcacgatgaccagcagccagtggtcttacgacgccattcctcctctgaccttgcccgtcagaagtttggcactatgcctttgctgcctatccgtggggatgacagtggagccaccctcctctctgccaatcagaccctgcggcgactacacaaccggaggaccctgtccatgttctttccaatgaagtcatcccaggggtctgtggaggagcaagaggagctggaggagcctgtgtacgaggagccagtgtatgaggaagtaggggccttccctgagttgatccaggacacttctacctccttctccaccacacgggagtggacagtgaagccagagaaccccctcaccagccagaagtcattggatcaaccctttctctccaagtcaagcacccttggccaggaggagaggccacctgagccccctccaggccccccttcaaagagcagtccccaggcacgggggtccctagaggaacagctgctccaggagctcagcagcctcatcctgaggaaaggagagaccactgcaggcctgggaagtccttcccagccatccagcccccaatcccccagccccactggccttccaacacagacacctggcttccccacccaacccccatgcacttccagtccaccctccagccagcccctcacatgaccctaggaccagcagtctgagagggtaggtaccagaagacccagaaactcttatcgtggcactgttgcagcttcctctgccctggctggaaagactccagaatccagtgtggtgctgtggaaggagcactggactaaaggcttcagtggctgcgtgtcccaggacaggtcatggcccctctctgggcccagcccatttatctataccatgaggtaactgaagtaaggagagcagtgaatgtcaaactgtgtttcttagagccataagccccacatattatccctgaacaagggcagctcctgctttatatatttgatacgtaggggttccatgagagattttgggttttaaaggaatggttttactgcattaaagaaaaaaaatgctttggaaaccag

SEQ ID NO: 447031 - DNA, 2077 bp, Homo sapiens
  misc_feature (1782)..(1782): n is a, c, g, or t
  misc_feature (1786)..(1786): n is a, c, g, or t
  misc_feature (1809)..(1809): n is a, c, g, or t
  misc_feature (1942)..(1942): n is a, c, g, or t
  misc_feature (1944)..(1945): n is a, c, g, or t
  misc_feature (1956)..(1956): n is a, c, g, or t
  misc_feature (1969)..(1969): n is a, c, g, or t
  misc_feature (1971)..(1971): n is a, c, g, or t
ttttctctgcttttcgctaccccggtcactctcatttctctcccctattccttgtctcttcccccatccccctttctcctgtcctccccctgcctctacagtggttctccccgctgagctgccaccagctgctgggccccgggctgctgcggctgggccgcctatggctgcggtccccctcccatacagccccggcccctggtctctggctgtcagggtttggcctccttcgtggtgaccacctcttcctgtgctcagcgccgggcccaggccccccagcccctgaggacatggtgcatctgcggcggctacaggagatcagtgtggtttctgcagctgacaccccagataagaaagagcatttggtcctggtggagacaggaaggaccctgtatctgcaaggagagggccggctggacttcacggcatggaacgcagccattgggggcgcggctggtgggggcggcacagggctgcaggagcagcagatgagccggggtgacatccccatcatcgtggatgcctgcatcagttttgttacccagcatgggctccggctggaaggtgtataccggaaagggggcgctcgtgcccgcagcctgagactcctggctgagttccgtcgggatgcccggtcggtgaagctccgaccaggggagcactttgtggaggatgtcactgacacactcaaacgcttctttcgtgagctcgatgaccctgtgacctctgcacggttgctgcctcgctggagggaggctgctgagctgccccagaagaatcagcgcctggagaaatataaagatgtgattggctgcctgccgcgggtcaaccgccgcacactggccaccctcattgggcatctctatcgggtgcagaaatgtgcggctctaaaccagatgtgcacgcggaacttggctctgctgtttgcacccagcgtgttccagacggatgggcgaggggagcacgaggtgcgagtgctgcaagagctcattgatggctacatctctgtctttgatatcgattctgaccaggtagctcagattgacttggaggtcagtcttatcaccacctggaaggacgtgcagctgtctcaggctggagacctcatcatggaagtttatatagagcagcagctcccagacaactgtgtcaccctgaaggtgtccccaaccctgactgctgaggagctgactaaccaggtactggagatgcgggggacagcagctgggatggacttgtgggtgacttttgagattcgcgagcatggggagctggagcggccactgcatcccaaggaaaaggtcttagagcaggctttacaatggtgccagctcccagagccctgctcagcttccctgctcttgaaaaaagtccccctggcccaagctggctgcctcttcacaggtatccgacgtgagagcccacgggtggggctgttgcggtgtcgtgaggagccacctcgcttgctgggaagccgcttccaggagaggttctttctgctgcgtggccgctgcctgctgctgctcaaggagaagaaaagctctaaaccagaacgggagtggcctttggaaggtgccaaggtctacctgggaatccgcaagaagttaaagcccccaacaccgtggggcttcacattgatactagagaagatgcacctctacttgtcctgcactgacgaggatgaaatgtgggattggaccaccagcatccttaaagcccagcacgatgaccagcagccagtggtcttacgacgccattcctcctcgtacacaggctggctgncaanatgccatccagactgaggaaganccggaaacttaggggctacgtgagccacggcaggcgcataggcaagcacggaagcacccggcggcgcggtaatgctggtggtctgcatcacagcggatcaattcgacaaaatacaccaggtattgggaaagtngnntgaagcttacnttagagaacgagntntgccaatgtcactgcaatgggttggcctgacgccggtgagtctaaacaaggggcccctggggggggggttatggagggcccagggggattaaaggaaagggggggg

SEQ ID NO: 447032 - DNA, 784 bp, Homo sapiens
gaggcatagatctcctcctctctgaatcccatgcccccatcagccacataccacatagggaggccacagatgggccgtggtgggtggtggtagcctttgcaccatggtgagcagagacggctggctctcctcagggctccggctggaaggtgtataccggaaagggggcgctcgtgcccgcagcctgagactcctggctgagttccgtcgggatgcccggtcggtgaagctccgaccaggggagcactttgtggaggatgtcactgacacactcaaacgcttctttcgtgagctcgatgaccctgtgacctctgcacggttgctgcctcgctggagggaggctgctggtattcctaagatccctgagagccaaggcccaaccaggatctctgccttcccccaccagaatccatggtttggcagccctccgccccatcacttcccaccctgggggatcatccagagacttggctcagggggaggtgggaagggggcagagacacatccatcctgcatttgtgcctaaaaatccctccctctgtaccagctgccactctttcttcccgggtcctccccaaccctcctccattccatccccagagctgccccagaagaatcagcgcctggagaaatataaagatgtgattggctgcctgccgcgggtcaaccgccgcacactggccaccctcattgggcatctctatcggtcagtatggctagaccctctgcagaacccttcctcacttcaatctgaccctgcactttcattcatttattcattcat

SEQ ID NO: 447033 - DNA, 2933 bp, Homo sapiens
ttttctctgcttttcgctaccccggtcactctcatttctctcccctattccttgtctcttcccccatccccctttctcctgtcctccccctgcctctacagtggttctccccgctgagctgccaccagctgctgggccccgggctgctgcggctgggccgcctatggctgcggtccccctcccatacagccccggcccctggtctctggctgtcagggtttggcctccttcgtggtgaccacctcttcctgtgctcagcgccgggcccaggccccccagcccctgaggacatggtgcatctgcggcggctacaggagatcagtgtggtttctgcagctgacaccccagataagaaagagcatttggtcctggtggagacaggaaggaccctgtatctgcaaggagagggccggctggacttcacggcatggaacgcagccattgggggcgcggctggtgggggcggcacagggctgcaggagcagcagatgagccggggtgacatccccatcatcgtggatgcctgcatcagttttgttacccagcatgggctccggctggaaggtgtataccggaaagggggcgctcgtgcccgcagcctgagactcctggctgagttccgtcgggatgcccggtcggtgaagctccgaccaggggagcactttgtggaggatgtcactgacacactcaaacgcttctttcgtgagctcgatgaccctgtgacctctgcacggttgctgcctcgctggagggaggctgctgagctgccccagaagaatcagcgcctggagaaatataaagatgtgattggctgcctgccgcgggtcaaccgccgcacactggccaccctcattgggcatctctatcgggtgcagaaatgtgcggctctaaaccagatgtgcacgcggaacttggctctgctgtttgcacccagcgtgttccagacggatgggcgaggggagcacgaggtgcgagtgctgcaagagctcattgatggctacatctctgtctttgatatcgattctgaccaggtagctcagattgacttggaggtcagtcttatcaccacctggaaggacgtgcagctgtctcaggctggagacctcatcatggaagtttatatagagcagcagctcccagacaactgtgtcaccctgaaggtgtccccaaccctgactgctgaggagctgactaaccaggtactggagatgcgggggacagcagctgggatggacttgtgggtgacttttgagattcgcgagcatggggagctggagcggccactgcatcccaaggaaaaggtcttagagcaggctttacaatggtgccagctcccagagccctgctcagcttccctgctcttgaaaaaagtccccctggcccaagctggctgcctcttcacaggtatccgacgtgagagcccacgggtggggctgttgcggtgtcgtgaggagccacctcgcttgctgggaagccgcttccaggagaggttctttctgctgcgtggccgctgcctgctgctgctcaaggagaagaaaagctctaaaccagaacgggagtggcctttggaaggtgccaaggtctacctgggaatccgcaagaagttaaagcccccaacaccgtggggcttcacattgatactagagaagatgcacctctacttgtcctgcactgacgaggatgaaatgtgggattggaccaccagcatccttaaagcccagcacgatgaccagcagccagtggtcttacgacgccattcctcctctgaccttgcccgtcagaagtttggcactatgcctttgctgcctatccgtggggatgacagtggagccaccctcctctctgccaatcagaccctgcggcgactacacaaccggaggaccctgtccatgttctttccaatgaagtcatcccaggggtctgtggaggagcaagaggagctggaggagcctgtgtacgaggagccagtgtatgaggaagtaggggccttccctgagttgatccaggacacttctacctccttctccaccacacgggagtggacagtgaagccagagaaccccctcaccagccagaagtcattggatcaaccctttctctccaagtcaagcacccttggccaggaggagaggccacctgagccccctccaggccccccttcaaagagcagtccccaggcacgggggtccctagaggaacagctgctccaggagctcagcagcctcatcctgaggaaaggagagaccactgcaggcctgggaagtccttcccagccatccagcccccaatcccccagccccactggccttccaacacagacacctggcttccccacccaacccccatgcacttccagtccaccctccagccagcccctcacatgaccctaggaccagcagtctgagagggtaggtaccagaagacccagaaactcttatcgtggcactgttgcagcttcctctgccctggctggaaagactccagaatccagtgtggtgctgtggaaggagcactggactaaaggcttcagtggctgcgtgtcccaggacaggtcatggcccctctctgggcccagcccatttatctataccatgaggtaactgaagtaaggagagcagtgaatgtcaaactgtgtttcttagagccataagccccacatattatccctgaacaagggcagctcctgctttatatatttgatacgtaggggttccatgagagattttgggttttaaaggaatggttttactgcattaaagaaaaaaaatgctttggaaaccagaggcctgggtgatgttaaagtctatcctgtcccacttcctacattctgggactaccgtgaagcctggagtagggagagcgagtttgggagctgggactcggggagtcaaaaatagatgagtaattgtcaataaacctgggaaccaaaagac

SEQ ID NO: 447034 - DNA, 2698 bp, Homo sapiens
gccgtggtgggtggtggtagcctttgcaccatggtgagcagagacggctggctctcctcagggctccggctggaaggtgtataccggaaagggggcgctcgtgcccgcagcctgagactcctggctgagttccgtcgggatgcccggtcggtgaagctccgaccaggggagcactttgtggaggatgtcactgacacactcaaacgcttctttcgtgagctcgatgaccctgtgacctctgcacggttgctgcctcgctggagggaggctgctggtattcctaagatccctgagagccaaggcccaaccaggatctctgccttcccccaccagaatccatggtttggcagccctccgccccatcacttcccaccctgggggatcatccagagacttggctcagggggaggtgggaagggggcagagacacatccatcctgcatttgtgcctaaaaatccctccctctgtaccagctgccactctttcttcccgggtcctccccaaccctcctccattccatccccagagctgccccagaagaatcagcgcctggagaaatataaagatgtgattggctgcctgccgcgggtcaaccgccgcacactggccaccctcattgggcatctctatcgggtgcagaaatgtgcggctctaaaccagatgtgcacgcggaacttggctctgctgtttgcacccagcgtgttccagacggatgggcgaggggagcacgaggtgcgagtgctgcaagagctcattgatggctacatctctgtctttgatatcgattctgaccaggtagctcagattgacttggaggtcagtcttatcaccacctggaaggacgtgcagctgtctcaggctggagacctcatcatggaagtttatatagagcagcagctcccagacaactgtgtcaccctgaaggtgtccccaaccctgactgctgaggagctgactaaccaggtactggagatgcgggggacagcagctgggatggacttgtgggtgacttttgagattcgcgagcatggggagctggagcggccactgcatcccaaggaaaaggtcttagagcaggctttacaatggtgccagctcccagagccctgctcagcttccctgctcttgaaaaaagtccccctggcccaagctggctgcctcttcacaggtatccgacgtgagagcccacgggtggggctgttgcggtgtcgtgaggagccacctcgcttgctgggaagccgcttccaggagaggttctttctgctgcgtggccgctgcctgctgctgctcaaggagaagaaaagctctaaaccagaacgggagtggcctttggaaggtgccaaggtctacctgggaatccgcaagaagttaaagcccccaacaccgtggggcttcacattgatactagagaagatgcacctctacttgtcctgcactgacgaggatgaaatgtgggattggaccaccagcatccttaaagcccagcacgatgaccagcagccagtggtcttacgacgccattcctcctctgaccttgcccgtcagaagtttggcactatgcctttgctgcctatccgtggggatgacagtggagccaccctcctctctgccaatcagaccctgcggcgactacacaaccggaggaccctgtccatgttctttccaatgaagtcatcccaggggtctgtggaggagcaagaggagctggaggagcctgtgtacgaggagccagtgtatgaggaagtaggggccttccctgagttgatccaggacacttctacctccttctccaccacacgggagtggacagtgaagccagagaaccccctcaccagccagaagtcattggatcaaccctttctctccaagtcaagcacccttggccaggaggagaggccacctgagccccctccaggccccccttcaaagagcagtccccaggcacgggggtccctagaggaacagctgctccaggagctcagcagcctcatcctgaggaaaggagagaccactgcaggcctgggaagtccttcccagccatccagcccccaatcccccagccccactggccttccaacacagacacctggcttccccacccaacccccatgcacttccagtccaccctccagccagcccctcacatgaccctaggaccagcagtctgagagggtaggtaccagaagacccagaaactcttatcgtggcactgttgcagcttcctctgccctggctggaaagactccagaatccagtgtggtgctgtggaaggagcactggactaaaggcttcagtggctgcgtgtcccaggacaggtcatggcccctctctgggcccagcccatttatctataccatgaggtaactgaagtaaggagagcagtgaatgtcaaactgtgtttcttagagccataagccccacatattatccctgaacaagggcagctcctgctttatatatttgatacgtaggggttccatgagagattttgggttttaaaggaatggttttactgcattaaagaaaaaaaatgctttggaaaccagaggcctgggtgatgttaaagtctatcctgtcccacttcctacattctgggactaccgtgaagcctggagtagggagagcgagtttgggagctgggactcggggagtcaaaaatagatgagtaattgtcaataaacctgggaaccaaaagac

SEQ ID NO: 447035 - DNA, 3056 bp, Homo sapiens
ttttctctgcttttcgctaccccggtcactctcatttctctcccctattccttgtctcttcccccatccccctttctcctgtcctccccctgcctctacagtggttctccccgctgagctgccaccagctgctgggccccgggctgctgcggctgggccgcctatggctgcggtccccctcccatacagccccggcccctggtctctggctgtcagggtttggcctccttcgtggtgaccacctcttcctgtgctcagcgccgggcccaggccccccagcccctgaggacatggtgcatctgcggcggctacaggagatcagtgtggtttctgcagctgacaccccagataagaaagagcatttggtcctggtggagacaggaaggaccctgtatctgcaaggagagggccggctggacttcacggcatggaacgcagccattgggggcgcggctggtgggggcggcacagggctgcaggagcagcagatgagccggggtgacatccccatcatcgtggatgcctgcatcagttttgttacccagcatgggctccggctggaaggtgtataccggaaagggggcgctcgtgcccgcagcctgagactcctggctgagttccgtcgggatgcccggtcggtgaagctccgaccaggggagcactttgtggaggatgtcactgacacactcaaacgcttctttcgtgagctcgatgaccctgtgacctctgcacggttgctgcctcgctggagggaggctgctgagctgccccagaagaatcagcgcctggagaaatataaagatgtgattggctgcctgccgcgggtcaaccgccgcacactggccaccctcattgggcatctctatcgggtgcagaaatgtgcggctctaaaccagatgtgcacgcggaacttggctctgctgtttgcacccagcgtgttccagacggatgggcgaggggagcacgaggtgcgagtgctgcaagagctcattgatggctacatctctgtctttgatatcgattctgaccaggtagctcagattgacttggaggtcagtcttatcaccacctggaaggacgtgcagctgtctcaggctggagacctcatcatggaagtttatatagagcagcagctcccagacaactgtgtcaccctgaaggtgtccccaaccctgactgctgaggagctgactaaccaggtactggagatgcgggggacagcagctgggatggacttgtgggtgacttttgagattcgcgagcatggggagctggagcggccactgcatcccaaggaaaaggtcttagagcaggctttacaatggtgccagctcccagagccctgctcagcttccctgctcttgaaaaaagtccccctggcccaagctggctgcctcttcacaggtatccgacgtgagagcccacgggtggggctgttgcggtgtcgtgaggagccacctcgcttgctgggaagccgcttccaggagaggttctttctgctgcgtggccgctgcctgctgctgctcaaggagaagaaaagctctaaaccagaacgggagtggcctttggaaggtgccaaggtctacctgggaatccgcaagaagttaaagcccccaacaccgtggggcttcacattgatactagagaagatgcacctctacttgtcctgcactgacgaggatgaaatgtgggattggaccaccagcatccttaaagcccagcacgatgaccagcagccagtggtcttacgacgccattcctcctctgaccttgcccgtcagaagtttggcactatgcctttgctgcctatccgtggggatgacagtggagccaccctcctctctgccaatcagaccctgcggcgactacacaaccggaggaccctgtccatgttctttccaatgaagtcatcccaggggtctgtggaggagcaagaggagctggaggagcctgtgtacgaggagccagtgtatgaggaagtaggggccttccctgagttgatccaggacacttctacctccttctccaccacacgggagtggacagtgaagccagagaaccccctcaccagccagaagtcattggatcaaccctttctctccaagtcaagcacccttggccaggaggagaggccacctgagccccctccaggccccccttcaaagagcagtccccaggcacgggggtccctagaggaacagctgctccaggagctcagcagcctcatcctgaggaaaggagagaccactgcaggcctgggaagtccttcccagccatccagcccccaatcccccagccccactggccttccaacacagacacctggcttccccacccaacccccatgcacttccagtccaccctccagccagcccctcacatgaccctaggaccagcagtctgagagggtaggtaccagaagacccagaaactcttatcgtggcactgttgcagcttcctctgccctggctggaaagactccagaatccagtgtggtgctgtggaaggagcactggactaaaggcttcagtggctgcgtgtcccaggacaggtcatggcccctctctgggcccagcccatttatctataccatgaggtaactgaagtaaggagagcagtgaatgtcaaactgtgtttcttagagccataagccccacatattatccctgaacaagggcagctcctgctttatatatttgatacgtaggggttccatgagagattttgggttttaaaggaatggttttactgcattaaagaaaaaaaatgctttggaaaccagaggcctgggtgatgttaaagtctatcctgtcccacttcctacattctgggactaccgtgaagcctggagtagggagagcgagtttgggagctgggactcggggagtcaaaaatagatgagtaattgtcaataaacctgggaaccaaaagactaccattctcattcattcattcaacaaatatgtattgtgcacctaattggtgccaggtctggggatatagcatgaacaaaacaaacagggcccctgctcttatgaatcctccgttgtggaggg

SEQ ID NO: 447036 - DNA, 1892 bp, Homo sapiens
ttttctctgcttttcgctaccccggtcactctcatttctctcccctattccttgtctcttcccccatccccctttctcctgtcctccccctgcctctacagtggttctccccgctgagctgccaccagctgctgggccccgggctgctgcggctgggccgcctatggctgcggtccccctcccatacagccccggcccctggtctctggctgtcagggtttggcctccttcgtggtgaccacctcttcctgtgctcagcgccgggcccaggccccccagcccctgaggacatggtgcatctgcggcggctacaggagatcagtgtggtttctgcagctgacaccccagataagaaagagcatttggtcctggtggagacaggaaggaccctgtatctgcaaggagagggccggctggacttcacggcatggaacgcagccattgggggcgcggctggtgggggcggcacagggctgcaggagcagcagatgagccggggtgacatccccatcatcgtggatgcctgcatcagttttgttacccagcatgggctccggctggaaggtgtataccggaaagggggcgctcgtgcccgcagcctgagactcctggctgagttccgtcgggatgcccggtcggtgaagctccgaccaggggagcactttgtggaggatgtcactgacacactcaaacgcttctttcgtgagctcgatgaccctgtgacctctgcacggttgctgcctcgctggagggaggctgctgagctgccccagaagaatcagcgcctggagaaatataaagatgtgattggctgcctgccgcgggtcaaccgccgcacactggccaccctcattgggcatctctatcgggtgcagaaatgtgcggctctaaaccagatgtgcacgcggaacttggctctgctgtttgcacccagcgtgttccagacggatgggcgaggggagcacgaggtgcgagtgctgcaagagctcattgatggctacatctctgtctttgatatcgattctgaccaggtagctcagattgacttggaggtcagtcttatcaccacctggaaggacgtgcagctgtctcaggctggagacctcatcatggaagtttatatagagcagcagctcccagacaactgtgtcaccctgaaggtgtccccaaccctgactgctgaggagctgactaaccaggtactggagatgcgggggacagcagctgggatggacttgtgggtgacttttgagattcgcgagcatggggagctggagcggccactgcatcccaaggaaaaggtcttagagcaggctttacaatggtgccagctcccagagccctgctcagcttccctgctcttgaaaaaagtccccctggcccaagctggctgcctcttcacaggtatccgacgtgagagcccacgggtggggctgttgcggtgtcgtgaggagccacctcgcttgctgggaagccgcttccaggagaggttctttctgctgcgtggccgctgcctgctgctgctcaaggagaagaaaagctctaaaccagaacgggagtggcctttggaaggtgccaaggtctacctgggaatccgcaagaagttaaagcccccaacaccgtggggcttcacattgatactagagaagatgcacctctacttgtcctgcactgacgaggatgaaatgtgggattggaccaccagcatccttaaagcccagcacgatgaccagcagccagtggtcttacgacgccattcctcctctgaccttgcccgtcagaagtttggcactatgcctttgctgcctatccgtggggatgacagtggagccaccctcttgctcctccacagacccctgggatgacttcattggaaagaacatggacagggt

SEQ ID NO: 447037 - DNA, 559 bp, Homo sapiens
ttccatctcaaggtaaaactcctagaggtatacctatctaaacctatccttggtaacagtcacatagagtgtgtctcatacattataaattacaaatttttagttaaaaattaatgatgctttattcctgtttgagtttctttattactcaaacttggcccacacagtggcaaaatgggagattttgtgctacaaatagtgttggggatgggggagtgaaaggttatttatgggagatttttaagtctattcctggattaataatttttcaggttgaaaaatgcctctccagaagatgtggaatattataattgccagcaagaacttacagatgatctacataaacagtatcaaatagtggaacgtataattggttagtgataaatgattctagttaaactttctttttatgcttgaaataatctgaaaaaagtcataagtttgccacttacatatcaaacacagtagcttgctcttactaaaacagtattgtaaactagatagctaaattttacttgtgtagcctttactaagaattatgtatctgatgattaaatgt

SEQ ID NO: 447038 - DNA, 7014 bp, Homo sapiens
tctttagagcaaaaggtgaatcaaaggagagtcccagaaaacctgtgactgttgaagaaaattcatctgtgaatttttatattcaaggagtcagtatttatattcatcttttaaactgggaagatttatattttactttaaaacttcttgataataatttacaatgaatggacacagtgatgaagaaagtgttagaaacagtagtggagaatcaagccagtcggatgatgattctgggtcagcttcaggctctggatctggttcgagttctggaagcagtagtgatggaagcagtagccagtcaggtagcagtgactctgactccggatctgaatcaggcagtcagtcagagtctgagtcagacacttcccgagaaaacaaagttcaagcaaaaccaccgaaagttgatggagctgagttttggaaatctagtcctagtattctggccgttcagagatctgcaatcctcaagaagcagcaacagcagcagcagcaacaacaacatcaagcctcatctaatagcggatcagaagaggattcctctagcagtgaagattccgatgactcatcaagtgaggtcaaaaggaaaaagcataaagatgaagattggcaaatgtctgggtcaggatctccatctcagtctggttcagattcagaatctgaagaagagagagagaaaagcagttgtgatgaaacagaatctgattatgagccaaaaaacaaagtcaaaagcagaaaacctcaaaatagatctaagtcaaaaaatggaaagaagattcttggacaaaaaaagagacagattgattcatctgaggaggatgatgatgaagaagattatgataatgataaaagaagttctcgtcgccaagcaactgttaatgttagctataaggaggatgaagaaatgaaaacagattctgatgacctactggaagtctgtggagaggatgttcctcaacctgaggaagaggaatttgaaaccatagaaagatttatggattgtcggattgggagaaaaggagctactggtgctactacaaccatctatgcagttgaagcagatggtgacccaaatgcaggctttgaaaaaaacaaagaaccaggagagattcagtatttaattaaatggaaaggatggtcccatatccacaacacttgggagacagaagaaaccctcaagcagcagaatgttagaggaatgaaaaaattggataattataagaaaaaagatcaggaaacaaaaagatggttgaaaaatgcctctccagaagatgtggaatattataattgccagcaagaacttacagatgatctacataaacagtatcaaatagtggaacgtataattgctcattccaatcaaaagtcagcagctggttatcctgattattactgcaaatggcagggccttccatactcagagtgcagctgggaagatggagctctcatttccaaaaagtttcaagcatgcattgatgagtattttagcaggaaccaatcaaaaaccactccttttaaagattgcaaagtattaaaacaaaggccaaggtttgtagccctgaagaagcagccatcctatattggaggacatgagggcttagaattaagagattatcaactgaatggtttaaattggcttgctcattcttggtgcaaaggaaatagttgcatactcgctgatgaaatgggccttggaaaaacaatacagacgatctcatttctgaattatttgtttcatgaacatcaattatatggaccttttttattggtagtaccgctctccactcttacttcctggcaaagggaaattcagacttgggcttctcaaatgaatgctgtggtttatttaggtgacattaacagcagaaacatgataagaactcatgaatggacgcatcatcagaccaaacggttaaaatttaatatattgttaacaacttatgaaattttattaaaagataaggcattccttggaggtctaaattgggcatttataggtgttgatgaagcacaccgattaaagaatgatgactcccttctgtataaaactttaatagattttaaatccaatcatcgtctccttatcactggaactcctctacagaattccctcaaagagctctggtctttgctacatttcattatgccagaaaagttttcttcctgggaagattttgaagaagaacatggcaaagggagagaatatggttatgcaagccttcacaaggagcttgagccatttctgttacgccgagttaagaaagatgtggaaaaatctcttcctgccaaggttgagcagattttaagaatggaaatgagtgctttacagaaacaatattacaaatggattttaactaggaattacaaagccctcagcaaaggttccaagggcagtacctcaggctttttgaacattatgatggagctaaagaaatgttgtaaccattgctacctcattaaaccaccagataataatgaattctataataaacaggaggccttacaacacttaattcgtagtagcggaaaattgattcttcttgacaagctattaattcgcctaagagaacgaggcaatcgagttcttattttttcacaaatggtgcggatgttagatatacttgcagaatatttgaaatatcgtcaattcccctttcaaagattagatggatcaataaaaggagaactgaggaaacaagctctagatcattttaatgctgagggatcagaggatttttgctttttgctgtccacaagagctggaggtctagggattaatttagcctctgctgacactgttgttatatttgattccgattggaatccacagaatgatcttcaggcacaggctagagcccatcgaattggccaaaagaaacaggtgaatatttatcgtctagttacaaagggatcagttgaagaagatattcttgaaagggcgaaaaagaagatggttttagatcatcttgtaattcaaagaatggacacaactgggaagacagtactacatacaggttctgccccatcaagttctactcctttcaataaagaagagttatcagccattttaaagtttggtgctgaagaactttttaaggaacctgaaggagaagaacaagagccccaggaaatggatatagatgaaatcttgaagagagctgaaactcatgaaaatgaaccaggtcctttaactgtaggagatgaattgctttcccagttcaaggttgccaacttctcaaatatggatgaggatgacattgagttggaacctgaaagaaattcaaagaattgggaggaaattattccagaagatcaaagaagacgattagaagaagaagaaagacaaaaggaacttgaagaaatttatatgctcccaagaatgagaaattgtgcaaaacagattagtttcaatggaagtgaagggaggcgcagtagaagtaggagatactctggatctgatagtgattccatctcagaagggaaaaggccaaagaaacgtggaagaccacggactattcctcgggagaatattaaaggatttagtgatgcagaaattaggcggtttatcaagagctataagaaatttggtggtcctctggaaagattagatgcaattgctcgagatgctgagttagttgataagtcagaaacagaccttagacgactgggagaattggtacataatggttgcattaaagcattaaaggatagttcttcaggaacagaacgaacaggtggtagactcggaaaagtgaagggtccaacattccgaatatcaggagtacaggtgaatgccaaactagtcatctcccatgaagaagaattaatacctttgcacaaatccattccttctgatccagaagaaagaaagcagtatactatcccatgccacacaaaggcagctcattttgatatagactggggcaaagaagatgattccaatttgttaattggcatctatgaatatggatatggaagctgggaaatgattaaaatggatcctgacctcagtctaacacacaagattcttccagatgatcccgataaaaaaccacaagcaaaacagttgcagacccgtgcagactacctcatcaaattacttagtagagatcttgcaaaaaaagaagctctttctggtgcgggaagttcaaagaggagaaaagcaagagctaagaagaataaagcaatgaagtctataaaagtgaaagaggaaataaagagtgattcttctcctctgccttcagagaagtctgatgaagatgatgataaagatgagatcagttctgtgaaacatccaaataaaaaaattaaaacagaaagagacagtgaagaaaaacctgagccagatgtttatataaagaaggaaccagaagaaaagagggaagcaaaagaaaaggagaataaaaaagaacttaaaagggagataaaagaaaaagaggataagaaagatataaaggaaaaagattttaaagaaaaaagagaaaacaaagtaaaagaagctatacagaaagaaaaagacataaaggaagaaaagttgagtgaatccaagtctgatggtagggaaagatccaagaaatcttcagtgtcagatgctccagttcatatcacggcaagtggtgaaccagttcccatttctgaagaatctgaagagctggatcagaagacattcagcatttgtaaagaaagaatgaggcctgttaaagcagctttgaaacaacttgataggcctgagaaaggcctttcagaaagagaacaactagagcatactagacaatgtttaataaaaattggagaccatatcacagaatgtctaaaagagtatacaaatcctgaacaaattaagcaatggagaaaaaacctgtggatttttgtatctaagtttactgaatttgatgcaagaaaattacataaattatataagcatgctattaaaaaacggcaggagtctcagcaaaacagtgatcaaaacagcaacttgaatcctcacgtgattagaaatccagatgtggaaagattaaaagagaatacaaatcacgatgatagcagcagggacagttattcctctgatagacacttaactcagtaccatgatcatcataaagaccgacatcagggagattcttacaaaaaaagtgattccaggaaaagaccctattcttcttttagtaatggtaaagaccatcgtgattgggatcactacaagcaagacagcagatattacagtgacagagagaaacacagaaaactggatgatcacaggagtagagatcacaggtcaaatttggaaggaagtttaaaagatagatctcattctgatcatcgttctcactcagatcatcggttacattcagaccaccggtcaagttctgaatatacgcaccataaatcttccagggattataggtatcactcagactggcaaatggaccacagagcttccagcagtggccctaggtcaccactagatcagagatctccttatggctccagatctccatttgaacattcagttgaacacaaaagtacaccggagcatacctggagtagtcggaaaacataacaaaaactgatacttcgtctttctggacttttcttttagccatatatcataaaccaacacagtaattgccttacatgacttgaaagatataaacagatcttctatcagtagcagtattgttacttctttccaggatgcaaggtctattatcccaacagaagagaaaatatttttatatttaaggattatgctgcactgtactacaaaattgtagtacttttttttgttttcttttttaaagaaatggaaaatgtttactattacagggacctcaacactgccctcccatacaggctggataaaactgtttttaagtcagtgattttagactgacctccatttaaattatgtttatatatgaactttactctgacctgtgatcatgtttcaggaaggaatgaaagagagttctttcttaataaagaaaaacactcaaggactttgttcatttccaaagctacttgtttacattgtacactgcgaccaccttgccgcttttcatcacaagcttgaatatttaaattctgtacttatatctgtaaaatagccaggaatttcctgtttgtgatctattatgcctttttacaaaaaaaatggctgtaaattattgtaaatattaaaggaactttccttacttccttccctttctcaggctttttttgactgttcctttccctaccaactcaggccttcttattaaaaaaaaaaaaatcagtgtaataacactttttaatgatttgtcttgatggaatcattgtttagaatgtaaaaatggggaaaggggccacttaattccattagtcctctttttatactgaatattttattagatacatgttattcccttttttttccttttttagtcaatattgtgtttgtagttttaaaaaatggcgagatatgtaaaatctaaactgcatgctctggaaacacttttttcagatgcatctggtttaaaagggtaggtgtataaacacttttcagaatccaaaacggccaaaagttattgtaaatccgtttgttttcccgttttatgtgggcaataatgtcaaatgtgctatgcagccaggttaacattttagataaacttgattgacttttaatataaactgttacaatgcacactgattgtatataaaaacgttatatatgacaaattaaatttaagaaaaaggatatgtgggctcctgtaattttctgctgcattcttactccctcaagcacttaccaccaccaccaccgccccctacccccgtttttaagtaacattttgctgccagaaaaagtattttggtaagcagttgaatatttgtaatgtgtagcattacaactaaatctgttttggagactatgaatattcctatgaagtaaaacttaggtcatagacatttttgttggccccttttggcttcctacagatattattatgggatgctttatatttattcacagat

SEQ ID NO: 447039 - DNA, 7911 bp, Homo sapiens
tctttagagcaaaaggtgaatcaaaggagagtcccagaaaacctgtgactgttgaagaaaattcatctgtgaatttttatattcaaggagtcagtatttatattcatcttttaaactgggaagatttatattttactttaaaacttcttgataataatttacaatgaatggacacagtgatgaagaaagtgttagaaacagtagtggagaatcaagccagtcggatgatgattctgggtcagcttcaggctctggatctggttcgagttctggaagcagtagtgatggaagcagtagccagtcaggtagcagtgactctgactccggatctgaatcaggcagtcagtcagagtctgagtcagacacttcccgagaaaacaaagttcaagcaaaaccaccgaaagttgatggagctgagttttggaaatctagtcctagtattctggccgttcagagatctgcaatcctcaagaagcagcaacagcagcagcagcaacaacaacatcaagcctcatctaatagcggatcagaagaggattcctctagcagtgaagattccgatgactcatcaagtgaggtcaaaaggaaaaagcataaagatgaagattggcaaatgtctgggtcaggatctccatctcagtctggttcagattcagaatctgaagaagagagagagaaaagcagttgtgatgaaacagaatctgattatgagccaaaaaacaaagtcaaaagcagaaaacctcaaaatagatctaagtcaaaaaatggaaagaagattcttggacaaaaaaagagacagattgattcatctgaggaggatgatgatgaagaagattatgataatgataaaagaagttctcgtcgccaagcaactgttaatgttagctataaggaggatgaagaaatgaaaacagattctgatgacctactggaagtctgtggagaggatgttcctcaacctgaggaagaggaatttgaaaccatagaaagatttatggattgtcggattgggagaaaaggagctactggtgctactacaaccatctatgcagttgaagcagatggtgacccaaatgcaggctttgaaaaaaacaaagaaccaggagagattcagtatttaattaaatggaaaggatggtcccatatccacaacacttgggagacagaagaaaccctcaagcagcagaatgttagaggaatgaaaaaattggataattataagaaaaaagatcaggaaacaaaaagatggttgaaaaatgcctctccagaagatgtggaatattataattgccagcaagaacttacagatgatctacataaacagtatcaaatagtggaacgtataattgctcattccaatcaaaagtcagcagctggttatcctgattattactgcaaatggcagggccttccatactcagagtgcagctgggaagatggagctctcatttccaaaaagtttcaagcatgcattgatgagtattttagcaggaaccaatcaaaaaccactccttttaaagattgcaaagtattaaaacaaaggccaaggtttgtagccctgaagaagcagccatcctatattggaggacatgagggcttagaattaagagattatcaactgaatggtttaaattggcttgctcattcttggtgcaaaggaaatagttgcatactcgctgatgaaatgggccttggaaaaacaatacagacgatctcatttctgaattatttgtttcatgaacatcaattatatggaccttttttattggtagtaccgctctccactcttacttcctggcaaagggaaattcagacttgggcttctcaaatgaatgctgtggtttatttaggtgacattaacagcagaaacatgataagaactcatgaatggacgcatcatcagaccaaacggttaaaatttaatatattgttaacaacttatgaaattttattaaaagataaggcattccttggaggtctaaattgggcatttataggtgttgatgaagcacaccgattaaagaatgatgactcccttctgtataaaactttaatagattttaaatccaatcatcgtctccttatcactggaactcctctacagaattccctcaaagagctctggtctttgctacatttcattatgccagaaaagttttcttcctgggaagattttgaagaagaacatggcaaagggagagaatatggttatgcaagccttcacaaggagcttgagccatttctgttacgccgagttaagaaagatgtggaaaaatctcttcctgccaaggttgagcagattttaagaatggaaatgagtgctttacagaaacaatattacaaatggattttaactaggaattacaaagccctcagcaaaggttccaagggcagtacctcaggctttttgaacattatgatggagctaaagaaatgttgtaaccattgctacctcattaaaccaccagataataatgaattctataataaacaggaggccttacaacacttaattcgtagtagcggaaaattgattcttcttgacaagctattaattcgcctaagagaacgaggcaatcgagttcttattttttcacaaatggtgcggatgttagatatacttgcagaatatttgaaatatcgtcaattcccctttcaaagattagatggatcaataaaaggagaactgaggaaacaagctctagatcattttaatgctgagggatcagaggtatgtattagtgcttttaaaattataaataattttgatttagtatcagtatattacattattatattcagacatttttaatcttcatatctagtttgataaaaaaagagtggtgttagccacctttgattagcaaatgaggttttaaagtcactattctagtttaaacctaaggattttatctttgagacagagtctcactctgtggcccaggtggaggttgcagtgagccaagataaaaagagtgagactccgtcaaaaaaaaaaaaaaaaaaaaaaaaatatatatatatatatatatatatatatttagtctccaatcccatctaggttgctgcaaatgccattatttcattcttctttatggctgagtagttttccactgtgtatgtataccacagtttatcttcttgttgattgatgggcgtttgggctggttccacattgttgcagttgcaaattgtgctgctgtaatcgtgtgtacaagtatctttttcatgtaatgacttttttgctctgggcagatactcagtagtgggattcctgggatcaagtggtagttctacttttagttcctttaaggaatttccacgctgttttccatagagttctttttttggtatatgccttttattttttaaggaaataaaatttacagttagagttgaagtgtcattcctttcctatcccgttttctttctttttcaccagaagtaaacactgtattgaatttggtgttaataacatatatatttgattttggagtctttttgttgattggtcttgctagatgttattagttttaaaaactgcctttctgtttaattagtaccatactgcttacgttcaaaaaatcaattgaaaaatttttcattttgattattcaatttcttacaggatttttgctttttgctgtccacaagagctggaggtctagggattaatttagcctctgctgacactgttgttatatttgattccgattggaatccacagaatgatcttcaggcacaggctagagcccatcgaattggccaaaagaaacaggtgaatatttatcgtctagttacaaagggatcagttgaagaagatattcttgaaagggcgaaaaagaagatggttttagatcatcttgtaattcaaagaatggacacaactgggaagacagtactacatacaggttctgccccatcaagttctactcctttcaataaagaagagttatcagccattttaaagtttggtgctgaagaactttttaaggaacctgaaggagaagaacaagagccccaggaaatggatatagatgaaatcttgaagagagctgaaactcatgaaaatgaaccaggtcctttaactgtaggagatgaattgctttcccagttcaaggttgccaacttctcaaatatggatgaggatgacattgagttggaacctgaaagaaattcaaagaattgggaggaaattattccagaagatcaaagaagacgattagaagaagaagaaagacaaaaggaacttgaagaaatttatatgctcccaagaatgagaaattgtgcaaaacagattagtttcaatggaagtgaagggaggcgcagtagaagtaggagatactctggatctgatagtgattccatctcagaagggaaaaggccaaagaaacgtggaagaccacggactattcctcgggagaatattaaaggatttagtgatgcagaaattaggcggtttatcaagagctataagaaatttggtggtcctctggaaagattagatgcaattgctcgagatgctgagttagttgataagtcagaaacagaccttagacgactgggagaattggtacataatggttgcattaaagcattaaaggatagttcttcaggaacagaacgaacaggtggtagactcggaaaagtgaagggtccaacattccgaatatcaggagtacaggtgaatgccaaactagtcatctcccatgaagaagaattaatacctttgcacaaatccattccttctgatccagaagaaagaaagcagtatactatcccatgccacacaaaggcagctcattttgatatagactggggcaaagaagatgattccaatttgttaattggcatctatgaatatggatatggaagctgggaaatgattaaaatggatcctgacctcagtctaacacacaagattcttccagatgatcccgataaaaaaccacaagcaaaacagttgcagacccgtgcagactacctcatcaaattacttagtagagatcttgcaaaaaaagaagctctttctggtgcgggaagttcaaagaggagaaaagcaagagctaagaagaataaagcaatgaagtctataaaagtgaaagaggaaataaagagtgattcttctcctctgccttcagagaagtctgatgaagatgatgataaagatgagatcagttctgtgaaacatccaaataaaaaaattaaaacagaaagagacagtgaagaaaaacctgagccagatgtttatataaagaaggaaccagaagaaaagagggaagcaaaagaaaaggagaataaaaaagaacttaaaagggagataaaagaaaaagaggataagaaagatataaaggaaaaagattttaaagaaaaaagagaaaacaaagtaaaagaagctatacagaaagaaaaagacataaaggaagaaaagttgagtgaatccaagtctgatggtagggaaagatccaagaaatcttcagtgtcagatgctccagttcatatcacggcaagtggtgaaccagttcccatttctgaagaatctgaagagctggatcagaagacattcagcatttgtaaagaaagaatgaggcctgttaaagcagctttgaaacaacttgataggcctgagaaaggcctttcagaaagagaacaactagagcatactagacaatgtttaataaaaattggagaccatatcacagaatgtctaaaagagtatacaaatcctgaacaaattaagcaatggagaaaaaacctgtggatttttgtatctaagtttactgaatttgatgcaagaaaattacataaattatataagcatgctattaaaaaacggcaggagtctcagcaaaacagtgatcaaaacagcaacttgaatcctcacgtgattagaaatccagatgtggaaagattaaaagagaatacaaatcacgatgatagcagcagggacagttattcctctgatagacacttaactcagtaccatgatcatcataaagaccgacatcagggagattcttacaaaaaaagtgattccaggaaaagaccctattcttcttttagtaatggtaaagaccatcgtgattgggatcactacaagcaagacagcagatattacagtgacagagagaaacacagaaaactggatgatcacaggagtagagatcacaggtcaaatttggaaggaagtttaaaagatagatctcattctgatcatcgttctcactcagatcatcggttacattcagaccaccggtcaagttctgaatatacgcaccataaatcttccagggattataggtatcactcagactggcaaatggaccacagagcttccagcagtggccctaggtcaccactagatcagagatctccttatggctccagatctccatttgaacattcagttgaacacaaaagtacaccggagcatacctggagtagtcggaaaacataacaaaaactgatacttcgtctttctggacttttcttttagccatatatcataaaccaacacagtaattgccttacatgacttgaaagatataaacagatcttctatcagtagcagtattgttacttctttccaggatgcaaggtctattatcccaacagaagagaaaatatttttatatttaaggattatgctgcactgtactacaaaattgtagtacttttttttgttttcttttttaaagaaatggaaaatgtttactattacagggacctcaacactgccctcccatacaggctggataaaactgtttttaagtcagtgattttagactgacctccatttaaattatgtttatatatgaactttactctgacctgtgatcatgtttcaggaaggaatgaaagagagttctttcttaataaagaaaaacactcaaggactttgttcatttccaaagctacttgtttacattgtacactgcgaccaccttgccgcttttcatcacaagcttgaatatttaaattctgtacttatatctgtaaaatagccaggaatttcctgtttgtgatctattatgcctttttacaaaaaaaatggctgtaaattattgtaaatattaaaggaactttccttacttccttccctttctcaggctttttttgactgttcctttccctaccaactcaggccttcttattaaaaaaaaaaaaatcagtgtaataacactttttaatgatttgtcttgatggaatcattgtttagaatgtaaaaatggggaaaggggccacttaattccattagtcctctttttatactgaatattttattagatacatgttattcccttttttttccttttttagtcaatattgtgtttgtagttttaaaaaatggcgagatatgtaaaatctaaactgcatgctctggaaacacttttttcagatgcatctggtttaaaagggtaggtgtataaacacttttcagaatccaaaacggccaaaagttattgtaaatccgtttgttttcccgttttatgtgggcaataatgtcaaatgtgctatgcagccaggttaacattttagataaacttgattgacttttaatataaactgttacaatgcacactgattgtatataaaaacgttatatatgacaaattaaatttaagaaaaaggatatgtgggctcctgtaattttctgctgcattcttactccctcaagcacttaccaccaccaccaccgccccctacccccgtttttaagtaacattttgctgccagaaaaagtattttggtaagcagttgaatatttgtaatgtgtagcattacaactaaatctgttttggagactatgaatattcctatgaagtaaaacttaggtcatagacatttttgttggccccttttggcttcctacagatattattatgggatgctttatatttattcacagat

SEQ ID NO: 447040 - DNA, 6917 bp, Homo sapiens
tctttagagcaaaaggtgaatcaaaggagagtcccagaaaacctgtgactgttgaagaaaattcatctgtgaatttttatattcaaggagtcagtatttatattcatcttttaaactgggaagatttatattttactttaaaacttcttgataataatttacaatgaatggacacagtgatgaagaaagtgttagaaacagtagtggagaatcaagccagtcggatgatgattctgggtcagcttcaggctctggatctggttcgagttctggaagcagtagtgatggaagcagtagccagtcaggtagcagtgactctgactccggatctgaatcaggcagtcagtcagagtctgagtcagacacttcccgagaaaacaaagttcaagcaaaaccaccgaaagttgatggagctgagttttggaaatctagtcctagtattctggccgttcagagatctgcaatcctcaagaagcagcaacagcagcagcagcaacaacaacatcaagcctcatctaatagcggatcagaagaggattcctctagcagtgaagattccgatgactcatcaagtgaggtcaaaaggaaaaagcataaagatgaagattggcaaatgtctgggtcaggatctccatctcagtctggttcagattcagaatctgaagaagagagagagaaaagcagttgtgatgaaacagaatctgattatgagccaaaaaacaaagtcaaaagcagaaaacctcaaaatagatctaagtcaaaaaatggaaagaagattcttggacaaaaaaagagacagattgattcatctgaggaggatgatgatgaagaagattatgataatgataaaagaagttctcgtcgccaagcaactgttaatgttagctataaggaggatgaagaaatgaaaacagattctgatgacctactggaagtctgtggagaggatgttcctcaacctgaggaagaggaatttgaaaccatagaaagatttatggattgtcggattgggagaaaaggagctactggtgctactacaaccatctatgcagttgaagcagatggtgacccaaatgcaggctttgaaaaaaacaaagaaccaggagagattcagtatttaattaaatggaaaggatggtcccatatccacaacacttgggagacagaagaaaccctcaagcagcagaatgttagaggaatgaaaaaattggataattataagaaaaaagatcaggaaacaaaaagatggttgaaaaatgcctctccagaagatgtggaatattataattgccagcaagaacttacagatgatctacataaacagtatcaaatagtggaacgtataattgctcattccaatcaaaagtcagcagctggttatcctgattattactgcaaatggcagggccttccatactcagagtgcagctgggaagatggagctctcatttccaaaaagtttcaagcatgcattgatgagtattttagcaggaaccaatcaaaaaccactccttttaaagattgcaaagtattaaaacaaaggccaaggtttgtagccctgaagaagcagccatcctatattggaggacatgagggcttagaattaagagattatcaactgaatggtttaaattggcttgctcattcttggtgcaaaggaaatagttgcatactcgctgatgaaatgggccttggaaaaacaatacagacgatctcatttctgaattatttgtttcatgaacatcaattatatggaccttttttattggtagtaccgctctccactcttacttcctggcaaagggaaattcagacttgggcttctcaaatgaatgctgtggtttatttaggtgacattaacagcagaaacatgataagaactcatgaatggacgcatcatcagaccaaacggttaaaatttaatatattgttaacaacttatgaaattttattaaaagataaggcattccttggaggtctaaattgggcatttataggtgttgatgaagcacaccgattaaagaatgatgactcccttctgtataaaactttaatagattttaaatccaatcatcgtctccttatcactggaactcctctacagaattccctcaaagagctctggtctttgctacatttcattatgccagaaaagttttcttcctgggaagattttgaagaagaacatggcaaagggagagaatatggttatgcaagccttcacaaggagcttgagccatttctgttacgccgagttaagaaagatgtggaaaaatctcttcctgccaaggttgagcagattttaagaatggaaatgagtgctttacagaaacaatattacaaatggattttaactaggaattacaaagccctcagcaaaggttccaagggcagtacctcaggctttttgaacattatgatggagctaaagaaatgttgtaaccattgctacctcattaaaccaccagataataatgaattctataataaacaggaggccttacaacacttaattcgtagtagcggaaaattgattcttcttgacaagctattaattcgcctaagagaacgaggcaatcgagttcttattttttcacaaatggtgcggatgttagatatacttgcagaatatttgaaatatcgtcaattcccctttcaaagattagatggatcaataaaaggagaactgaggaaacaagctctagatcattttaatgctgagggatcagaggatttttgctttttgctgtccacaagagctggaggtctagggattaatttagcctctgctgacactgttgttatatttgattccgattggaatccacagaatgatcttcaggcacaggctagagcccatcgaattggccaaaagaaacaggtgaatatttatcgtctagttacaaagggatcagttgaagaagatattcttgaaagggcgaaaaagaagatggttttagatcatcttgtaattcaaagaatggacacaactgggaagacagtactacatacaggttctgccccatcaagttctactcctttcaataaagaagagttatcagccattttaaagtttggtgctgaagaactttttaaggaacctgaaggagaagaacaagagccccaggaaatggatatagatgaaatcttgaagagagctgaaactcatgaaaatgaaccaggtcctttaactgtaggagatgaattgctttcccagttcaaggttgccaacttctcaaatatggatgaggatgacattgagttggaacctgaaagaaattcaaagaattgggaggaaattattccagaagatcaaagaagacgattagaagaagaagaaagacaaaaggaacttgaagaaatttatatgctcccaagaatgagaaattgtgcaaaacagattagtttcaatggaagtgaagggaggcgcagtagaagtaggagatactctggatctgatagtgattccatctcagaagggaaaaggccaaagaaacgtggaagaccacggactattcctcgggagaatattaaaggatttagtgatgcagaaattaggcggtttatcaagagctataagaaatttggtggtcctctggaaagattagatgcaattgctcgagatgctgagttagttgataagtcagaaacagaccttagacgactgggagaattggtacataatggttgcattaaagcattaaaggatagttcttcaggaacagaacgaacaggtggtagactcggaaaagtgaagggtccaacattccgaatatcaggagtacaggtgaatgccaaactagtcatctcccatgaagaagaattaatacctttgcacaaatccattccttctgatccagaagaaagaaagcagtatactatcccatgccacacaaaggcagctcattttgatatagactggggcaaagaagatgattccaatttgttaattggcatctatgaatatggatatggaagctgggaaatgattaaaatggatcctgacctcagtctaacacacaagattcttccagatgatcccgataaaaaaccacaagcaaaacagttgcagacccgtgcagactacctcatcaaattacttagtagagatcttgcaaaaaaagaagctctttctggtgcgggaagttcaaagaggagaaaagcaagagctaagaagaataaagcaatgaagtctataaaagtgaaagaggaaataaagagtgattcttctcctctgccttcagagaagtctgatgaagatgatgataaagatgagatcagttctgtgaaacatccaaataaaaaaattaaaacagaaagagacagtgaagaaaaacctgagccagatgtttatataaagaaggaaccagaagaaaagagggaagcaaaagaaaaggagaataaaaaagaacttaaaagggagataaaagaaaaagaggataagaaagatataaaggaaaaagattttaaagaaaaaagagaaaacaaagtaaaagaagctatacagaaagaaaaagacataaaggaagaaaagttgagtgaatccaagtctgatggtagggaaagatccaagaaatcttcagtgtcagatgctccagttcatatcacggcaagtggtgaaccagttcccatttctgaagaatctgaagagctggatcagaagacattcagcatttgtaaagaaagaatgaggcctgttaaagcagctttgaaacaacttgataggcctgagaaaggcctttcagaaagagaacaactagagcatactagacaatgtttaataaaaattggagaccatatcacagaatgtctaaaagagtatacaaatcctgaacaaattaagcaatggagaaacaaaacagtgatcaaaacagcaacttgaatcctcacgtgattagaaatccagatgtggaaagattaaaagagaatacaaatcacgatgatagcagcagggacagttattcctctgatagacacttaactcagtaccatgatcatcataaagaccgacatcagggagattcttacaaaaaaagtgattccaggaaaagaccctattcttcttttagtaatggtaaagaccatcgtgattgggatcactacaagcaagacagcagatattacagtgacagagagaaacacagaaaactggatgatcacaggagtagagatcacaggtcaaatttggaaggaagtttaaaagatagatctcattctgatcatcgttctcactcagatcatcggttacattcagaccaccggtcaagttctgaatatacgcaccataaatcttccagggattataggtatcactcagactggcaaatggaccacagagcttccagcagtggccctaggtcaccactagatcagagatctccttatggctccagatctccatttgaacattcagttgaacacaaaagtacaccggagcatacctggagtagtcggaaaacataacaaaaactgatacttcgtctttctggacttttcttttagccatatatcataaaccaacacagtaattgccttacatgacttgaaagatataaacagatcttctatcagtagcagtattgttacttctttccaggatgcaaggtctattatcccaacagaagagaaaatatttttatatttaaggattatgctgcactgtactacaaaattgtagtacttttttttgttttcttttttaaagaaatggaaaatgtttactattacagggacctcaacactgccctcccatacaggctggataaaactgtttttaagtcagtgattttagactgacctccatttaaattatgtttatatatgaactttactctgacctgtgatcatgtttcaggaaggaatgaaagagagttctttcttaataaagaaaaacactcaaggactttgttcatttccaaagctacttgtttacattgtacactgcgaccaccttgccgcttttcatcacaagcttgaatatttaaattctgtacttatatctgtaaaatagccaggaatttcctgtttgtgatctattatgcctttttacaaaaaaaatggctgtaaattattgtaaatattaaaggaactttccttacttccttccctttctcaggctttttttgactgttcctttccctaccaactcaggccttcttattaaaaaaaaaaaaatcagtgtaataacactttttaatgatttgtcttgatggaatcattgtttagaatgtaaaaatggggaaaggggccacttaattccattagtcctctttttatactgaatattttattagatacatgttattcccttttttttccttttttagtcaatattgtgtttgtagttttaaaaaatggcgagatatgtaaaatctaaactgcatgctctggaaacacttttttcagatgcatctggtttaaaagggtaggtgtataaacacttttcagaatccaaaacggccaaaagttattgtaaatccgtttgttttcccgttttatgtgggcaataatgtcaaatgtgctatgcagccaggttaacattttagataaacttgattgacttttaatataaactgttacaatgcacactgattgtatataaaaacgttatatatgacaaattaaatttaagaaaaaggatatgtgggctcctgtaattttctgctgcattcttactccctcaagcacttaccaccaccaccaccgccccctacccccgtttttaagtaacattttgctgccagaaaaagtattttggtaagcagttgaatatttgtaatgtgtagcattacaactaaatctgttttggagactatgaatattcctatgaagtaaaacttaggtcatagacatttttgttggccccttttggcttcctacagatattattatgggatgctttatatttattcacagat

SEQ ID NO: 447041 - DNA, 5897 bp, Homo sapiens
tgtctaatgcagtaaaagttgtaagaagattcagataaataatgcagctgaccatctttttagcaaatttgaggggaaaggattaatacactgtaataattatgttacattagcctgttctgtgtatagctaatggttcagaaaacaagttgtgttctcatgagtattatgaaagaggtttggtccgttgtatatacagctgtgaattttataacggtacagttttactttggtactatcgttggctttttttgtttgttttaatgcttttagaatttatcctggtaattgttctgctaaacatcgttttcataatttttttttttaagatggattttaactaggaattacaaagccctcagcaaaggttccaagggcagtacctcaggctttttgaacattatgatggagctaaagaaatgttgtaaccattgctacctcattaaaccaccagataataatgaattctataataaacaggaggccttacaacacttaattcgtagtagcggaaaattgattcttcttgacaagctattaattcgcctaagagaacgaggcaatcgagttcttattttttcacaaatggtgcggatgttagatatacttgcagaatatttgaaatatcgtcaattcccctttcaaagattagatggatcaataaaaggagaactgaggaaacaagctctagatcattttaatgctgagggatcagaggtatgtattagtgcttttaaaattataaataattttgatttagtatcagtatattacattattatattcagacatttttaatcttcatatctagtttgataaaaaaagagtggtgttagccacctttgattagcaaatgaggttttaaagtcactattctagtttaaacctaaggattttatctttgagacagagtctcactctgtggcccaggtggaggttgcagtgagccaagataaaaagagtgagactccgtcaaaaaaaaaaaaaaaaaaaaaaaaatatatatatatatatatatatatatatttagtctccaatcccatctaggttgctgcaaatgccattatttcattcttctttatggctgagtagttttccactgtgtatgtataccacagtttatcttcttgttgattgatgggcgtttgggctggttccacattgttgcagttgcaaattgtgctgctgtaatcgtgtgtacaagtatctttttcatgtaatgacttttttgctctgggcagatactcagtagtgggattcctgggatcaagtggtagttctacttttagttcctttaaggaatttccacgctgttttccatagagttctttttttggtatatgccttttattttttaaggaaataaaatttacagttagagttgaagtgtcattcctttcctatcccgttttctttctttttcaccagaagtaaacactgtattgaatttggtgttaataacatatatatttgattttggagtctttttgttgattggtcttgctagatgttattagttttaaaaactgcctttctgtttaattagtaccatactgcttacgttcaaaaaatcaattgaaaaatttttcattttgattattcaatttcttacaggatttttgctttttgctgtccacaagagctggaggtctagggattaatttagcctctgctgacactgttgttatatttgattccgattggaatccacagaatgatcttcaggcacaggctagagcccatcgaattggccaaaagaaacaggtgaatatttatcgtctagttacaaagggatcagttgaagaagatattcttgaaagggcgaaaaagaagatggttttagatcatcttgtaattcaaagaatggacacaactgggaagacagtactacatacaggttctgccccatcaagttctactcctttcaataaagaagagttatcagccattttaaagtttggtgctgaagaactttttaaggaacctgaaggagaagaacaagagccccaggaaatggatatagatgaaatcttgaagagagctgaaactcatgaaaatgaaccaggtcctttaactgtaggagatgaattgctttcccagttcaaggttgccaacttctcaaatatggatgaggatgacattgagttggaacctgaaagaaattcaaagaattgggaggaaattattccagaagatcaaagaagacgattagaagaagaagaaagacaaaaggaacttgaagaaatttatatgctcccaagaatgagaaattgtgcaaaacagattagtttcaatggaagtgaagggaggcgcagtagaagtaggagatactctggatctgatagtgattccatctcagaagggaaaaggccaaagaaacgtggaagaccacggactattcctcgggagaatattaaaggatttagtgatgcagaaattaggcggtttatcaagagctataagaaatttggtggtcctctggaaagattagatgcaattgctcgagatgctgagttagttgataagtcagaaacagaccttagacgactgggagaattggtacataatggttgcattaaagcattaaaggatagttcttcaggaacagaacgaacaggtggtagactcggaaaagtgaagggtccaacattccgaatatcaggagtacaggtgaatgccaaactagtcatctcccatgaagaagaattaatacctttgcacaaatccattccttctgatccagaagaaagaaagcagtatactatcccatgccacacaaaggcagctcattttgatatagactggggcaaagaagatgattccaatttgttaattggcatctatgaatatggatatggaagctgggaaatgattaaaatggatcctgacctcagtctaacacacaagattcttccagatgatcccgataaaaaaccacaagcaaaacagttgcagacccgtgcagactacctcatcaaattacttagtagagatcttgcaaaaaaagaagctctttctggtgcgggaagttcaaagaggagaaaagcaagagctaagaagaataaagcaatgaagtctataaaagtgaaagaggaaataaagagtgattcttctcctctgccttcagagaagtctgatgaagatgatgataaagatgagatcagttctgtgaaacatccaaataaaaaaattaaaacagaaagagacagtgaagaaaaacctgagccagatgtttatataaagaaggaaccagaagaaaagagggaagcaaaagaaaaggagaataaaaaagaacttaaaagggagataaaagaaaaagaggataagaaagatataaaggaaaaagattttaaagaaaaaagagaaaacaaagtaaaagaagctatacagaaagaaaaagacataaaggaagaaaagttgagtgaatccaagtctgatggtagggaaagatccaagaaatcttcagtgtcagatgctccagttcatatcacggcaagtggtgaaccagttcccatttctgaagaatctgaagagctggatcagaagacattcagcatttgtaaagaaagaatgaggcctgttaaagcagctttgaaacaacttgataggcctgagaaaggcctttcagaaagagaacaactagagcatactagacaatgtttaataaaaattggagaccatatcacagaatgtctaaaagagtatacaaatcctgaacaaattaagcaatggagaaaaaacctgtggatttttgtatctaagtttactgaatttgatgcaagaaaattacataaattatataagcatgctattaaaaaacggcaggagtctcagcaaaacagtgatcaaaacagcaacttgaatcctcacgtgattagaaatccagatgtggaaagattaaaagagaatacaaatcacgatgatagcagcagggacagttattcctctgatagacacttaactcagtaccatgatcatcataaagaccgacatcagggagattcttacaaaaaaagtgattccaggaaaagaccctattcttcttttagtaatggtaaagaccatcgtgattgggatcactacaagcaagacagcagatattacagtgacagagagaaacacagaaaactggatgatcacaggagtagagatcacaggtcaaatttggaaggaagtttaaaagatagatctcattctgatcatcgttctcactcagatcatcggttacattcagaccaccggtcaagttctgaatatacgcaccataaatcttccagggattataggtatcactcagactggcaaatggaccacagagcttccagcagtggccctaggtcaccactagatcagagatctccttatggctccagatctccatttgaacattcagttgaacacaaaagtacaccggagcatacctggagtagtcggaaaacataacaaaaactgatacttcgtctttctggacttttcttttagccatatatcataaaccaacacagtaattgccttacatgacttgaaagatataaacagatcttctatcagtagcagtattgttacttctttccaggatgcaaggtctattatcccaacagaagagaaaatatttttatatttaaggattatgctgcactgtactacaaaattgtagtacttttttttgttttcttttttaaagaaatggaaaatgtttactattacagggacctcaacactgccctcccatacaggctggataaaactgtttttaagtcagtgattttagactgacctccatttaaattatgtttatatatgaactttactctgacctgtgatcatgtttcaggaaggaatgaaagagagttctttcttaataaagaaaaacactcaaggactttgttcatttccaaagctacttgtttacattgtacactgcgaccaccttgccgcttttcatcacaagcttgaatatttaaattctgtacttatatctgtaaaatagccaggaatttcctgtttgtgatctattatgcctttttacaaaaaaaatggctgtaaattattgtaaatattaaaggaactttccttacttccttccctttctcaggctttttttgactgttcctttccctaccaactcaggccttcttattaaaaaaaaaaaaatcagtgtaataacactttttaatgatttgtcttgatggaatcattgtttagaatgtaaaaatggggaaaggggccacttaattccattagtcctctttttatactgaatattttattagatacatgttattcccttttttttccttttttagtcaatattgtgtttgtagttttaaaaaatggcgagatatgtaaaatctaaactgcatgctctggaaacacttttttcagatgcatctggtttaaaagggtaggtgtataaacacttttcagaatccaaaacggccaaaagttattgtaaatccgtttgttttcccgttttatgtgggcaataatgtcaaatgtgctatgcagccaggttaacattttagataaacttgattgacttttaatataaactgttacaatgcacactgattgtatataaaaacgttatatatgacaaattaaatttaagaaaaaggatatgtgggctcctgtaattttctgctgcattcttactccctcaagcacttaccaccaccaccaccgccccctacccccgtttttaagtaacattttgctgccagaaaaagtattttggtaagcagttgaatatttgtaatgtgtagcattacaactaaatctgttttggagactatgaatattcctatgaagtaaaacttaggtcatagacatttttgttggccccttttggcttcctacagatattattatgggatgctttatatttattcacagat

SEQ ID NO: 447042 - DNA, 6458 bp, Homo sapiens
tctttagagcaaaaggtgaatcaaaggagagtcccagaaaacctgtgactgttgaagaaaattcatctgtgaatttttatattcaaggagtcagtatttatattcatcttttaaactgggaagatttatattttactttaaaacttcttgataataatttacaatgaatggacacagtgatgaagaaagtgttagaaacagtagtggagaatcaagccagtcggatgatgattctgggtcagcttcaggctctggatctggttcgagttctggaagcagtagtgatggaagcagtagccagtcaggtagcagtgactctgactccggatctgaatcaggcagtcagtcagagtctgagtcagacacttcccgagaaaacaaagttcaagcaaaaccaccgaaagttgatggagctgagttttggaaatctagtcctagtattctggccgttcagagatctgcaatcctcaagaagcagcaacagcagcagcagcaacaacaacatcaagcctcatctaatagcggatcagaagaggattcctctagcagtgaagattccgatgactcatcaagtgaggtcaaaaggaaaaagcataaagatgaagattggcaaatgtctgggtcaggatctccatctcagtctggttcagattcagaatctgaagaagagagagagaaaagcagttgtgatgaaacagaatctgattatgagccaaaaaacaaagtcaaaagcagaaaacctcaaaatagatctaagtcaaaaaatggaaagaagattcttggacaaaaaaagagacagattgattcatctgaggaggatgatgatgaagaagattatgataatgataaaagaagttctcgtcgccaagcaactgttaatgttagctataaggaggatgaagaaatgaaaacagattctgatgacctactggaagtctgtggagaggatgttcctcaacctgaggaagaggaatttgaaaccatagaaagatttatggattgtcggattgggagaaaaggagctactggtgctactacaaccatctatgcagttgaagcagatggtgacccaaatgcaggctttgaaaaaaacaaagaaccaggagagattcagtatttaattaaatggaaaggatggtcccatatccacaacacttgggagacagaagaaaccctcaagcagcagaatgttagaggaatgaaaaaattggataattataagaaaaaagatcaggaaacaaaaagatggttgaaaaatgcctctccagaagatgtggaatattataattgccagcaagaacttacagatgatctacataaacagtatcaaatagtggaacgtataattgctcattccaatcaaaagtcagcagctggttatcctgattattactgcaaatggcagggccttccatactcagagtgcagctgggaagatggagctctcatttccaaaaagtttcaagcatgcattgatgagtattttagcaggaaccaatcaaaaaccactccttttaaagattgcaaagtattaaaacaaaggccaaggtttgtagccctgaagaagcagccatcctatattggaggacatgagggcttagaattaagagattatcaactgaatggtttaaattggcttgctcattcttggtgcaaaggaaatagttgcatactcgctgatgaaatgggccttggaaaaacaatacagacgatctcatttctgaattatttgtttcatgaacatcaattatatggaccttttttattggtagtaccgctctccactcttacttcctggcaaagggaaattcagacttgggcttctcaaatgaatgctgtggtttatttaggtgacattaacagcagaaacatgataagaactcatgaatggacgcatcatcagaccaaacggttaaaatttaatatattgttaacaacttatgaaattttattaaaagataaggcattccttggaggtctaaattgggcatttataggtgttgatgaagcacaccgattaaagaatgatgactcccttctgtataaaactttaatagattttaaatccaatcatcgtctccttatcactggaactcctctacagaattccctcaaagagctctggtctttgctacatttcattatgccagaaaagttttcttcctgggaagattttgaagaagaacatggcaaagggagagaatatggttatgcaagccttcacaaggagcttgagccatttctgttacgccgagttaagaaagatgtggaaaaatctcttcctgccaaggttgagcagattttaagaatggaaatgagtgctttacagaaacaatattacaaatggattttaactaggaattacaaagccctcagcaaaggttccaagggcagtacctcaggctttttgaacattatgatggagctaaagaaatgttgtaaccattgctacctcattaaaccaccagataataatgaattctataataaacaggaggccttacaacacttaattcgtagtagcggaaaattgattcttcttgacaagctattaattcgcctaagagaacgaggcaatcgagttcttattttttcacaaatggtgcggatgttagatatacttgcagaatatttgaaatatcgtcaattcccctttcaaagattagatggatcaataaaaggagaactgaggaaacaagctctagatcattttaatgctgagggatcagaggatttttgctttttgctgtccacaagagctggaggtctagggattaatttagcctctgctgacactgttgttatatttgattccgattggaatccacagaatgatcttcaggcacaggctagagcccatcgaattggccaaaagaaacaggtgaatatttatcgtctagttacaaagggatcagttgaagaagatattcttgaaagggcgaaaaagaagatggttttagatcatcttgtaattcaaagaatggacacaactgggaagacagtactacatacaggttctgccccatcaagttctactcctttcaataaagaagagttatcagccattttaaagtttggtgctgaagaactttttaaggaacctgaaggagaagaacaagagccccaggaaatggatatagatgaaatcttgaagagagctgaaactcatgaaaatgaaccaggtcctttaactgtaggagatgaattgctttcccagttcaaggttgccaacttctcaaatatggatgaggatgacattgagttggaacctgaaagaaattcaaagaattgggaggaaattattccagaagatcaaagaagacgattagaagaagaagaaagacaaaaggaacttgaagaaatttatatgctcccaagaatgagaaattgtgcaaaacagattagtttcaatggaagtgaagggaggcgcagtagaagtaggagatactctggatctgatagtgattccatctcagaagggaaaaggccaaagaaacgtggaagaccacggactattcctcgggagaatattaaaggatttagtgatgcagaaattaggcggtttatcaagagctataagaaatttggtggtcctctggaaagattagatgcaattgctcgagatgctgagttagttgataagtcagaaacagaccttagacgactgggagaattggtacataatggttgcattaaagcattaaaggatagttcttcaggaacagaacgaacaggtggtagactcggaaaagtgaagggtccaacattccgaatatcaggagtacaggtgaatgccaaactagtcatctcccatgaagaagaattaatacctttgcacaaatccattccttctgatccagaagaaagaaagcagtatactatcccatgccacacaaaggcagctcattttgatatagactggggcaaagaagatgattccaatttgttaattggcatctatgaatatggatatggaagctgggaaatgattaaaatggatcctgacctcagtctaacacacaagattcttccagatgatcccgataaaaaaccacaagcaaaacagttgcagacccgtgcagactacctcatcaaattacttagtagagatcttgcaaaaaaagaagctctttctggtgcgggaagttcaaagaggagaaaagcaagagctaagaagaataaagcaatgaagtctataaaagtgaaagaggaaataaagagtgattcttctcctctgccttcagagaagtctgatgaagatgatgataaagatgagatcagttctgtgaaacatccaaataaaaaaattaaaacagaaagagacagtgaagaaaaacctgagccagatgtttatataaagaaggaaccagaagaaaagagggaagcaaaagaaaaggagaataaaaaagaacttaaaagggagataaaagaaaaagaggataagaaagatataaaggaaaaagattttaaagaaaaaagagaaaacaaagtaaaagaagctatacagaaagaaaaagacataaaggaagaaaagttgagtgaatccaagtctgatggtagggaaagatccaagaaatcttcagtgtcagatgctccagttcatatcacggcaagtggtgaaccagttcccatttctgaagaatctgaagagctggatcagaagacattcagcatttgtaaagaaagaatgaggcctgttaaagcagctttgaaacaacttgataggcctgagaaaggcctttcagaaagagaacaactagagcatactagacaatgtttaataaaaattggagaccatatcacagaatgtctaaaagagtatacaaatcctgaacaaattaagcaatggagaaaaaacctgtggatttttgtatctaagtttactgaatttgatgcaagaaaattacataaattatataagcatgctattaaaaaacggcaggagtctcagcaaaacagtgatcaaaacagcaacttgaatcctcacgtgattagaaatccagatgtggaaagattaaaagagaatacaaatcacgatgatagcagcagggacagttattcctctgatagacacttaactcagtaccatgatcatcataaagaccgacatcagggagattcttacaaaaaaagtgattccaggaaaagaccctattcttcttttagtaatggtaaagaccatcgtgattgggatcactacaagcaagacagcagatattacagtgacagagagaaacacagaaaactggatgatcacaggagtagagatcacaggtcaaatttggaaggaagtttaaaagatagatctcattctgatcatcgttctcactcagatcatcggttacattcagaccaccggtcaagttctgaatatacgcaccataaatcttccagggattataggtatcactcagactggcaaatggaccacagagcttccagcagtggccctaggtcaccactagatcagagatctccttatggctccagatctccatttgaacattcagttgaacacaaaagtacaccggagcatacctggagtagtcggaaaacataacaaaaactgatacttcgtctttctggacttttcttttagccatatatcataaaccaacacagtaattgccttacatgacttgaaagatataaacagatcttctatcagtagcagtattgttacttctttccaggatgcaaggtctattatcccaacagaagagaaaatatttttatatttaaggattatgctgcactgtactacaaaattgtagtacttttttttgttttcttttttaaagaaatggaaaatgtttactattacagggacctcaacactgccctcccatacaggctggataaaactgtttttaagtcagtgattttagactgacctccatttaaattatgtttatatatgaactttactctgacctgtgatcatgtttcaggaaggaatgaaagagagttctttcttaataaagaaaaacactcaaggactttgttcatttccaaagctacttgtttacattgtacactgcgaccaccttgccgcttttcatcacaagcttgaatatttaaattctgtacttatatctgtaaaatagccaggaatttcctgtttgtgatctattatgcctttttacaaaaaaaatggctgtaaattattgtaaatattaaaggaactttccttacttccttccctttaaaaaaaaaaaaaaaaaaaaaaaaaaaaaaaaaacaaaaaaaggggggggcataaaaaccccgggggccaaaaaaaacacaattgttaaaaagcgccccaagaggcacgaataaaacgagcagaggcgaaaaacaacgagcaagggaaaacaacacgaacatggaggaaccccgggggggacatggaacccccaaaataaccgagagactaaaaggtctagaaaacaagtagagaaagtccatataaccac

SEQ ID NO: 447043 - DNA, 6325 bp, Homo sapiens
tctttagagcaaaaggtgaatcaaaggagagtcccagaaaacctgtgactgttgaagaaaattcatctgtgaatttttatattcaaggagtcagtatttatattcatcttttaaactgggaagatttatattttactttaaaacttcttgataataatttacaatgaatggacacagtgatgaagaaagtgttagaaacagtagtggagaatcaagccagtcggatgatgattctgggtcagcttcaggctctggatctggttcgagttctggaagcagtagtgatggaagcagtagccagtcaggtagcagtgactctgactccggatctgaatcaggcagtcagtcagagtctgagtcagacacttcccgagaaaacaaagttcaagcaaaaccaccgaaagttgatggagctgagttttggaaatctagtcctagtattctggccgttcagagatctgcaatcctcaagaagcagcaacagcagcagcagcaacaacaacatcaagcctcatctaatagcggatcagaagaggattcctctagcagtgaagattccgatgactcatcaagtgaggtcaaaaggaaaaagcataaagatgaagattggcaaatgtctgggtcaggatctccatctcagtctggttcagattcagaatctgaagaagagagagagaaaagcagttgtgatgaaacagaatctgattatgagccaaaaaacaaagtcaaaagcagaaaacctcaaaatagatctaagtcaaaaaatggaaagaagattcttggacaaaaaaagagacagattgattcatctgaggaggatgatgatgaagaagattatgataatgataaaagaagttctcgtcgccaagcaactgttaatgttagctataaggaggatgaagaaatgaaaacagattctgatgacctactggaagtctgtggagaggatgttcctcaacctgaggaagaggaatttgaaaccatagaaagatttatggattgtcggattgggagaaaaggagctactggtgctactacaaccatctatgcagttgaagcagatggtgacccaaatgcaggctttgaaaaaaacaaagaaccaggagagattcagtatttaattaaatggaaaggatggtcccatatccacaacacttgggagacagaagaaaccctcaagcagcagaatgttagaggaatgaaaaaattggataattataagaaaaaagatcaggaaacaaaaagatggttgaaaaatgcctctccagaagatgtggaatattataattgccagcaagaacttacagatgatctacataaacagtatcaaatagtggaacgtataattgctcattccaatcaaaagtcagcagctggttatcctgattattactgcaaatggcagggccttccatactcagagtgcagctgggaagatggagctctcatttccaaaaagtttcaagcatgcattgatgagtattttagcaggaaccaatcaaaaaccactccttttaaagattgcaaagtattaaaacaaaggccaaggtttgtagccctgaagaagcagccatcctatattggaggacatgagggcttagaattaagagattatcaactgaatggtttaaattggcttgctcattcttggtgcaaaggaaatagttgcatactcgctgatgaaatgggccttggaaaaacaatacagacgatctcatttctgaattatttgtttcatgaacatcaattatatggaccttttttattggtagtaccgctctccactcttacttcctggcaaagggaaattcagacttgggcttctcaaatgaatgctgtggtttatttaggtgacattaacagcagaaacatgataagaactcatgaatggacgcatcatcagaccaaacggttaaaatttaatatattgttaacaacttatgaaattttattaaaagataaggcattccttggaggtctaaattgggcatttataggtgttgatgaagcacaccgattaaagaatgatgactcccttctgtataaaactttaatagattttaaatccaatcatcgtctccttatcactggaactcctctacagaattccctcaaagagctctggtctttgctacatttcattatgccagaaaagttttcttcctgggaagattttgaagaagaacatggcaaagggagagaatatggttatgcaagccttcacaaggagcttgagccatttctgttacgccgagttaagaaagatgtggaaaaatctcttcctgccaaggttgagcagattttaagaatggaaatgagtgctttacagaaacaatattacaaatggattttaactaggaattacaaagccctcagcaaaggttccaagggcagtacctcaggctttttgaacattatgatggagctaaagaaatgttgtaaccattgctacctcattaaaccaccagataataatgaattctataataaacaggaggccttacaacacttaattcgtagtagcggaaaattgattcttcttgacaagctattaattcgcctaagagaacgaggcaatcgagttcttattttttcacaaatggtgcggatgttagatatacttgcagaatatttgaaatatcgtcaattcccctttcaaagattagatggatcaataaaaggagaactgaggaaacaagctctagatcattttaatgctgagggatcagaggatttttgctttttgctgtccacaagagctggaggtctagggattaatttagcctctgctgacactgttgttatatttgattccgattggaatccacagaatgatcttcaggcacaggctagagcccatcgaattggccaaaagaaacaggtgaatatttatcgtctagttacaaagggatcagttgaagaagatattcttgaaagggcgaaaaagaagatggttttagatcatcttgtaattcaaagaatggacacaactgggaagacagtactacatacaggttctgccccatcaagttctactcctttcaataaagaagagttatcagccattttaaagtttggtgctgaagaactttttaaggaacctgaaggagaagaacaagagccccaggaaatggatatagatgaaatcttgaagagagctgaaactcatgaaaatgaaccaggtcctttaactgtaggagatgaattgctttcccagttcaaggttgccaacttctcaaatatggatgaggatgacattgagttggaacctgaaagaaattcaaagaattgggaggaaattattccagaagatcaaagaagacgattagaagaagaagaaagacaaaaggaacttgaagaaatttatatgctcccaagaatgagaaattgtgcaaaacagattagtttcaatggaagtgaagggaggcgcagtagaagtaggagatactctggatctgatagtgattccatctcagaagggaaaaggccaaagaaacgtggaagaccacggactattcctcgggagaatattaaaggatttagtgatgcagaaattaggcggtttatcaagagctataagaaatttggtggtcctctggaaagattagatgcaattgctcgagatgctgagttagttgataagtcagaaacagaccttagacgactgggagaattggtacataatggttgcattaaagcattaaaggatagttcttcaggaacagaacgaacaggtggtagactcggaaaagtgaagggtccaacattccgaatatcaggagtacaggtgaatgccaaactagtcatctcccatgaagaagaattaatacctttgcacaaatccattccttctgatccagaagaaagaaagcagtatactatcccatgccacacaaaggcagctcattttgatatagactggggcaaagaagatgattccaatttgttaattggcatctatgaatatggatatggaagctgggaaatgattaaaatggatcctgacctcagtctaacacacaagattcttccagatgatcccgataaaaaaccacaagcaaaacagttgcagacccgtgcagactacctcatcaaattacttagtagagatcttgcaaaaaaagaagctctttctggtgcgggaagttcaaagaggagaaaagcaagagctaagaagaataaagcaatgaagtctataaaagtgaaagaggaaataaagagtgattcttctcctctgccttcagagaagtctgatgaagatgatgataaagatgagatcagttctgtgaaacatccaaataaaaaaattaaaacagaaagagacagtgaagaaaaacctgagccagatgtttatataaagaaggaaccagaagaaaagagggaagcaaaagaaaaggagaataaaaaagaacttaaaagggagataaaagaaaaagaggataagaaagatataaaggaaaaagattttaaagaaaaaagagaaaacaaagtaaaagaagctatacagaaagaaaaagacataaaggaagaaaagttgagtgaatccaagtctgatggtagggaaagatccaagaaatcttcagtgtcagatgctccagttcatatcacggcaagtggtgaaccagttcccatttctgaagaatctgaagagctggatcagaagacattcagcatttgtaaagaaagaatgaggcctgttaaagcagctttgaaacaacttgataggcctgagaaaggcctttcagaaagagaacaactagagcatactagacaatgtttaataaaaattggagaccatatcacagaatgtctaaaagagtatacaaatcctgaacaaattaagcaatggagaaaaaacctgtggatttttgtatctaagtttactgaatttgatgcaagaaaattacataaattatataagcatgctattaaaaaacggcaggagtctcagcaaaacagtgatcaaaacagcaacttgaatcctcacgtgattagaaatccagatgtggaaagattaaaagagaatacaaatcacgatgatagcagcagggacagttattcctctgatagacacttaactcagtaccatgatcatcataaagaccgacatcagggagattcttacaaaaaaagtgattccaggaaaagaccctattcttcttttagtaatggtaaagaccatcgtgattgggatcactacaagcaagacagcagatattacagtgacagagagaaacacagaaaactgtgatcatgtttcaggaaggaatgaaagagagttctttcttaataaagaaaaacactcaaggactttgttcatttccaaagctacttgtttacattgtacactgcgaccaccttgccgcttttcatcacaagcttgaatatttaaattctgtacttatatctgtaaaatagccaggaatttcctgtttgtgatctattatgcctttttacaaaaaaaatggctgtaaattattgtaaatattaaaggaactttccttacttccttccctttctcaggctttttttgactgttcctttccctaccaactcaggccttcttattaaaaaaaaaaaaatcagtgtaataacactttttaatgatttgtcttgatggaatcattgtttagaatgtaaaaatggggaaaggggccacttaattccattagtcctctttttatactgaatattttattagatacatgttattcccttttttttccttttttagtcaatattgtgtttgtagttttaaaaaatggcgagatatgtaaaatctaaactgcatgctctggaaacacttttttcagatgcatctggtttaaaagggtaggtgtataaacacttttcagaatccaaaacggccaaaagttattgtaaatccgtttgttttcccgttttatgtgggcaataatgtcaaatgtgctatgcagccaggttaacattttagataaacttgattgacttttaatataaactgttacaatgcacactgattgtatataaaaacgttatatatgacaaattaaatttaagaaaaaggatatgtgggctcctgtaattttctgctgcattcttactccctcaagcacttaccaccaccaccaccgccccctacccccgtttttaagtaacattttgctgccagaaaaagtattttggtaagcagttgaatatttgtaatgtgtagcattacaactaaatctgttttggagactatgaatattcctatgaagtaaaacttaggtcatagacatttttgttggccccttttggcttcctacagatattattatgggatgctttatatttattcacagat

SEQ ID NO: 447044 - DNA, 419 bp, Homo sapiens
atgaatggacgcatcatcagaccaaacggttaaaatttaatatattgttaacaacttatgaaattttattaaaagataaggtatgtatttatttctcacgtgttttggtctcttgtatatcagttttttctttatcatatgctgtggacaagatgagagaatagcctaaatcgtgagtcagcaagctatagcctgtggtcttatttttttaatggtgcttgaactaagaatggtttttacctttttgaaaggttacatttaaagggtcttagaaagaatatgtaacagagaccatatatttatctgcaaagtctgaaatatttactatctggctcttcttagaaaaagcttgccaactcaatcgaatgaaaccagtttgttatagtgtgtattgatttgtaagctctttaaagaagagg

SEQ ID NO: 447045 - DNA, 177 bp, Homo sapiens
cagttgcttggtgttttgtagaattatgttttatacttttaaaaatactggtttttttaaaaaaaatcaaggtggtagactcggaaaagtgaagggtccaacattccgaatatcaggagtacaggtgaatgccaaactagtcatctcccatgaagaagaattaatacctttgcacaa

SEQ ID NO: 447046 - DNA, 621 bp, Homo sapiens
tactctgaaatattttactatcttttaatagtctatatttaagactccttagaatagtgtgctacaatataaaaaataaccatttttgtagaagctaagtaaaatccaaaacttttacttactcaaagactgattttaaatgataacagaaaggcttgctctcctgaagaaaatctaaaggggaaagaaccctgatgtataagatttgtgaagtgagatttaattgcttattttgctatcaaacagtgttataatattatactcatgtaaatatcattgaaggaggtagaccttgttgaatttaggtttttaatacatgtgtttatattcttgttttctcattttaaagtgtaaagaaagaatgaggcctgttaaagcagctttgaaacaacttgataggcctgagaaaggcctttcagaaagagaacaactagagcatactagacaatgtttaataaaaattggagaccatatcacagaatgtctaaaagagtatacaaatcctgaacaaattaagcaatggagaaagtaagtgatacacttttcaggaagtgttaaatttatattatataactgtctttttttttttttgttttctttcctgattctgaagtttaggta

SEQ ID NO: 447047 - DNA, 357 bp, Homo sapiens
gtttgaaattgtttattttcaaattatagccagtcggatgatgattctgggtcagcttcaggctctggatctggttcgagttctggaagcagtagtgatggaagcagtagccagtcaggtagcagtgactctgactccggatctgaatcaggcagtcagtcagagtctgagtcagacacttcccgagaaaacaaagttcaagcaaaaccaccgaaagttgatggagctgaggtaatcaataaaatacccaatgaaaggtagattgcttgtattactttgggaaaatttagaggattggtttataccattcttaatctagcttttagagaagacaacattttaaattaaaatttactt

SEQ ID NO: 447048 - DNA, 5943 bp, Homo sapiens
tctttagagcaaaaggtgaatcaaaggagagtcccagaaaacctgtgactgttgaagaaaattcatctgtgaatttttatattcaaggagtcagtatttatattcatcttttaaactgggaagatttatattttactttaaaacttcttgataataatttacaatgaatggacacagtgatgaagaaagtgttagaaacagtagtggagaatcaagccagtcggatgatgattctgggtcagcttcaggctctggatctggttcgagttctggaagcagtagtgatggaagcagtagccagtcaggtagcagtgactctgactccggatctgaatcaggcagtcagtcagagtctgagtcagacacttcccgagaaaacaaagttcaagcaaaaccaccgaaagttgatggagctgagttttggaaatctagtcctagtattctggccgttcagagatctgcaatcctcaagaagcagcaacagcagcagcagcaacaacaacatcaagcctcatctaatagcggatcagaagaggattcctctagcagtgaagattccgatgactcatcaagtgaggtcaaaaggaaaaagcataaagatgaagattggcaaatgtctgggtcaggatctccatctcagtctggttcagattcagaatctgaagaagagagagagaaaagcagttgtgatgaaacagaatctgattatgagccaaaaaacaaagtcaaaagcagaaaacctcaaaatagatctaagtcaaaaaatggaaagaagattcttggacaaaaaaagagacagattgattcatctgaggaggatgatgatgaagaagattatgataatgataaaagaagttctcgtcgccaagcaactgttaatgttagctataaggaggatgaagaaatgaaaacagattctgatgacctactggaagtctgtggagaggatgttcctcaacctgaggaagaggaatttgaaaccatagaaagatttatggattgtcggattgggagaaaaggagctactggtgctactacaaccatctatgcagttgaagcagatggtgacccaaatgcaggctttgaaaaaaacaaagaaccaggagagattcagtatttaattaaatggaaaggatggtcccatatccacaacacttgggagacagaagaaaccctcaagcagcagaatgttagaggaatgaaaaaattggataattataagaaaaaagatcaggaaacaaaaagatggttgaaaaatgcctctccagaagatgtggaatattataattgccagcaagaacttacagatgatctacataaacagtatcaaatagtggaacgtataattgctcattccaatcaaaagtcagcagctggttatcctgattattactgcaaatggcagggccttccatactcagagtgcagctgggaagatggagctctcatttccaaaaagtttcaagcatgcattgatgagtattttagcaggaaccaatcaaaaaccactccttttaaagattgcaaagtattaaaacaaaggccaaggtttgtagccctgaagaagcagccatcctatattggaggacatgagggcttagaattaagagattatcaactgaatggtttaaattggcttgctcattcttggtgcaaaggaaatagttgcatactcgctgatgaaatgggccttggaaaaacaatacagacgatctcatttctgaattatttgtttcatgaacatcaattatatggaccttttttattggtagtaccgctctccactcttacttcctggcaaagggaaattcagacttgggcttctcaaatgaatgctgtggtttatttaggtgacattaacagcagaaacatgataagaactcatgaatggacgcatcatcagaccaaacggttaaaatttaatatattgttaacaacttatgaaattttattaaaagataaggcattccttggaggtctaaattgggcatttataggtgttgatgaagcacaccgattaaagaatgatgactcccttctgtataaaactttaatagattttaaatccaatcatcgtctccttatcactggaactcctctacagaattccctcaaagagctctggtctttgctacatttcattatgccagaaaagttttcttcctgggaagattttgaagaagaacatggcaaagggagagaatatggttatgcaagccttcacaaggagcttgagccatttctgttacgccgagttaagaaagatgtggaaaaatctcttcctgccaaggttgagcagattttaagaatggaaatgagtgctttacagaaacaatattacaaatggattttaactaggaattacaaagccctcagcaaaggttccaagggcagtacctcaggctttttgaacattatgatggagctaaagaaatgttgtaaccattgctacctcattaaaccaccagataataatgaattctataataaacaggaggccttacaacacttaattcgtagtagcggaaaattgattcttcttgacaagctattaattcgcctaagagaacgaggcaatcgagttcttattttttcacaaatggtgcggatgttagatatacttgcagaatatttgaaatatcgtcaattcccctttcaaagattagatggatcaataaaaggagaactgaggaaacaagctctagatcattttaatgctgagggatcagaggatttttgctttttgctgtccacaagagctggaggtctagggattaatttagcctctgctgacactgttgttatatttgattccgattggaatccacagaatgatcttcaggcacaggctagagcccatcgaattggccaaaagaaacaggtgaatatttatcgtctagttacaaagggatcagttgaagaagatattcttgaaagggcgaaaaagaagatggttttagatcatcttgtaattcaaagaatggacacaactgggaagacagtactacatacaggttctgccccatcaagttctactcctttcaataaagaagagttatcagccattttaaagtttggtgctgaagaactttttaaggaacctgaaggagaagaacaagagccccaggaaatggatatagatgaaatcttgaagagagctgaaactcatgaaaatgaaccaggtcctttaactgtaggagatgaattgctttcccagttcaaggttgccaacttctcaaatatggatgaggatgacattgagttggaacctgaaagaaattcaaagaattgggaggaaattattccagaagatcaaagaagacgattagaagaagaagaaagacaaaaggaacttgaagaaatttatatgctcccaagaatgagaaattgtgcaaaacagattagtttcaatggaagtgaagggaggcgcagtagaagtaggagatactctggatctgatagtgattccatctcagaagggaaaaggccaaagaaacgtggaagaccacggactattcctcgggagaatattaaaggatttagtgatgcagaaattaggcggtttatcaagagctataagaaatttggtggtcctctggaaagattagatgcaattgctcgagatgctgagttagttgataagtcagaaacagaccttagacgactgggagaattggtacataatggttgcattaaagcattaaaggatagttcttcaggaacagaacgaacaggtggtagactcggaaaagtgaagggtccaacattccgaatatcaggagtacaggtgaatgccaaactagtcatctcccatgaagaagaattaatacctttgcacaaatccattccttctgatccagaagaaagaaagcagtatactatcccatgccacacaaaggcagctcattttgatatagactggggcaaagaagatgattccaatttgttaattggcatctatgaatatggatatggaagctgggaaatgattaaaatggatcctgacctcagtctaacacacaagattcttccagatgatcccgataaaaaaccacaagcaaaacagttgcagacccgtgcagactacctcatcaaattacttagtagagatcttgcaaaaaaagaagctctttctggtgcgggaagttcaaagaggagaaaagcaagagctaagaagaataaagcaatgaagtctataaaagtgaaagaggaaataaagagtgattcttctcctctgccttcagagaagtctgatgaagatgatgataaattgagtgaatccaagtctgatggtagggaaagatccaagaaatcttcagtgtcagatgctccagttcatatcacggcaagtggtgaaccagttcccatttctgaagaatctgaagagctggatcagaagacattcagcatttgtaaagaaagaatgaggcctgttaaagcagctttgaaacaacttgataggcctgagaaaggcctttcagaaagagaacaactagagcatactagacaatgtttaataaaaattggagaccatatcacagaatgtctaaaagagtatacaaatcctgaacaaattaagcaatggagaaaaaacctgtggatttttgtatctaagtttactgaatttgatgcaagaaaattacataaattatataagcatgctattaaaaaacggcaggagtctcagcaaaacagtgatcaaaacagcaacttgaatcctcacgtgattagaaatccagatgtggaaagattaaaagagaatacaaatcacgatgatagcagcagggacagttattcctctgatagacacttaactcagtaccatgatcatcataaagaccgacatcagggagattcttacaaaaaaagtgattccaggaaaagaccctattcttcttttagtaatggtaaagaccatcgtgattgggatcactacaagcaagacagcagatattacagtgacagagagaaacacagaaaactggatgatcacaggagtagagatcacaggtcaaatttggaaggaagtttaaaagatagatctcattctgatcatcgttctcactcagatcatcggttacattcagaccaccggtcaagttctgaatatacgcaccataaatcttccagggattataggtatcactcagactggcaaatggaccacagagcttccagcagtggccctaggtcaccactagatcagagatctccttatggctccagatctccatttgaacattcagttgaacacaaaagtacaccggagcatacctggagtagtcggaaaacataacaaaaactgatacttcgtctttctggacttttcttttagccatatatcataaaccaacacagtaattgccttacatgacttgaaagatataaacagatcttctatcagtagcagtattgttacttctttccaggatgcaaggtctattatcccaacagaagagaaaatatttttatatttaaggattatgctgcactgtactacaaaattgtagtacttttttttgttttcttttttaaagaaatggaaaatgtttactattacagggacctcaacactgccctcccatacaggctggataaaactgtttttaagtcagtgattttagactgacctccatttaaattatgtttatatatgaactttactctgacctgtgatcatgtttcaggaaggaatgaaagagagttctttcttaataaagaaaaacactcaaggactttgttcatttccaaagctacttgtttacattgtacactgcgaccaccttgccgcttttcatcacaagcttgaatatttaaattctgtacttatatctgtaaaatagccaggaatttcctgtttgtgatctattatgcctttttacaaaaaaaatggctgtaaattattgtaaatattaaaggaactttccttacttccttcccttt

SEQ ID NO: 447049 - DNA, 6835 bp, Homo sapiens
tctttagagcaaaaggtgaatcaaaggagagtcccagaaaacctgtgactgttgaagaaaattcatctgtgaatttttatattcaaggagtcagtatttatattcatcttttaaactgggaagatttatattttactttaaaacttcttgataataatttacaatgaatggacacagtgatgaagaaagtgttagaaacagtagtggagaatcaagccagtcggatgatgattctgggtcagcttcaggctctggatctggttcgagttctggaagcagtagtgatggaagcagtagccagtcaggtagcagtgactctgactccggatctgaatcaggcagtcagtcagagtctgagtcagacacttcccgagaaaacaaagttcaagcaaaaccaccgaaagttgatggagctgagttttggaaatctagtcctagtattctggccgttcagagatctgcaatcctcaagaagcagcaacagcagcagcagcaacaacaacatcaagcctcatctaatagcggatcagaagaggattcctctagcagtgaagattccgatgactcatcaagtgaggtcaaaaggaaaaagcataaagatgaagattggcaaatgtctgggtcaggatctccatctcagtctggttcagattcagaatctgaagaagagagagagaaaagcagttgtgatgaaacagaatctgattatgagccaaaaaacaaagtcaaaagcagaaaacctcaaaatagatctaagtcaaaaaatggaaagaagattcttggacaaaaaaagagacagattgattcatctgaggaggatgatgatgaagaagattatgataatgataaaagaagttctcgtcgccaagcaactgttaatgttagctataaggaggatgaagaaatgaaaacagattctgatgacctactggaagtctgtggagaggatgttcctcaacctgaggaagaggaatttgaaaccatagaaagatttatggattgtcggattgggagaaaaggagctactggtgctactacaaccatctatgcagttgaagcagatggtgacccaaatgcaggctttgaaaaaaacaaagaaccaggagagattcagtatttaattaaatggaaaggatggtcccatatccacaacacttgggagacagaagaaaccctcaagcagcagaatgttagaggaatgaaaaaattggataattataagaaaaaagatcaggaaacaaaaagatggttgaaaaatgcctctccagaagatgtggaatattataattgccagcaagaacttacagatgatctacataaacagtatcaaatagtggaacgtataattgctcattccaatcaaaagtcagcagctggttatcctgattattactgcaaatggcagggccttccatactcagagtgcagctgggaagatggagctctcatttccaaaaagtttcaagcatgcattgatgagtattttagcaggaaccaatcaaaaaccactccttttaaagattgcaaagtattaaaacaaaggccaaggtttgtagccctgaagaagcagccatcctatattggaggacatgagggcttagaattaagagattatcaactgaatggtttaaattggcttgctcattcttggtgcaaaggaaatagttgcatactcgctgatgaaatgggccttggaaaaacaatacagacgatctcatttctgaattatttgtttcatgaacatcaattatatggaccttttttattggtagtaccgctctccactcttacttcctggcaaagggaaattcagacttgggcttctcaaatgaatgctgtggtttatttaggtgacattaacagcagaaacatgataagaactcatgaatggacgcatcatcagaccaaacggttaaaatttaatatattgttaacaacttatgaaattttattaaaagataaggcattccttggaggtctaaattgggcatttataggtgttgatgaagcacaccgattaaagaatgatgactcccttctgtataaaactttaatagattttaaatccaatcatcgtctccttatcactggaactcctctacagaattccctcaaagagctctggtctttgctacatttcattatgccagaaaagttttcttcctgggaagattttgaagaagaacatggcaaagggagagaatatggttatgcaagccttcacaaggagcttgagccatttctgttacgccgagttaagaaagatgtggaaaaatctcttcctgccaaggttgagcagattttaagaatggaaatgagtgctttacagaaacaatattacaaatggattttaactaggaattacaaagccctcagcaaaggttccaagggcagtacctcaggctttttgaacattatgatggagctaaagaaatgttgtaaccattgctacctcattaaaccaccagataataatgaattctataataaacaggaggccttacaacacttaattcgtagtagcggaaaattgattcttcttgacaagctattaattcgcctaagagaacgaggcaatcgagttcttattttttcacaaatggtgcggatgttagatatacttgcagaatatttgaaatatcgtcaattcccctttcaaagattagatggatcaataaaaggagaactgaggaaacaagctctagatcattttaatgctgagggatcagaggatttttgctttttgctgtccacaagagctggaggtctagggattaatttagcctctgctgacactgttgttatatttgattccgattggaatccacagaatgatcttcaggcacaggctagagcccatcgaattggccaaaagaaacaggtgaatatttatcgtctagttacaaagggatcagttgaagaagatattcttgaaagggcgaaaaagaagatggttttagatcatcttgtaattcaaagaatggacacaactgggaagacagtactacatacaggttctgccccatcaagttctactcctttcaataaagaagagttatcagccattttaaagtttggtgctgaagaactttttaaggaacctgaaggagaagaacaagagccccaggaaatggatatagatgaaatcttgaagagagctgaaactcatgaaaatgaaccaggtcctttaactgtaggagatgaattgctttcccagttcaaggttgccaacttctcaaatatggatgaggatgacattgagttggaacctgaaagaaattcaaagaattgggaggaaattattccagaagatcaaagaagacgattagaagaagaagaaagacaaaaggaacttgaagaaatttatatgctcccaagaatgagaaattgtgcaaaacagattagtttcaatggaagtgaagggaggcgcagtagaagtaggagatactctggatctgatagtgattccatctcagaagggaaaaggccaaagaaacgtggaagaccacggactattcctcgggagaatattaaaggatttagtgatgcagaaattaggcggtttatcaagagctataagaaatttggtggtcctctggaaagattagatgcaattgctcgagatgctgagttagttgataagtcagaaacagaccttagacgactgggagaattggtacataatggttgcattaaagcattaaaggatagttcttcaggaacagaacgaacaggtggtagactcggaaaagtgaagggtccaacattccgaatatcaggagtacaggtgaatgccaaactagtcatctcccatgaagaagaattaatacctttgcacaaatccattccttctgatccagaagaaagaaagcagtatactatcccatgccacacaaaggcagctcattttgatatagactggggcaaagaagatgattccaatttgttaattggcatctatgaatatggatatggaagctgggaaatgattaaaatggatcctgacctcagtctaacacacaagattcttccagatgatcccgataaaaaaccacaagcaaaacagttgcagacccgtgcagactacctcatcaaattacttagtagagatcttgcaaaaaaagaagctctttctggtgcgggaagttcaaagaggagaaaagcaagagctaagaagaataaagcaatgaagtctataaaagtgaaagaggaaataaagagtgattcttctcctctgccttcagagaagtctgatgaagatgatgataaagatgagatcagttctgtgaaacatccaaataaaaaaattaaaacagaaagagacagtgaagaaaaacctgagccagatgtttatataaagaaggaaccagaagaaaagagggaagcaaaagaaaaggagaataaaaaagaacttaaaagggagataaaagaaaaagaggataagaaagatataaaggaaaaagattttaaagaaaaaagagaaaacaaagtaaaagaagctatacagaaagaaaaagacataaaggaagaaaagttgagtgaatccaagtctgatggtagggaaagatccaagaaatcttcagtgtcagatgctccagttcatatcacggcaagtggtgaaccagttcccatttctgaagaatctgaagagctggatcagaagacattcagcattaaacctgtggatttttgtatctaagtttactgaatttgatgcaagaaaattacataaattatataagcatgctattaaaaaacggcaggagtctcagcaaaacagtgatcaaaacagcaacttgaatcctcacgtgattagaaatccagatgtggaaagattaaaagagaatacaaatcacgatgatagcagcagggacagttattcctctgatagacacttaactcagtaccatgatcatcataaagaccgacatcagggagattcttacaaaaaaagtgattccaggaaaagaccctattcttcttttagtaatggtaaagaccatcgtgattgggatcactacaagcaagacagcagatattacagtgacagagagaaacacagaaaactggatgatcacaggagtagagatcacaggtcaaatttggaaggaagtttaaaagatagatctcattctgatcatcgttctcactcagatcatcggttacattcagaccaccggtcaagttctgaatatacgcaccataaatcttccagggattataggtatcactcagactggcaaatggaccacagagcttccagcagtggccctaggtcaccactagatcagagatctccttatggctccagatctccatttgaacattcagttgaacacaaaagtacaccggagcatacctggagtagtcggaaaacataacaaaaactgatacttcgtctttctggacttttcttttagccatatatcataaaccaacacagtaattgccttacatgacttgaaagatataaacagatcttctatcagtagcagtattgttacttctttccaggatgcaaggtctattatcccaacagaagagaaaatatttttatatttaaggattatgctgcactgtactacaaaattgtagtacttttttttgttttcttttttaaagaaatggaaaatgtttactattacagggacctcaacactgccctcccatacaggctggataaaactgtttttaagtcagtgattttagactgacctccatttaaattatgtttatatatgaactttactctgacctgtgatcatgtttcaggaaggaatgaaagagagttctttcttaataaagaaaaacactcaaggactttgttcatttccaaagctacttgtttacattgtacactgcgaccaccttgccgcttttcatcacaagcttgaatatttaaattctgtacttatatctgtaaaatagccaggaatttcctgtttgtgatctattatgcctttttacaaaaaaaatggctgtaaattattgtaaatattaaaggaactttccttacttccttccctttctcaggctttttttgactgttcctttccctaccaactcaggccttcttattaaaaaaaaaaaaatcagtgtaataacactttttaatgatttgtcttgatggaatcattgtttagaatgtaaaaatggggaaaggggccacttaattccattagtcctctttttatactgaatattttattagatacatgttattcccttttttttccttttttagtcaatattgtgtttgtagttttaaaaaatggcgagatatgtaaaatctaaactgcatgctctggaaacacttttttcagatgcatctggtttaaaagggtaggtgtataaacacttttcagaatccaaaacggccaaaagttattgtaaatccgtttgttttcccgttttatgtgggcaataatgtcaaatgtgctatgcagccaggttaacattttagataaacttgattgacttttaatataaactgttacaatgcacactgattgtatataaaaacgttatatatgacaaattaaatttaagaaaaaggatatgtgggctcctgtaattttctgctgcattcttactccctcaagcacttaccaccaccaccaccgccccctacccccgtttttaagtaacattttgctgccagaaaaagtattttggtaagcagttgaatatttgtaatgtgtagcattacaactaaatctgttttggagactatgaatattcctatgaagtaaaacttaggtcatagacatttttgttggccccttttggcttcctacagatattattatgggatgctttatatttattcacagat

SEQ ID NO: 447050 - DNA, 4937 bp, Homo sapiens
cacatcaataattttcaaactttagtgtgcatcagaattaactggatggcctttgctaaacaccttcagtaggtctggggtaggactcaataatttgcttatctatgttctcaggtgacactaatgctgttctagtaaccacgctggacttaatcagtgtttttaaaactgaattgtaacctgttaatggatctgtgaatcagtttaatgggttgcaccaacattttgaaagtaaaatgataaaacatgagagtataacatagtatatcatgtcatgatatgaaactgtttcaggtgtttgcaaacagctatgtactcaatcacatacttttagaatggggactcaggcagaatagtatgacagcctatgctgtatttactcttgagggtgcagtcttagtgatttggagcacagactaaagacagaatgcctgagcattattttactgtctagtaagtactttctattatagttttagcaaaggacatgcttcacatttctacttaattttataattgattttaattgctttgtaatactttgattctgtttatgcagtattttaatgtgtttttttctagagattagatggatcaataaaaggagaactgaggaaacaagctctagatcattttaatgctgagggatcagaggatttttgctttttgctgtccacaagagctggaggtctagggattaatttagcctctgctgacactgttgttatatttgattccgattggaatccacagaatgatcttcaggcacaggctagagcccatcgaattggccaaaagaaacaggtgaatatttatcgtctagttacaaagggatcagttgaagaagatattcttgaaagggcgaaaaagaagatggttttagatcatcttgtaattcaaagaatggacacaactgggaagacagtactacatacaggttctgccccatcaagttctactcctttcaataaagaagagttatcagccattttaaagtttggtgctgaagaactttttaaggaacctgaaggagaagaacaagagccccaggaaatggatatagatgaaatcttgaagagagctgaaactcatgaaaatgaaccaggtcctttaactgtaggagatgaattgctttcccagttcaaggttgccaacttctcaaatatggatgaggatgacattgagttggaacctgaaagaaattcaaagaattgggaggaaattattccagaagatcaaagaagacgattagaagaagaagaaagacaaaaggaacttgaagaaatttatatgctcccaagaatgagaaattgtgcaaaacagattagtttcaatggaagtgaagggaggcgcagtagaagtaggagatactctggatctgatagtgattccatctcagaagggaaaaggccaaagaaacgtggaagaccacggactattcctcgggagaatattaaaggatttagtgatgcagaaattaggcggtttatcaagagctataagaaatttggtggtcctctggaaagattagatgcaattgctcgagatgctgagttagttgataagtcagaaacagaccttagacgactgggagaattggtacataatggttgcattaaagcattaaaggatagttcttcaggaacagaacgaacaggtggtagactcggaaaagtgaagggtccaacattccgaatatcaggagtacaggtgaatgccaaactagtcatctcccatgaagaagaattaatacctttgcacaaatccattccttctgatccagaagaaagaaagcagtatactatcccatgccacacaaaggcagctcattttgatatagactggggcaaagaagatgattccaatttgttaattggcatctatgaatatggatatggaagctgggaaatgattaaaatggatcctgacctcagtctaacacacaagattcttccagatgatcccgataaaaaaccacaagcaaaacagttgcagacccgtgcagactacctcatcaaattacttagtagagatcttgcaaaaaaagaagctctttctggtgcgggaagttcaaagaggagaaaagcaagagctaagaagaataaagcaatgaagtctataaaagtgaaagaggaaataaagagtgattcttctcctctgccttcagagaagtctgatgaagatgatgataaagatgagatcagttctgtgaaacatccaaataaaaaaattaaaacagaaagagacagtgaagaaaaacctgagccagatgtttatataaagaaggaaccagaagaaaagagggaagcaaaagaaaaggagaataaaaaagaacttaaaagggagataaaagaaaaagaggataagaaagatataaaggaaaaagattttaaagaaaaaagagaaaacaaagtaaaagaagctatacagaaagaaaaagacataaaggaagaaaagttgagtgaatccaagtctgatggtagggaaagatccaagaaatcttcagtgtcagatgctccagttcatatcacggcaagtggtgaaccagttcccatttctgaagaatctgaagagctggatcagaagacattcagcatttgtaaagaaagaatgaggcctgttaaagcagctttgaaacaacttgataggcctgagaaaggcctttcagaaagagaacaactagagcatactagacaatgtttaataaaaattggagaccatatcacagaatgtctaaaagagtatacaaatcctgaacaaattaagcaatggagaaaaaacctgtggatttttgtatctaagtttactgaatttgatgcaagaaaattacataaattatataagcatgctattaaaaaacggcaggagtctcagcaaaacagtgatcaaaacagcaacttgaatcctcacgtgattagaaatccagatgtggaaagattaaaagagaatacaaatcacgatgatagcagcagggacagttattcctctgatagacacttaactcagtaccatgatcatcataaagaccgacatcagggagattcttacaaaaaaagtgattccaggaaaagaccctattcttcttttagtaatggtaaagaccatcgtgattgggatcactacaagcaagacagcagatattacagtgacagagagaaacacagaaaactggatgatcacaggagtagagatcacaggtcaaatttggaaggaagtttaaaagatagatctcattctgatcatcgttctcactcagatcatcggttacattcagaccaccggtcaagttctgaatatacgcaccataaatcttccagggattataggtatcactcagactggcaaatggaccacagagcttccagcagtggccctaggtcaccactagatcagagatctccttatggctccagatctccatttgaacattcagttgaacacaaaagtacaccggagcatacctggagtagtcggaaaacataacaaaaactgatacttcgtctttctggacttttcttttagccatatatcataaaccaacacagtaattgccttacatgacttgaaagatataaacagatcttctatcagtagcagtattgttacttctttccaggatgcaaggtctattatcccaacagaagagaaaatatttttatatttaaggattatgctgcactgtactacaaaattgtagtacttttttttgttttcttttttaaagaaatggaaaatgtttactattacagggacctcaacactgccctcccatacaggctggataaaactgtttttaagtcagtgattttagactgacctccatttaaattatgtttatatatgaactttactctgacctgtgatcatgtttcaggaaggaatgaaagagagttctttcttaataaagaaaaacactcaaggactttgttcatttccaaagctacttgtttacattgtacactgcgaccaccttgccgcttttcatcacaagcttgaatatttaaattctgtacttatatctgtaaaatagccaggaatttcctgtttgtgatctattatgcctttttacaaaaaaaatggctgtaaattattgtaaatattaaaggaactttccttacttccttccctttctcaggctttttttgactgttcctttccctaccaactcaggccttcttattaaaaaaaaaaaaatcagtgtaataacactttttaatgatttgtcttgatggaatcattgtttagaatgtaaaaatggggaaaggggccacttaattccattagtcctctttttatactgaatattttattagatacatgttattcccttttttttccttttttagtcaatattgtgtttgtagttttaaaaaatggcgagatatgtaaaatctaaactgcatgctctggaaacacttttttcagatgcatctggtttaaaagggtaggtgtataaacacttttcagaatccaaaacggccaaaagttattgtaaatccgtttgttttcccgttttatgtgggcaataatgtcaaatgtgctatgcagccaggttaacattttagataaacttgattgacttttaatataaactgttacaatgcacactgattgtatataaaaacgttatatatgacaaattaaatttaagaaaaaggatatgtgggctcctgtaattttctgctgcattcttactccctcaagcacttaccaccaccaccaccgccccctacccccgtttttaagtaacattttgctgccagaaaaagtattttggtaagcagttgaatatttgtaatgtgtagcattacaactaaatctgttttggagactatgaatattcctatgaagtaaaacttaggtcatagacatttttgttggccccttttggcttcctacagatattattatgggatgctttatatttattcacagat

SEQ ID NO: 447051 - DNA, 5834 bp, Homo sapiens
cacatcaataattttcaaactttagtgtgcatcagaattaactggatggcctttgctaaacaccttcagtaggtctggggtaggactcaataatttgcttatctatgttctcaggtgacactaatgctgttctagtaaccacgctggacttaatcagtgtttttaaaactgaattgtaacctgttaatggatctgtgaatcagtttaatgggttgcaccaacattttgaaagtaaaatgataaaacatgagagtataacatagtatatcatgtcatgatatgaaactgtttcaggtgtttgcaaacagctatgtactcaatcacatacttttagaatggggactcaggcagaatagtatgacagcctatgctgtatttactcttgagggtgcagtcttagtgatttggagcacagactaaagacagaatgcctgagcattattttactgtctagtaagtactttctattatagttttagcaaaggacatgcttcacatttctacttaattttataattgattttaattgctttgtaatactttgattctgtttatgcagtattttaatgtgtttttttctagagattagatggatcaataaaaggagaactgaggaaacaagctctagatcattttaatgctgagggatcagaggtatgtattagtgcttttaaaattataaataattttgatttagtatcagtatattacattattatattcagacatttttaatcttcatatctagtttgataaaaaaagagtggtgttagccacctttgattagcaaatgaggttttaaagtcactattctagtttaaacctaaggattttatctttgagacagagtctcactctgtggcccaggtggaggttgcagtgagccaagataaaaagagtgagactccgtcaaaaaaaaaaaaaaaaaaaaaaaaatatatatatatatatatatatatatatttagtctccaatcccatctaggttgctgcaaatgccattatttcattcttctttatggctgagtagttttccactgtgtatgtataccacagtttatcttcttgttgattgatgggcgtttgggctggttccacattgttgcagttgcaaattgtgctgctgtaatcgtgtgtacaagtatctttttcatgtaatgacttttttgctctgggcagatactcagtagtgggattcctgggatcaagtggtagttctacttttagttcctttaaggaatttccacgctgttttccatagagttctttttttggtatatgccttttattttttaaggaaataaaatttacagttagagttgaagtgtcattcctttcctatcccgttttctttctttttcaccagaagtaaacactgtattgaatttggtgttaataacatatatatttgattttggagtctttttgttgattggtcttgctagatgttattagttttaaaaactgcctttctgtttaattagtaccatactgcttacgttcaaaaaatcaattgaaaaatttttcattttgattattcaatttcttacaggatttttgctttttgctgtccacaagagctggaggtctagggattaatttagcctctgctgacactgttgttatatttgattccgattggaatccacagaatgatcttcaggcacaggctagagcccatcgaattggccaaaagaaacaggtgaatatttatcgtctagttacaaagggatcagttgaagaagatattcttgaaagggcgaaaaagaagatggttttagatcatcttgtaattcaaagaatggacacaactgggaagacagtactacatacaggttctgccccatcaagttctactcctttcaataaagaagagttatcagccattttaaagtttggtgctgaagaactttttaaggaacctgaaggagaagaacaagagccccaggaaatggatatagatgaaatcttgaagagagctgaaactcatgaaaatgaaccaggtcctttaactgtaggagatgaattgctttcccagttcaaggttgccaacttctcaaatatggatgaggatgacattgagttggaacctgaaagaaattcaaagaattgggaggaaattattccagaagatcaaagaagacgattagaagaagaagaaagacaaaaggaacttgaagaaatttatatgctcccaagaatgagaaattgtgcaaaacagattagtttcaatggaagtgaagggaggcgcagtagaagtaggagatactctggatctgatagtgattccatctcagaagggaaaaggccaaagaaacgtggaagaccacggactattcctcgggagaatattaaaggatttagtgatgcagaaattaggcggtttatcaagagctataagaaatttggtggtcctctggaaagattagatgcaattgctcgagatgctgagttagttgataagtcagaaacagaccttagacgactgggagaattggtacataatggttgcattaaagcattaaaggatagttcttcaggaacagaacgaacaggtggtagactcggaaaagtgaagggtccaacattccgaatatcaggagtacaggtgaatgccaaactagtcatctcccatgaagaagaattaatacctttgcacaaatccattccttctgatccagaagaaagaaagcagtatactatcccatgccacacaaaggcagctcattttgatatagactggggcaaagaagatgattccaatttgttaattggcatctatgaatatggatatggaagctgggaaatgattaaaatggatcctgacctcagtctaacacacaagattcttccagatgatcccgataaaaaaccacaagcaaaacagttgcagacccgtgcagactacctcatcaaattacttagtagagatcttgcaaaaaaagaagctctttctggtgcgggaagttcaaagaggagaaaagcaagagctaagaagaataaagcaatgaagtctataaaagtgaaagaggaaataaagagtgattcttctcctctgccttcagagaagtctgatgaagatgatgataaagatgagatcagttctgtgaaacatccaaataaaaaaattaaaacagaaagagacagtgaagaaaaacctgagccagatgtttatataaagaaggaaccagaagaaaagagggaagcaaaagaaaaggagaataaaaaagaacttaaaagggagataaaagaaaaagaggataagaaagatataaaggaaaaagattttaaagaaaaaagagaaaacaaagtaaaagaagctatacagaaagaaaaagacataaaggaagaaaagttgagtgaatccaagtctgatggtagggaaagatccaagaaatcttcagtgtcagatgctccagttcatatcacggcaagtggtgaaccagttcccatttctgaagaatctgaagagctggatcagaagacattcagcatttgtaaagaaagaatgaggcctgttaaagcagctttgaaacaacttgataggcctgagaaaggcctttcagaaagagaacaactagagcatactagacaatgtttaataaaaattggagaccatatcacagaatgtctaaaagagtatacaaatcctgaacaaattaagcaatggagaaaaaacctgtggatttttgtatctaagtttactgaatttgatgcaagaaaattacataaattatataagcatgctattaaaaaacggcaggagtctcagcaaaacagtgatcaaaacagcaacttgaatcctcacgtgattagaaatccagatgtggaaagattaaaagagaatacaaatcacgatgatagcagcagggacagttattcctctgatagacacttaactcagtaccatgatcatcataaagaccgacatcagggagattcttacaaaaaaagtgattccaggaaaagaccctattcttcttttagtaatggtaaagaccatcgtgattgggatcactacaagcaagacagcagatattacagtgacagagagaaacacagaaaactggatgatcacaggagtagagatcacaggtcaaatttggaaggaagtttaaaagatagatctcattctgatcatcgttctcactcagatcatcggttacattcagaccaccggtcaagttctgaatatacgcaccataaatcttccagggattataggtatcactcagactggcaaatggaccacagagcttccagcagtggccctaggtcaccactagatcagagatctccttatggctccagatctccatttgaacattcagttgaacacaaaagtacaccggagcatacctggagtagtcggaaaacataacaaaaactgatacttcgtctttctggacttttcttttagccatatatcataaaccaacacagtaattgccttacatgacttgaaagatataaacagatcttctatcagtagcagtattgttacttctttccaggatgcaaggtctattatcccaacagaagagaaaatatttttatatttaaggattatgctgcactgtactacaaaattgtagtacttttttttgttttcttttttaaagaaatggaaaatgtttactattacagggacctcaacactgccctcccatacaggctggataaaactgtttttaagtcagtgattttagactgacctccatttaaattatgtttatatatgaactttactctgacctgtgatcatgtttcaggaaggaatgaaagagagttctttcttaataaagaaaaacactcaaggactttgttcatttccaaagctacttgtttacattgtacactgcgaccaccttgccgcttttcatcacaagcttgaatatttaaattctgtacttatatctgtaaaatagccaggaatttcctgtttgtgatctattatgcctttttacaaaaaaaatggctgtaaattattgtaaatattaaaggaactttccttacttccttccctttctcaggctttttttgactgttcctttccctaccaactcaggccttcttattaaaaaaaaaaaaatcagtgtaataacactttttaatgatttgtcttgatggaatcattgtttagaatgtaaaaatggggaaaggggccacttaattccattagtcctctttttatactgaatattttattagatacatgttattcccttttttttccttttttagtcaatattgtgtttgtagttttaaaaaatggcgagatatgtaaaatctaaactgcatgctctggaaacacttttttcagatgcatctggtttaaaagggtaggtgtataaacacttttcagaatccaaaacggccaaaagttattgtaaatccgtttgttttcccgttttatgtgggcaataatgtcaaatgtgctatgcagccaggttaacattttagataaacttgattgacttttaatataaactgttacaatgcacactgattgtatataaaaacgttatatatgacaaattaaatttaagaaaaaggatatgtgggctcctgtaattttctgctgcattcttactccctcaagcacttaccaccaccaccaccgccccctacccccgtttttaagtaacattttgctgccagaaaaagtattttggtaagcagttgaatatttgtaatgtgtagcattacaactaaatctgttttggagactatgaatattcctatgaagtaaaacttaggtcatagacatttttgttggccccttttggcttcctacagatattattatgggatgctttatatttattcacagat

SEQ ID NO: 447052 - DNA, 2998 bp, Homo sapiens
ggcatagagcaaaggtccttccttttcaaacatttgccaatttgatgagcttctgtctcttttaattgtattatgaacttgaatgggactggcttactttagtttataggaaggtaaacattgcatgtatcattattagggggattctgggctctttcagaatccacatacatgcaatctgtagtcatatgaagaaaaattagtcgttgttaaaatttggttagtaatacattggccatacttgcactttccaggatgagatcagttctgtgaaacatccaaataaaaaaattaaaacagaaagagacagtgaagaaaaacctgagccagatgtttatataaagaaggaaccagaagaaaagagggaagcaaaagaaaaggagaataaaaaagaacttaaaagggagataaaagaaaaagaggataagaaagatataaaggaaaaagattttaaagaaaaaagagaaaacaaagtaaaagaagctatacagaaagaaaaagacataaaggaagaaaagttgagtgaatccaagtctgatggtagggaaagatccaagaaatcttcagtgtcagatgctccagttcatatcacggcaagtggtgaaccagttcccatttctgaagaatctgaagagctggatcagaagacattcagcatttgtaaagaaagaatgaggcctgttaaagcagctttgaaacaacttgataggcctgagaaaggcctttcagaaagagaacaactagagcatactagacaatgtttaataaaaattggagaccatatcacagaatgtctaaaagagtatacaaatcctgaacaaattaagcaatggagaaaaaacctgtggatttttgtatctaagtttactgaatttgatgcaagaaaattacataaattatataagcatgctattaaaaaacggcaggagtctcagcaaaacagtgatcaaaacagcaacttgaatcctcacgtgattagaaatccagatgtggaaagattaaaagagaatacaaatcacgatgatagcagcagggacagttattcctctgatagacacttaactcagtaccatgatcatcataaagaccgacatcagggagattcttacaaaaaaagtgattccaggaaaagaccctattcttcttttagtaatggtaaagaccatcgtgattgggatcactacaagcaagacagcagatattacagtgacagagagaaacacagaaaactggatgatcacaggagtagagatcacaggtcaaatttggaaggaagtttaaaagatagatctcattctgatcatcgttctcactcagatcatcggttacattcagaccaccggtcaagttctgaatatacgcaccataaatcttccagggattataggtatcactcagactggcaaatggaccacagagcttccagcagtggccctaggtcaccactagatcagagatctccttatggctccagatctccatttgaacattcagttgaacacaaaagtacaccggagcatacctggagtagtcggaaaacataacaaaaactgatacttcgtctttctggacttttcttttagccatatatcataaaccaacacagtaattgccttacatgacttgaaagatataaacagatcttctatcagtagcagtattgttacttctttccaggatgcaaggtctattatcccaacagaagagaaaatatttttatatttaaggattatgctgcactgtactacaaaattgtagtacttttttttgttttcttttttaaagaaatggaaaatgtttactattacagggacctcaacactgccctcccatacaggctggataaaactgtttttaagtcagtgattttagactgacctccatttaaattatgtttatatatgaactttactctgacctgtgatcatgtttcaggaaggaatgaaagagagttctttcttaataaagaaaaacactcaaggactttgttcatttccaaagctacttgtttacattgtacactgcgaccaccttgccgcttttcatcacaagcttgaatatttaaattctgtacttatatctgtaaaatagccaggaatttcctgtttgtgatctattatgcctttttacaaaaaaaatggctgtaaattattgtaaatattaaaggaactttccttacttccttccctttctcaggctttttttgactgttcctttccctaccaactcaggccttcttattaaaaaaaaaaaaatcagtgtaataacactttttaatgatttgtcttgatggaatcattgtttagaatgtaaaaatggggaaaggggccacttaattccattagtcctctttttatactgaatattttattagatacatgttattcccttttttttccttttttagtcaatattgtgtttgtagttttaaaaaatggcgagatatgtaaaatctaaactgcatgctctggaaacacttttttcagatgcatctggtttaaaagggtaggtgtataaacacttttcagaatccaaaacggccaaaagttattgtaaatccgtttgttttcccgttttatgtgggcaataatgtcaaatgtgctatgcagccaggttaacattttagataaacttgattgacttttaatataaactgttacaatgcacactgattgtatataaaaacgttatatatgacaaattaaatttaagaaaaaggatatgtgggctcctgtaattttctgctgcattcttactccctcaagcacttaccaccaccaccaccgccccctacccccgtttttaagtaacattttgctgccagaaaaagtattttggtaagcagttgaatatttgtaatgtgtagcattacaactaaatctgttttggagactatgaatattcctatgaagtaaaacttaggtcatagacatttttgttggccccttttggcttcctacagatattattatgggatgctttatatttattcacagat

SEQ ID NO: 447053 - DNA, 4498 bp, Homo sapiens
  misc_feature (1004)..(1004): n is a, c, g, or t
  misc_feature (1048)..(1048): n is a, c, g, or t
  misc_feature (1689)..(1689): n is a, c, g, or t
ttagttaaaagacatggcgctgttacttgtgagcctttacaagtagtgaactaggaagtttatctcaatttcagacattaattttcattattcatttccccttaggccattctctactttaacttttctcctttaatgcctaaaaacgattacaatgacttacccaataatttaaaataatagtaacgcatttctaaaacgatttaagtgtgtctttgttagcttctgaaagaagctagtgtgtgtttttcaaagttgtcatgttatatatgtggaccatttgttcaaccagaataaaaatggtctgaaacagaattattttgctgttggaaattactttattgtgcagaactgttaaaactatgtttttagtttaaattgctatttttaaaatgtgttgaaaaatatgcaagtagaatgtgagataatacttcactttaaaaatgaacaaattgagtaaaccatcctcagacttagtcctatgaaattttcaataactgaaatgcaaaaaggtggttgtttctgttgacattaggtttgtatgaagcaaatagaggtgggcaaaaaaaaatgagctccatctgagatagtaagataactttattcccatacaatacctgtgttttcattaccaaagtagcttgtgttttatattatcagatagaccttctagtaacagtatcaaattttttgcagataaggtaattccgatttaagtgacactttttttttttaaacttggcagtatttgactacagtcattccttatgagaaaaaaaacggaccaccgtctgttgaagatcttcaaatattaacaaaaagtgagcaaagacaaaatgaaactattacctgatttccttttgctgattggtaaacacctgactttagttggctgattttgttgttagtgttttgtcagtttaggatgtaaatgatgcatataattgtttatttttataagaatgaagccaaaaatggctgtgacattaaatacaacagtaacnctagtgttgatttgtactttttctgtttttcttaccttgtgaantatttatgagctaaaattttgggaaaaagcataacctaaatctccatcatctcttacatgtttaagaacatatccatttatcataaataaaattccttatggatcttatatatctatgattgtcagtaactgaataggaaagatttacggtaaacactttttatttcttatgaatgtagaacccgaggtagtagttataggtagaacataaattgacagtgatgttttaagaacatgcattcattcagcaaatatttagtgaaggcctactctgtaccaggccatgatctgggcacttgggatactttagtgaacaaagcagacaaagataatgcaccttcaaggggcttgccttaaaaaaaaaattgttagatttaaatatacatgatattgagtatctcttatgatggccgcaaatgagccttgaattctggttctatccctgttattttcagggatatccttggaagttacttactctcttttgcttacattgaaaaactaggataaaaatatttgttctatttacctcacagtaaatagattaatatatgtatgattttggctaagttactatcaattagccgttaaaatggagggattgaatttgctgatctgttaggtctttgttatggtaaatntttatgatacttgctaattaggggggaaccaaatgaaagagcatcacatggatgagtatggatgatgatacttattttggaaatttaagaggaatgggcaaggaaaacctaagagtagaagcaagtgtcttatttcttagctccctgcctgctaacttggagcttttattctttcctttggtgaataattctttaaaaattttatatttaaatatggataaatcaagtgatgccagccagtctgaaataaaaaatcaagagattaactgggtagctagccctcttattttcaggaagaacttaagttatatgtgtccaagatcacacagggggatggttagttacagagctggatctcttaattcccaggcaattatacttttaatgatgctggtttttggtatgtgattttatttagaagttagaaaaaattttaaacatgattggaagcagaaatactgaacatggtagccctctaaagaagggaacataaatattgctcataagccaggaattactggcaggcctcagcttctcagatcaagaacaaatacttcattggtcaaactaaagtcatcataattccagcatcgagatgtctttataggttgtcacagtttggaatctctggacatatttgggtccaaagctccttttctttccaaaagaagagccctgtggagacagtcacagtgtttatggatatatagtcttcctgataaaagctattaggggattttgggtgcaataataatagttaataaaaatttaaataatttgagtagtgttagttacagttaatacatagcatgtactatgtgccaggcactatgatatgacctttatatctgaattagtagcttagtcctcataacaaacctttgagattaaatctaattattattctcatttcacagatgaagagcttggtgcaaaagtggttaagtagcttgctcagcgtcacacaattaggaagtggcagagccagggtttaaacccaggaaggctgatttgacagttacactattttgccttgtcgtattggtggggaaaaacagtgaaatatttttaccaggatgctttggagaaaatttgagttggcaatctctgttaaagtataatatttgtgagtttatctcaacctgaatggtctagcttaaaaaagaaaaacgttatactaggtggctgctttttctattttagtttttacttagaagataaatttgtcaaattagaatgaggctaattctcccaggtttctccctagtgcagaggaggcaacagccaggcagatgcccgatgctgcttcatggaagtctgttcttcatttgggtcttttctttgaaagtttctaaggagtctgacaggatacgcttgttggagggtatagctgtccatttctttaagagtttctctagtttgcttgatctgcagcactgaggttttcttgctgcacagagttcattgaggtgcacattatagtaacccactttccggtattattacagagcgaaggctccttgtaaataacccagttcctctttttttgtctccactgtttggaaattttaaatcagggaagcaactctcaggtaagtgggatattcttaccgaaaataaattcttgtggacttactccactaaaataaattattgggcctttattgttgtatccccttatcaggaaaatcacctataatttgtatgagtcagttatatcctataattaaggaagattaaggccacaatgattgaaattaaataatatttttgatctaaatttttaattgttgtcttttttcccctcttctattttgcagttcttcgtgccatgaaggaggacagtgaaaaagttccgagcttgttaactgattatattctgaaagttctgtgtcctacatagagcagcaactttatctgcggtgggctccaagctagatttccgacagcattattctgagagctggctaccattacccttcttgctattggaaactcagcacatttgaacttgggtttgattcagtattaacagatcttgactacactaattctttatattatagaaccaacggaaatatgggcactattttgaattctagagatggtttttgttaaatctactaataaactgttctcttagtagattaagagagagtaatattaattgtgcatgtgcagttgtatttctcattaactgacagtatgcccatttgtttttatggctttcttatctaaactgcactgatgaactagattaaagccttgggagatttatactataaattcagtgatggcaagaaccaacactgtttttttgtgagaattgtcagtgtaactattacctaccagtattgttcagagagattgaaacagaataaacgggctgttcttgaagaagcaaaaccagaatatgcattactttggtttaatacttagtgctaacattgaaactgttggtggtgatggattttgtagcttgctgcttgtttcaccactggtcaaattttaaccattaaattgccattcacttttagaatcttgtatttaataagttttgattttcaaatgttctgcttcatgtgtctgtgaagaattgtacttttaaaagtgtgtgtcctctgaggtgcttgagaaagtgtacactgcagaactgcccattctcattactgtgtcctattttattcatgcctgtgtgtttttcttaagtatgaattctagatacagctacttatggattcatcaatatcatgagcacttttgctggttccagtcaaatcaatggcatttaataaattttttaagaagt

SEQ ID NO: 447054 - DNA, 2007 bp, Homo sapiens
ggccggcctgggcggggcgcgcgactgctccgggcggcgatggcggcggacggggactggcaggatttctatgagttccaggagccggcccggagcctcctggaccaggagaactgtaacgcgagccccgagcctggggcggaggcgggggccggggcgggtgggggcgccgacggtttcccggccctggcctgcagcttggaggagaagctgagcctgtgcttccgcccctcggatccgggcgccgagcccccgaggacggccgtgcggcccatcacggagcgcagcctcctgcagggggacgagatttggaatgccctgacagataattatgggaatgtgatgcctgtagactggaagtcatcgcatactaggaccttgcacttgcttactctgaacctctcagaaaaaggggtaagtgacagtttgctctttgatacatcagatgatgaagagctgagagaacagctggatatgcactcaatcatcgtctcctgtgttaatgatgaacccctcttcacggcagaccaggttattgaagaaattgaagaaatgatgcaggaatcaccggacccagaagatgatgaaacccctacacagtcagatcggctttcaatgctttcccaggaaattcaaactctcaagaggtctagtaccggcagttatgaagagagagtgaaaaggctctcagtgtctgagttaaatgaaatcctggaagaaattgagactgccattaaggagtactctgaggagctggtgcagcagttggctttacgagatgaactggagtttgaaaaggaagtgaaaaacagctttatttctgttcttattgaagtgcaaaacaaacagaaagagcacaaagaaacagcaaaaaagaaaaagaaactaaaaaatggcagctctcagaatgggaagaatgagagaagtcatatgcccggcacatatttgactacagtcattccttatgagaaaaaaaacggaccaccgtctgttgaagatcttcaaatattaacaaaaattcttcgtgccatgaaggaggacagtgaaaaagttccgagcttgttaactgattatattctgaaagttctgtgtcctacatagagcagcaactttatctgcggtgggctccaagctagatttccgacagcattattctgagagctggctaccattacccttcttgctattggaaactcagcacatttgaacttgggtttgattcagtattaacagatcttgactacactaattctttatattatagaaccaacggaaatatgggcactattttgaattctagagatggtttttgttaaatctactaataaactgttctcttagtagattaagagagagtaatattaattgtgcatgtgcagttgtatttctcattaactgacagtatgcccatttgtttttatggctttcttatctaaactgcactgatgaactagattaaagccttgggagatttatactataaattcagtgatggcaagaaccaacactgtttttttgtgagaattgtcagtgtaactattacctaccagtattgttcagagagattgaaacagaataaacgggctgttcttgaagaagcaaaaccagaatatgcattactttggtttaatacttagtgctaacattgaaactgttggtggtgatggattttgtagcttgctgcttgtttcaccactggtcaaattttaaccattaaattgccattcacttttagaatcttgtatttaataagttttgattttcaaatgttctgcttcatgtgtctgtgaagaattgtacttttaaaagtgtgtgtcctctgaggtgcttgagaaagtgtacactgcagaactgcccattctcattactgtgtcctattttattcatgcctgtgtgtttttcttaagtatgaattctagatacagctacttatggattcatcaatatcatgagcacttttgctggttccagtcaaatcaatggcatttaataaattttttaagaagt

SEQ ID NO: 447055 - DNA, 2853 bp, Homo sapiens
ggccggcctgggcggggcgcgcgactgctccgggcggcgatggcggcggacggggactggcaggatttctatgagttccaggagccggcccggagcctcctggaccaggagaactgtaacgcgagccccgagcctggggcggaggcgggggccggggcgggtgggggcgccgacggtttcccggccctggcctgcagcttggaggagaagctgagcctgtgcttccgcccctcggatccgggcgccgagcccccgaggacggccgtgcggcccatcacggagcgcagcctcctgcagggggacgagatttggaatgccctgacagataattatgggaatgtgatgcctgtagactggaagtcatcgcatactaggaccttgcacttgcttactctgaacctctcagaaaaaggggtaagtgacagtttgctctttgatacatcagatgatgaagagctgagagaacagctggatatgcactcaatcatcgtctcctgtgttaatgatgaacccctcttcacggcagaccaggttattgaagaaattgaagaaatgatgcaggaatcaccggacccagaagatgatgaaacccctacacagtcagatcggctttcaatgctttcccaggaaattcaaactctcaagaggtctagtaccggcagttatgaagagagagtgaaaaggctctcagtgtctgagttaaatgaaatcctggaagaaattgagactgccattaaggagtactctgaggagctggtgcagcagttggctttacgagatgaactggagtttgaaaaggaagtgaaaaacagctttatttctgttcttattgaagtgcaaaacaaacagaaagagcacaaagaaacagcaaaaaagaaaaagaaactaaaaaatggcagctctcagaatgggaagaatgagagaagtcatatgcccggcacatatttgactacagtcattccttatgagaaaaaaaacggaccaccgtctgttgaagatcttcaaatattaacaaaaattcttcgtgccatgaaggaggacagtgaaaaagttccgagcttgttaactgattatattctgaaagttctgtgtcctacatagagcagcaactttatctgcggtgggctccaagctagatttccgacagcattattctgagagctggctaccattacccttcttgctattggaaactcagcacatttgaacttgggtttgattcagtattaacagatcttgactacactaattctttatattatagaaccaacggaaatatgggcactattttgaattctagagatggtttttgttaaatctactaataaactgttctcttagtagattaagagagagtaatattaattgtgcatgtgcagttgtatttctcattaactgacagtatgcccatttgtttttatggctttcttatctaaactgcactgatgaactagattaaagccttgggagatttatactataaattcagtgatggcaagaaccaacactgtttttttgtgagaattgtcagtgtaactattacctaccagtattgttcagagagattgaaacagaataaacgggctgttcttgaagaagcaaaaccagaatatgcattactttggtttaatacttagtgctaacattgaaactgttggtggtgatggattttgtagcttgctgcttgtttcaccactggtcaaattttaaccattaaattgccattcacttttagaatcttgtatttaataagttttgattttcaaatgttctgcttcatgtgtctgtgaagaattgtacttttaaaagtgtgtgtcctctgaggtgcttgagaaagtgtacactgcagaactgcccattctcattactgtgtcctattttattcatgcctgtgtgtttttcttaagtatgaattctagatacagctacttatggattcatcaatatcatgagcacttttgctggttccagtcaaatcaatggcatttaataaattttttaagaagtaaaaatacatgtttgagagccttatatttgggagttttgtgttgtattttttttttccttacagtgctagattctttcccttaattccacacagaacccatcgctacaatatgtgagcagatgaaaccctgattagtcccagaatgctacgaaggggaagaggaggacgtttattagagtatgctgagctgctgtggaatgacagaagtaagtcctgctctttttctggggctgtgagacatttcaaaaacagccatgcagacccctcccatagacgacatgaatgaattaagagtctatataggacctgctacaggcggctttcacaattccacttaaacacctgtgagcaaaacaaacagggctaacatattcctcactccactcagcaactgagacaccatgactgcaaaggcaggggcgcggtttgaagtttaatgcctgcttggcatttcagccatcatctctaggggtatgagaaactcgagatggtttccttgttttattaatgttcttatttggaacttactggccctttccccagatacatgtacttacacagtaatattaataatttaaattaatttgaatttgtaaaaatgacgccttgtactgaagaaatgtagctttaaagggtatatgatatagtagaaagtccttagggggatatatttttttaaaggagattcaacattggtctgtttatagctcattcttaaattgatgcttctaaaatgtatgaaaatatacctatttattttttcctgtcagctcaaaaagtctctttgcagttaggcttcccctgatcgtgctcggtaaagtctttcttcttcagcatcgaaccac

SEQ ID NO: 447056 - DNA, 2522 bp, Homo sapiens
  misc_feature (598)..(598): n is a, c, g, or t
tacctagggaggttaaggggcctggccaatgactcgttatttgaagaaggatggagatgagagtttgtttccctagtctcagtcaaatgcccttaccatttgaccctcttgcctccctgtaatgctgttgggtaataaggtcaggtaactgcattggatagagcctgggtgtgttttattgtgaactccctctctttctcctttttgttgtatctgccttagtgcttagcttctttattacaaattagatattaaatcctgttctcacattgagagcgaattctttctccagaaaggataacaaaccttttgtttgagagagatttttcactttttgaaatggtctgtttgtttgaagttacagaagaaaaataagtgtaatgcacagttgtatttattattcatgtgaccctggaaacatttcttccccgccctgtgtttcagtttcttcatctgtaaaatgaggttaataatggttcccccttctaatgttgtttttgaagattacatgagttaatacatgtaaattgcttagaacagtgcctagcactaatataatggaagtgttgcctactgcctattggcagttttctgtacngcttcaccttcccttaggacttcttgtcagcccagttatgtgatttttcacctcgtttttgtttaggagactctactttgttgatgtttttctgagaaacaatgtgctgtctgtttttctctgtttcctttgacatttgctgttcatctttcactgaatatttgtttaagaaagacatacagaatgttaattttcattgattgtagctttcttctttttaaggatttggaatgccctgacagataattatgggaatgtgatgcctgtagactggaagtcatcgcatactaggaccttgcacttgcttactctgaacctctcagaaaaaggggtaagtgacagtttgctctttgatacatcagatgatgaagagctgagagaacagctggatatgcactcaatcatcgtctcctgtgttaatgatgaacccctcttcacggcagaccaggttattgaagaaattgaagaaatgatgcaggaatcaccggacccagaagatgatgaaacccctacacagtcagatcggctttcaatgctttcccaggaaattcaaactctcaagaggtctagtaccggcagttatgaagagagagtgaaaaggctctcagtgtctgagttaaatgaaatcctggaagaaattgagactgccattaaggagtactctgaggagctggtgcagcagttggctttacgagatgaactggagtttgaaaaggaagtgaaaaacagctttatttctgttcttattgaagtgcaaaacaaacagaaagagcacaaagaaacagcaaaaaagaaaaagaaactaaaaaatggcagctctcagaatgggaagaatgagagaagtcatatgcccggcacatatttgactacagtcattccttatgagaaaaaaaacggaccaccgtctgttgaagatcttcaaatattaacaaaaattcttcgtgccatgaaggaggacagtgaaaaagttccgagcttgttaactgattatattctgaaagttctgtgtcctacatagagcagcaactttatctgcggtgggctccaagctagatttccgacagcattattctgagagctggctaccattacccttcttgctattggaaactcagcacatttgaacttgggtttgattcagtattaacagatcttgactacactaattctttatattatagaaccaacggaaatatgggcactattttgaattctagagatggtttttgttaaatctactaataaactgttctcttagtagattaagagagagtaatattaattgtgcatgtgcagttgtatttctcattaactgacagtatgcccatttgtttttatggctttcttatctaaactgcactgatgaactagattaaagccttgggagatttatactataaattcagtgatggcaagaaccaacactgtttttttgtgagaattgtcagtgtaactattacctaccagtattgttcagagagattgaaacagaataaacgggctgttcttgaagaagcaaaaccagaatatgcattactttggtttaatacttagtgctaacattgaaactgttggtggtgatggattttgtagcttgctgcttgtttcaccactggtcaaattttaaccattaaattgccattcacttttagaatcttgtatttaataagttttgattttcaaatgttctgcttcatgtgtctgtgaagaattgtacttttaaaagtgtgtgtcctctgaggtgcttgagaaagtgtacactgcagaactgcccattctcattactgtgtcctattttattcatgcctgtgtgtttttcttaagtatgaattctagatacagctacttatggattcatcaatatcatgagcacttttgctggttccagtcaaatcaatggcatttaataaattttttaagaagt

SEQ ID NO: 447057 - DNA, 1931 bp, Homo sapiens
ggccggcctgggcggggcgcgcgactgctccgggcggcgatggcggcggacggggactggcaggatttctatgagttccaggagccggcccggagcctcctggaccaggagaactgtaacgcgagccccgagcctggggcggaggcgggggccggggcgggtgggggcgccgacggtttcccggccctggcctgcagcttggaggagaagctgagcctgtgcttccgcccctcggatccgggcgccgagcccccgaggacggccgtgcggcccatcacggagcgcagcctcctgcagggggacgagatttggaatgccctgacagataattatgggaatgtgatgcctgtagactggaagtcatcgcatactaggaccttgcacttgcttactctgaacctctcagaaaaaggggtaagtgacagtttgctctttgatacatcagatgatgaagagctgagagaacagctggatatgcactcaatcatcgtctcctgtgttaatgatgaacccctcttcacggcagaccaggttattgaagaaattgaagaaatgatgcaggaatcaccggacccagaagatgatgaaacccctacacagtcagatcggctttcaatgctttcccaggaaattcaaactctcaagaggtctagtaccggcagttatgaagagagagtgaaaaggctctcagtgtctgagttaaatgaaatcctggaagaaattgagactgccattaaggagtactctgaggagctggtgcagcagttggctttacgagatgaactggagtttgaaaaggaagtgaaaaacagctttatttctgttcttattgaagtgcaaaacaaacagaaagagcacaaagaaacagcaaaaaagaaaaagaaactaaaaaatggcagctctcagaatgggaagaatgagagaagtcatatgcccggcacattcttcgtgccatgaaggaggacagtgaaaaagttccgagcttgttaactgattatattctgaaagttctgtgtcctacatagagcagcaactttatctgcggtgggctccaagctagatttccgacagcattattctgagagctggctaccattacccttcttgctattggaaactcagcacatttgaacttgggtttgattcagtattaacagatcttgactacactaattctttatattatagaaccaacggaaatatgggcactattttgaattctagagatggtttttgttaaatctactaataaactgttctcttagtagattaagagagagtaatattaattgtgcatgtgcagttgtatttctcattaactgacagtatgcccatttgtttttatggctttcttatctaaactgcactgatgaactagattaaagccttgggagatttatactataaattcagtgatggcaagaaccaacactgtttttttgtgagaattgtcagtgtaactattacctaccagtattgttcagagagattgaaacagaataaacgggctgttcttgaagaagcaaaaccagaatatgcattactttggtttaatacttagtgctaacattgaaactgttggtggtgatggattttgtagcttgctgcttgtttcaccactggtcaaattttaaccattaaattgccattcacttttagaatcttgtatttaataagttttgattttcaaatgttctgcttcatgtgtctgtgaagaattgtacttttaaaagtgtgtgtcctctgaggtgcttgagaaagtgtacactgcagaactgcccattctcattactgtgtcctattttattcatgcctgtgtgtttttcttaagtatgaattctagatacagctacttatggattcatcaatatcatgagcacttttgctggttccagtcaaatcaatggcatttaataaattttttaagaagt

SEQ ID NO: 447058 - DNA, 1637 bp, Homo sapiens
gagtgtggtggaattcgcagagcagggtggaagatggtgaggaggtaagtgacagtttgctctttgatacatcagatgatgaagagctgagagaacagctggatatgcactcaatcatcgtctcctgtgttaatgatgaacccctcttcacggcagaccaggttattgaagaaattgaagaaatgatgcaggaatcaccggacccagaagatgatgaaacccctacacagtcagatcggctttcaatgctttcccaggaaattcaaactctcaagaggtctagtaccggcagttatgaagagagagtgaaaaggctctcagtgtctgagttaaatgaaatcctggaagaaattgagactgccattaaggagtactctgaggagctggtgcagcagttggctttacgagatgaactggagtttgaaaaggaagtgaaaaacagctttatttctgttcttattgaagtgcaaaacaaacagaaagagcacaaagaaacagcaaaaaagaaaaagaaactaaaaaatggcagctctcagaatgggaagaatgagagaagtcatatgcccggcacatatttgactacagtcattccttatgagaaaaaaaacggaccaccgtctgttgaagatcttcaaatattaacaaaaattcttcgtgccatgaaggaggacagtgaaaaagttccgagcttgttaactgattatattctgaaagttctgtgtcctacatagagcagcaactttatctgcggtgggctccaagctagatttccgacagcattattctgagagctggctaccattacccttcttgctattggaaactcagcacatttgaacttgggtttgattcagtattaacagatcttgactacactaattctttatattatagaaccaacggaaatatgggcactattttgaattctagagatggtttttgttaaatctactaataaactgttctcttagtagattaagagagagtaatattaattgtgcatgtgcagttgtatttctcattaactgacagtatgcccatttgtttttatggctttcttatctaaactgcactgatgaactagattaaagccttgggagatttatactataaattcagtgatggcaagaaccaacactgtttttttgtgagaattgtcagtgtaactattacctaccagtattgttcagagagattgaaacagaataaacgggctgttcttgaagaagcaaaaccagaatatgcattactttggtttaatacttagtgctaacattgaaactgttggtggtgatggattttgtagcttgctgcttgtttcaccactggtcaaattttaaccattaaattgccattcacttttagaatcttgtatttaataagttttgattttcaaatgttctgcttcatgtgtctgtgaagaattgtacttttaaaagtgtgtgtcctctgaggtgcttgagaaagtgtacactgcagaactgcccattctcattactgtgtcctattttattcatgcctgtgtgtttttcttaagtatgaattctagatacagctacttatggattcatcaatatcatgagcacttttgctggttccagtcaaatcaatggcatttaataaattttttaagaagt

SEQ ID NO: 447059 - DNA, 1898 bp, Homo sapiens
ggccggcctgggcggggcgcgcgactgctccgggcggcgatggcggcggacggggactggcaggatttctatgagttccaggagccggcccggagcctcctggaccaggagaactgtaacgcgagccccgagcctggggcggaggcgggggccggggcgggtgggggcgccgacggtttcccggccctggcctgcagcttggaggagaagctgagcctgtgcttccgcccctcggatccgggcgccgagcccccgaggacggccgtgcggcccatcacggagcgcagcctcctgcagggggacgagtaagtgacagtttgctctttgatacatcagatgatgaagagctgagagaacagctggatatgcactcaatcatcgtctcctgtgttaatgatgaacccctcttcacggcagaccaggttattgaagaaattgaagaaatgatgcaggaatcaccggacccagaagatgatgaaacccctacacagtcagatcggctttcaatgctttcccaggaaattcaaactctcaagaggtctagtaccggcagttatgaagagagagtgaaaaggctctcagtgtctgagttaaatgaaatcctggaagaaattgagactgccattaaggagtactctgaggagctggtgcagcagttggctttacgagatgaactggagtttgaaaaggaagtgaaaaacagctttatttctgttcttattgaagtgcaaaacaaacagaaagagcacaaagaaacagcaaaaaagaaaaagaaactaaaaaatggcagctctcagaatgggaagaatgagagaagtcatatgcccggcacatatttgactacagtcattccttatgagaaaaaaaacggaccaccgtctgttgaagatcttcaaatattaacaaaaattcttcgtgccatgaaggaggacagtgaaaaagttccgagcttgttaactgattatattctgaaagttctgtgtcctacatagagcagcaactttatctgcggtgggctccaagctagatttccgacagcattattctgagagctggctaccattacccttcttgctattggaaactcagcacatttgaacttgggtttgattcagtattaacagatcttgactacactaattctttatattatagaaccaacggaaatatgggcactattttgaattctagagatggtttttgttaaatctactaataaactgttctcttagtagattaagagagagtaatattaattgtgcatgtgcagttgtatttctcattaactgacagtatgcccatttgtttttatggctttcttatctaaactgcactgatgaactagattaaagccttgggagatttatactataaattcagtgatggcaagaaccaacactgtttttttgtgagaattgtcagtgtaactattacctaccagtattgttcagagagattgaaacagaataaacgggctgttcttgaagaagcaaaaccagaatatgcattactttggtttaatacttagtgctaacattgaaactgttggtggtgatggattttgtagcttgctgcttgtttcaccactggtcaaattttaaccattaaattgccattcacttttagaatcttgtatttaataagttttgattttcaaatgttctgcttcatgtgtctgtgaagaattgtacttttaaaagtgtgtgtcctctgaggtgcttgagaaagtgtacactgcagaactgcccattctcattactgtgtcctattttattcatgcctgtgtgtttttcttaagtatgaattctagatacagctacttatggattcatcaatatcatgagcacttttgctggttccagtcaaatcaatggcatttaataaattttttaagaagt

SEQ ID NO: 447060 - DNA, 2021 bp, Homo sapiens
ggccggcctgggcggggcgcgcgactgctccgggcggcgatggcggcggacggggactggcaggatttctatgagttccaggagccggcccggagcctcctggaccaggagaactgtaacgcgagccccgagcctggggcggaggcgggggccggggcgggtgggggcgccgacggtttcccggccctggcctgcagcttggaggagaagctgagcctgtgcttccgcccctcggatccgggcgccgagcccccgaggacggccgtgcggcccatcacggagcgcagcctcctgcagggggacgagatttggaatgccctgacagataattatgggaatgtgatgcctgtagactggaagtcatcgcatactaggaccttgcacttgcttactctgaacctctcagaaaaaggggtaagtgacagtttgctctttgatacatcagatgatgaagagctgagagaacagctggatatgcactcaatcatcgtctcctgtgttaatgatgaacccctcttcacggcagaccaggttattgaagaaattgaagaaatgatgcaggaatcaccggacccagaagatgatgaaacccctacacagtcagatcggctttcaatgctttcccaggaaattcaaactctcaagaggtctagtaccggcagttatgaagagagagtgaaaaggctctcagtgtctgagttaaatgaaatcctggaagaaattgagactgccattaaggagtactctgaggagctggtgcagcagttggctttacgagatgaactggagtttgaaaaggaagtgaaaaacagctttatttctgttcttattgaagtgcaaaacaaacagaaagagcacaaagaaacagcaaaaaagaaaaagaaactaaaaaatggcagctctcagaatgggaagaatgagagaagtcatatgcccggcacatatttgactacagtcattccttatgagaaaaaaaacggaccaccgtctgttgaagatcttcaaatattaacaaaaattcttcgtgccatgaaggaggacagtgaaaaagttccgagcttgttaactgattatattctgaaagttctgtgtcctacatagagcagcaactttatctgcggtgggctccaagctagatttccgacagcattattctgagagctggctaccattacccttcttgctattggaaactcagcacatttgaacttgggtttgattcagtattaacagatcttgactacactaattctttatattatagaaccaacggaaatatgggcactattttgaattctagagatggtttttgttaaatctactaataaactgttctcttagtagattaagagagagtaatattaattgtgcatgtgcagttgtatttctcattaactgacagtatgcccatttgtttttatggctttcttatctaaactgcactgatgaactagattaaagccttgggagatttatactataaattcagtgatggcaagaaccaacactgtttttttgtgagaattgtcagtgtaactattacctaccagtattgttcagagagattgaaacagaataaacgggctgttcttgaagaagcaaaaccagaatatgcattactttggtttaatacttagtgctaacattgaaactgttggtggtgatggattttgtagcttgctgcttgtttcaccactggtcaaattttaaccattaaattgccattcacttttagaatcttgtatttaataagttttgattttcaaatgttctgcttcatgtgtctgtgaagaattgtacttttaaaagtgtgtgtcctctgaggtgcttgagaaagtgtacactgcagaactgcccattctcattactgtgtcctattttattcatgcctgtgtgtttttcttaagaactcagctccttacatgggctttggtggggcacgtggggcagcacccgcaggtctaaatcggggtgggggtgttcggtccttgcgggcttcacgagatcgattcctgactacg

SEQ ID NO: 447061 - DNA, 1438 bp, Homo sapiens
tactcagatctgatctccagaagttgtagaattctgagaagatcacccacagtcaatttaattgcttggaatatgatttttgctctttggcattgattacataggagtgaaaaggctctcagtgtctgagttaaatgaaatcctggaagaaattgagactgccattaaggagtactctgaggagctggtgcagcagttggctttacgagatgaactggagtttgaaaaggaagtgaaaaacagctttatttctgttcttattgaagtgcaaaacaaacagaaagagcacaaagaaacagcaaaaaagaaaaagaaactaaaaaatggcagctctcagaatgggaagaatgagagaagtcatatgcccggcacatatttgactacagtcattccttatgagaaaaaaaacggaccaccgtctgttgaagatcttcaaatattaacaaaaattcttcgtgccatgaaggaggacagtgaaaaagttccgagcttgttaactgattatattctgaaagttctgtgtcctacatagagcagcaactttatctgcggtgggctccaagctagatttccgacagcattattctgagagctggctaccattacccttcttgctattggaaactcagcacatttgaacttgggtttgattcagtattaacagatcttgactacactaattctttatattatagaaccaacggaaatatgggcactattttgaattctagagatggtttttgttaaatctactaataaactgttctcttagtagattaagagagagtaatattaattgtgcatgtgcagttgtatttctcattaactgacagtatgcccatttgtttttatggctttcttatctaaactgcactgatgaactagattaaagccttgggagatttatactataaattcagtgatggcaagaaccaacactgtttttttgtgagaattgtcagtgtaactattacctaccagtattgttcagagagattgaaacagaataaacgggctgttcttgaagaagcaaaaccagaatatgcattactttggtttaatacttagtgctaacattgaaactgttggtggtgatggattttgtagcttgctgcttgtttcaccactggtcaaattttaaccattaaattgccattcacttttagaatcttgtatttaataagttttgattttcaaatgttctgcttcatgtgtctgtgaagaattgtacttttaaaagtgtgtgtcctctgaggtgcttgagaaagtgtacactgcagaactgcccattctcattactgtgtcctattttattcatgcctgtgtgtttttcttaagtatgaattctagatacagctacttatggattcatcaatatcatgagcacttttgctggttccagtcaaatcaatggcatttaataaattttttaagaagt

SEQ ID NO: 447062 - DNA, 1308 bp, Homo sapiens
cggagtggaaaagtctttggagaagtttttgggggcctggctggcacatgggatccactctgctctccaggaagcgtatgccatcttctagttcgcatttctgcaccaaggcagtggcaggtggcccgaagagtgagtgggaagcaataatcagctctccaacgcttcagcatggaagggatctcaaatgtcattcagaatggcctccgccacacctttggaaattcaggtggagagaaacagtatttgactacagtcattccttatgagaaaaaaaacggaccaccgtctgttgaagatcttcaaatattaacaaaaattcttcgtgccatgaaggaggacagtgaaaaagttccgagcttgttaactgattatattctgaaagttctgtgtcctacatagagcagcaactttatctgcggtgggctccaagctagatttccgacagcattattctgagagctggctaccattacccttcttgctattggaaactcagcacatttgaacttgggtttgattcagtattaacagatcttgactacactaattctttatattatagaaccaacggaaatatgggcactattttgaattctagagatggtttttgttaaatctactaataaactgttctcttagtagattaagagagagtaatattaattgtgcatgtgcagttgtatttctcattaactgacagtatgcccatttgtttttatggctttcttatctaaactgcactgatgaactagattaaagccttgggagatttatactataaattcagtgatggcaagaaccaacactgtttttttgtgagaattgtcagtgtaactattacctaccagtattgttcagagagattgaaacagaataaacgggctgttcttgaagaagcaaaaccagaatatgcattactttggtttaatacttagtgctaacattgaaactgttggtggtgatggattttgtagcttgctgcttgtttcaccactggtcaaattttaaccattaaattgccattcacttttagaatcttgtatttaataagttttgattttcaaatgttctgcttcatgtgtctgtgaagaattgtacttttaaaagtgtgtgtcctctgaggtgcttgagaaagtgtacactgcagaactgcccattctcattactgtgtcctattttattcatgcctgtgtgtttttcttaagtatgaattctagatacagctacttatggattcatcaatatcatgagcacttttgctggttccagtcaaatcaatggcatttaataaattttttaagaagt

SEQ ID NO: 447063 - DNA, 1048 bp, Homo sapiens
ggccggcctgggcggggcgcgcgactgctccgggcggcgatggcggcggacggggactggcaggatttctatgagttccaggagccggcccggagcctcctggaccaggagaactgtaacgcgagccccgagcctggggcggaggcgggggccggggcgggtgggggcgccgacggtttcccggccctggcctgcagcttggaggagaagctgagcctgtgcttccgcccctcggatccgggcgccgagcccccgaggacggccgtgcggcccatcacggagcgcagcctcctgcagggggacgagatttggaatgccctgacagataattatgggaatgtgatgcctgtagactggaagtcatcgcatactaggaccttgcacttgcttactctgaacctctcagaaaaaggggtaagtgacagtttgctctttgatacatcagatgatgaagagctgagagaacagctggatatgcactcaatcatcgtctcctgtgttaatgatgaacccctcttcacggcagaccaggttattgaagaaattgaagaaatgatgcaggaatcaccggacccagaagatgatgaaacccctacacagtcagatcggctttcaatgctttcccaggaaattcaaactctcaagaggtctagtaccggcagttatgaagagagagtgaaaaggctctcagtgtctgagttaaatgaaatcctggaagaaattgagactgccattaaggagtactctgaggagctggtgcagcagttggctttacgagatgaactggagtttgaaaaggaagtgaaaaacagctttatttctgttcttattgaagtgcaaaacaaacagaaagagcacaaagaaacagcaaaaaagaaaaagaaactaaaaaatggcagctctcagaatgggaagaatgagagaagtcatatgcccggcacagtaagtgatgttttgcaggaggcgtcgaacactggaaacaggttctgtggtagtcccagcctttggggctggtggcaggtgcgacaggttgtacatgggcaggagt

SEQ ID NO: 447064 - DNA, 1119 bp, Homo sapiens
gtgggtgacagcgtggatgggagttacacaagatactacggaagagggataaggcgagactaatgaatggatctctcagactggggatactgagagccgtcaatactgtcgccggtgcattcttcgtcgtccagtgaacggaggcacagatgtaccgatcgttccgagcttgttaaactgagttatatgctgaaagttctgtgtcctacatagagcagcaactttatctgcggtgggctccaagctagatttccgacagcattattctgagagctggctaccattacccttcttgctattggaaactcagcacatttgaacttgggtttgattcagtattaacagatcttgactacactaattctttatattatagaaccaacggaaatatgggcactattttgaattctagagatggtttttgttaaatctactaataaactgttctcttagtagattaagagagagtaatattaattgtgcatgtgcagttgtatttctcattaactgacagtatgcccatttgtttttatggctttcttatctaaactgcactgatgaactagattaaagccttgggagatttatactataaattcagtgatggcaagaaccaacactgtttttttgtgagaattgtcagtgtaactattacctaccagtattgttcagagagattgaaacagaataaacgggctgttcttgaagaagcaaaaccagaatatgcattactttggtttaatacttagtgctaacattgaaactgttggtggtgatggattttgtagcttgctgcttgtttcaccactggtcaaattttaaccattaaattgccattcacttttagaatcttgtatttaataagttttgattttcaaatgttctgcttcatgtgtctgtgaagaattgtacttttaaaagtgtgtgtcctctgaggtgcttgagaaagtgtacactgcagaactgcccattctcattactgtgtcctattttattcatgcctgtgtgtttttcttaagtatgaattctagatacagctacttatggattcatcaatatcatgagcacttttgctggttccagtcaaatcaatggcatttaataaattttttaagaagt

SEQ ID NO: 447065 - DNA, 1072 bp, Homo sapiens
ggccggcctgggcggggcgcgcgactgctccgggcggcgatggcggcggacggggactggcaggatttctatgagttccaggagccggcccggagcctcctggaccaggagaactgtaacgcgagccccgagcctggggcggaggcgggggccggggcgggtgggggcgccgacggtttcccggccctggcctgcagcttggaggagaagctgagcctgtgcttccgcccctcggatccgggcgccgagcccccgaggacggccgtgcggcccatcacggagcgcagcctcctgcagggggacgagatttggaatgccctgacagataattatgggaatgtgatgcctgtagactggaagtcatcgcatactaggaccttgcacttgcttactctgaacctctcagaaaaaggggtaagtgacagtttgctctttgatacatcagatgatgaagagctgagagaacagctggatatgcactcaatcatcgtctcctgtgttaatgatgaacccctcttcacggcagaccaggttattgaagaaattgaagaaatgatgcaggaatcaccggacccagaagatgatgaaacccctacacagtcagatcggctttcaatgctttcccaggaaattcaaactctcaagaggtctagtaccggcagttatgaagagagagtgaaaaggctctcagtgtctgagttaaatgaaatcctggaagaaattgagactgccattaaggagtactctgaggagctggtgcagcagttggctttacgagatgaactggagtttgaaaaggaagtgaaaaacagctttatttctgttcttattgaagtgcaaaacaaacagaaagagcacaaagaaacagcaaaaaagaaaaagaaactaaaaaatggcagctctcagaataatgctgtcggaaatctagcttggagcccaccgcagataaagttgctgctctatgtaggacacagaacttacagaatataatcagttaacaagctcggaactttttcactgtcctccttcatggcacaaagaatgtgccgggcatatgacttctctcattctt

SEQ ID NO: 447066 - DNA, 1965 bp, Homo sapiens
tttttttgtggagatggggtctcattgtgttggccaggctggtcttgaactcctggcctcaagctagctacctgccttagtctcccaaaatgctggaattataggcatgagccaccaacaccttgctcagtatcctcatttcttttcctagatacactgtctccttcaatgacacatagggacccatttgcgaaaacgccatcaggaagttttggaagctaccaggtttaaagggagatgtggtagctattccatgcaattcgaggttctataaattaaaataatagtcactgtagtcttttgggggaaacagcataatctaattgagactacatataaatgtattttaagcactcagcctgaagagggatgtagaaataaagactgggaatatccaacgaaaaataaccaaaacagtttatgtgtggctatcagggttgtgccatttaactctaaaggctacgtttattattccaactggtttgcttattctgacaattaagttttgttctttgatacctaataataatcgtaacttccacttactgaatgcccactacataccaggccctgtgttaagcatgttacctgcatcaatgccatttgatctccattgcccaatgggtcagggtattgtttcaattccacagaaaaatgaggcacaagattcaatcagttgtccaagatgcacagctaggaagtggcagggtgaggaggggaaccacagcgggtctggttccacagtccgccagcacctctgtctgttgtgtgccaagccggataacctgtggagggaccacttgcccggacaaggatcaatcagtgccacacaaacaagctgttacttctcactgactcttgaaaatggggactcgaatttatctttgtcttcaaagataaattgtcctttacctgactgcatcatacctcacacagtgctatcaaggagtggagataaccaagtgggttatttaggtaatttaggattcctggtcctccttaggaacatctctgtttaacacttctctctcccctcacaatctctccctcccactctctcaaagaggattagaggtaaaacaaaccaatcaggggttatatatccaaataaacatgatccccttctaagtagtcctggtaggctgtaaactcttccaatggtactgccgctgctgcacagctttggaattttcctcttgcgatggcgtccagggccaattttgaaacgtgcaaagaagatggttactatttcacagttacaccttggtttagatcggcttcgctacttatttttctcagctatggcccctatcttatccgtcagattcagtttgaaatgacttttggcctctttcagaaacaaagtctctgcaagaatacaaagatttacttctgccatcaccgtcaactacgtcagggacctggagccctttgctggatgcagctggtccttccatggggctgcttacctcatgggatgctcagacaaacatcttcttttcttttgggattcagatatgagcaatattatcttgcatcacatatgattacaataaaaatatacaatgtctttcagcagtagagtctggaaaattcagtgtgggttccctcctgcctattttccctcaattctggttcatatcacaagaggaggaagaagcggcaaggccttgaaatgttaattcctttccggttaacttcttcaactgtttaaacttcattatcttacctcttttcaagataagaaaagaagacttaacaggctgttaaggctggactttgtttttactcctgagctattttaattatgccataaaactaattaacagctagggaaaatctagaactgtgttattttcttcctctacaaagatccaatttagtattccaggagtcactgagatggtggcacagccctgctctgaaactgaccatgatgtaggatatacatgagcctctggaaaa

SEQ ID NO: 447067 - DNA, 321 bp, Homo sapiens
ctcacaatctctccctcccactctctcaaagaggattagaggagaatgttccaaggaaaccatgaggtatgacactaacataataacgtttatttttaaaacaaaccaatcaggggttatatatccaaataaacatgatccccttctaagtagtcctggtaggctgtaaactcttccaatggtactgccgctgctgcacagctttggaattttcctcttgcgatggcgtccagggccaattttgaaacgtgcaaagaagatggttactatttcacagttacaccttggtttagatcggcttcgctacttatttttctcagc

SEQ ID NO: 447068 - DNA, 1917 bp, Homo sapiens
acgtgttgtgggagggatccagggggaggtaattgaatcatgggggctggtctttcctatgcgattctcatgatagtgaataagtcttacaagatctgatgggcttatcaggggtttccgctttgctccttcctcattttcccttgctgccgccatgcaagaagtgccttttgcctcctgccatgattctgaggcctccccagccatgtggaactgatttggaatgccctgacagataattatgggaatgtgatgcctgtagactggaagtcatcgcatactaggaccttgcacttgcttactctgaacctctcagaaaaaggggtaagtgacagtttgctctttgatacatcagatgatgaagagctgagagaacagctggatatgcactcaatcatcgtctcctgtgttaatgatgaacccctcttcacggcagaccaggttattgaagaaattgaagaaatgatgcaggaatcaccggacccagaagatgatgaaacccctacacagtcagatcggctttcaatgctttcccaggaaattcaaactctcaagaggtctagtaccggcagttatgaagagagagtgaaaaggctctcagtgtctgagttaaatgaaatcctggaagaaattgagactgccattaaggagtactctgaggagctggtgcagcagttggctttacgagatgaactggagtttgaaaaggaagtgaaaaacagctttatttctgttcttattgaagtgcaaaacaaacagaaagagcacaaagaaacagcaaaaaagaaaaagaaactaaaaaatggcagctctcagaatgggaagaatgagagaagtcatatgcccggcacatatttgactacagtcattccttatgagaaaaaaaacggaccaccgtctgttgaagatcttcaaatattaacaaaaattcttcgtgccatgaaggaggacagtgaaaaagttccgagcttgttaactgattatattctgaaagttctgtgtcctacatagagcagcaactttatctgcggtgggctccaagctagatttccgacagcattattctgagagctggctaccattacccttcttgctattggaaactcagcacatttgaacttgggtttgattcagtattaacagatcttgactacactaattctttatattatagaaccaacggaaatatgggcactattttgaattctagagatggtttttgttaaatctactaataaactgttctcttagtagattaagagagagtaatattaattgtgcatgtgcagttgtatttctcattaactgacagtatgcccatttgtttttatggctttcttatctaaactgcactgatgaactagattaaagccttgggagatttatactataaattcagtgatggcaagaaccaacactgtttttttgtgagaattgtcagtgtaactattacctaccagtattgttcagagagattgaaacagaataaacgggctgttcttgaagaagcaaaaccagaatatgcattactttggtttaatacttagtgctaacattgaaactgttggtggtgatggattttgtagcttgctgcttgtttcaccactggtcaaattttaaccattaaattgccattcacttttagaatcttgtatttaataagttttgattttcaaatgttctgcttcatgtgtctgtgaagaattgtacttttaaaagtgtgtgtcctctgaggtgcttgagaaagtgtacactgcagaactgcccattctcattactgtgtcctattttattcatgcctgtgtgtttttcttaagtatgaattctagatacagctacttatggattcatcaatatcatgagcacttttgctggttccagtcaaatcaatggcatttaataaattttttaagaagt

SEQ ID NO: 447069 - DNA, 2822 bp, Homo sapiens
ggccggcctgggcggggcgcgcgactgctccgggcggcgatggcggcggacggggactggcaggatttctatgagttccaggagccggcccggagcctcctggaccaggagaactgtaacgcgagccccgagcctggggcggaggcgggggccggggcgggtgggggcgccgacggtttcccggccctggcctgcagcttggaggagaagctgagcctgtgcttccgcccctcggatccgggcgccgagcccccgaggacggccgtgcggcccatcacggagcgcagcctcctgcagggggacgagatttggaatgccctgacagataattatgggaatgtgatgcctgtagactggaagtcatcgcatactaggaccttgcacttgcttactctgaacctctcagaaaaaggggtaagtgacagtttgctctttgatacatcagatgatgaagagctgagagaacagctggatatgcactcaatcatcgtctcctgtgttaatgatgaacccctcttcacggcagaccaggttattgaagaaattgaagaaatgatgcaggaatcaccggacccagaagatgatgaaacccctacacagtcagatcggctttcaatgctttcccaggaaattcaaactctcaagaggtctagtaccggcagttatgaagagagagtgaaaaggctctcagtgtctgagttaaatgaaatcctggaagaaattgagactgccattaaggagtactctgaggagctggtgcagcagttggctttacgagatgaactggagtttgaaaaggaagtgaaaaacagctttatttctgttcttattgaagtgcaaaacaaacagaaagagcacaaagaaacagcaaaaaagaaaaagaaactaaaaaatggcagctctcagaatgggaagaatgagagaagtcatatgcccggcacatatttgactacagtcattccttatgagaaaaaaaacggaccaccgtctgttgaagatcttcaaatattaacaaaaattcttcgtgccatgaaggaggacagtgaaaaagttccgagcttgttaactgattatattctgaaagttctgtgtcctacatagagcagcaactttatctgcggtgggctccaagctagatttccgacagcattattctgagagctggctaccattacccttcttgctattggaaactcagcacatttgaacttgggtttgattcagtattaacagatcttgactacactaattctttatattatagaaccaacggaaatatgggcactattttgaattctagagatggtttttgttaaatctactaataaactgttctcttagtagattaagagagagtaatattaattgtgcatgtgcagttgtatttctcattaactgacagtatgcccatttgtttttatggctttcttatctaaactgcactgatgaactagattaaagccttgggagatttatactataaattcagtgatggcaagaaccaacactgtttttttgtgagaattgtcagtgtaactattacctaccagtattgttcagagagattgaaacagaataaacgggctgttcttgaagaagcaaaaccagaatatgcattactttggtttaatacttagtgctaacattgaaactgttggtggtgatggattttgtagcttgctgcttgtttcaccactggtcaaattttaaccattaaattgccattcacttttagaatcttgtatttaataagttttgattttcaaatgttctgcttcatgtgtctgtgaagaattgtacttttaaaagtgtgtgtcctctgaggtgcttgagaaagtgtacactgcagaactgcccattctcattactgtgtcctattttattcatgcctgtgtgtttttcttaagtatgaattctagatacagctacttatggattcatcaatatcatgagcacttttgctggttccagtcaaatcaatggcatttaataaattttttaagaagtaaaaatacatgtttgagagccttatatttgggagttttgtgttgtattttttttttccttacagtgctagattctttcccttaattccacacagaacccatcgctacaatatgtgagcagatgaaaccctgattagtcccagaatgctacgaaggggaagaggaggacgtttattagagtatgctgagctgctgtggaatgacagaaaaacaaagtctctgcaagaatacaaagatttacttctgccatcaccgtcaactacgtcagggacctggagccctttgctggatgcagctggtccttccatggggctgcttacctcatgggatgctcagacaaacatcttcttttcttttgggattcagatatgagcaatattatcttgcatcacatatgattacaataaaaatatacaatgtctttcagcagtagagtctggaaaattcagtgtgggttccctcctgcctattttccctcaattctggttcatatcacaagaggaggaagaagcggcaaggccttgaaatgttaattcctttccggttaacttcttcaactgtttaaacttcattatcttacctcttttcaagataagaaaagaagacttaacaggctgttaaggctggactttgtttttactcctgagctattttaattatgccataaaactaattaacagctagggaaaatctagaactgtgttattttcttcctctacaaagatccaatttagtattccaggagtcactgagatggtggcacagccctgctctgaaactgaccatgatgtaggatatacatgagcctctggaaaa

SEQ ID NO: 447070 - DNA, 2088 bp, Homo sapiens
ggccggcctgggcggggcgcgcgactgctccgggcggcgatggcggcggacggggactggcaggatttctatgagttccaggagccggcccggagcctcctggaccaggagaactgtaacgcgagccccgagcctggggcggaggcgggggccggggcgggtgggggcgccgacggtttcccggccctggcctgcagcttggaggagaagctgagcctgtgcttccgcccctcggatccgggcgccgagcccccgaggacggccgtgcggcccatcacggagcgcagcctcctgcagggggacgagatttggaatgccctgacagataattatgggaatgtgatgcctgtagactggaagtcatcgcatactaggaccttgcacttgcttactctgaacctctcagaaaaaggggtaagtgacagtttgctctttgatacatcagatgatgaagagctgagagaacagctggatatgcactcaatcatcgtctcctgtgttaatgatgaacccctcttcacggcagaccaggttattgaagaaattgaagaaatgatgcaggaatcaccggacccagaagatgatgaaacccctacacagtcagatcggctttcaatgctttcccaggaaattcaaactctcaagaggtctagtaccggcagttatgaagagagagtgaaaaggctctcagtgtctgagttaaatgaaatcctggaagaaattgagactgccattaaggagtactctgaggagctggtgcagcagttggctttacgagatgaactggagtttgaaaaggaagtgaaaaacagctttatttctgttcttattgaagtgcaaaacaaacagaaagagcacaaagaaacagcaaaaaagaaaaagaaactaaaaaatggcagctctcagaatgggaagaatgagagaagtcatatgcccggcacacgcttcagcatggaagggatctcaaatgtcattcagaatggcctccgccacacctttggaaattcaggtggagagaaacagtatttgactacagtcattccttatgagaaaaaaaacggaccaccgtctgttgaagatcttcaaatattaacaaaaattcttcgtgccatgaaggaggacagtgaaaaagttccgagcttgttaactgattatattctgaaagttctgtgtcctacatagagcagcaactttatctgcggtgggctccaagctagatttccgacagcattattctgagagctggctaccattacccttcttgctattggaaactcagcacatttgaacttgggtttgattcagtattaacagatcttgactacactaattctttatattatagaaccaacggaaatatgggcactattttgaattctagagatggtttttgttaaatctactaataaactgttctcttagtagattaagagagagtaatattaattgtgcatgtgcagttgtatttctcattaactgacagtatgcccatttgtttttatggctttcttatctaaactgcactgatgaactagattaaagccttgggagatttatactataaattcagtgatggcaagaaccaacactgtttttttgtgagaattgtcagtgtaactattacctaccagtattgttcagagagattgaaacagaataaacgggctgttcttgaagaagcaaaaccagaatatgcattactttggtttaatacttagtgctaacattgaaactgttggtggtgatggattttgtagcttgctgcttgtttcaccactggtcaaattttaaccattaaattgccattcacttttagaatcttgtatttaataagttttgattttcaaatgttctgcttcatgtgtctgtgaagaattgtacttttaaaagtgtgtgtcctctgaggtgcttgagaaagtgtacactgcagaactgcccattctcattactgtgtcctattttattcatgcctgtgtgtttttcttaagtatgaattctagatacagctacttatggattcatcaatatcatgagcacttttgctggttccagtcaaatcaatggcatttaataaattttttaagaagt

SEQ ID NO: 447071 - DNA, 4776 bp, Homo sapiens
  misc_feature (1282)..(1282): n is a, c, g, or t
  misc_feature (1326)..(1326): n is a, c, g, or t
  misc_feature (1967)..(1967): n is a, c, g, or t
ggccggcctgggcggggcgcgcgactgctccgggcggcgatggcggcggacggggactggcaggatttctatgagttccaggagccggcccggagcctcctggaccaggagaactgtaacgcgagccccgagcctggggcggaggcgggggccggggcgggtgggggcgccgacggtttcccggccctggcctgcagcttggaggagaagctgagcctgtgcttccgcccctcggatccgggcgccgagcccccgaggacggccgtgcggcccatcacggagcgcagcctcctgcagggggacgagatttggaatgccctgacagataattatgggaatgtgatgcctgtagactggaagtcatcgcatactaggaccttgcacttgcttactctgaacctctcagaaaaaggggtaagtgacagtttgctctttgatacatcagatgatgaagagctgagagaacagctggatatgcactcaatcatcgtctcctgtgttaatgatgaacccctcttcacggcagaccaggttattgaagaaattgaagaaatgatgcaggaatcaccggacccagaagatgatgaaacccctacacagtcagatcggctttcaatgctttcccaggaaattcaaactctcaagaggtctagtaccggcagttatgaagagagagtgaaaaggctctcagtgtctgagttaaatgaaatcctggaagaaattgagactgccattaaggagtactctgaggagctggtgcagcagttggctttacgagatgaactggagtttgaaaaggaagtgaaaaacagctttatttctgttcttattgaagtgcaaaacaaacagaaagagcacaaagaaacagcaaaaaagaaaaagaaactaaaaaatggcagctctcagaatgggaagaatgagagaagtcatatgcccggcacacgcttcagcatggaagggatctcaaatgtcattcagaatggcctccgccacacctttggaaattcaggtggagagaaacagtatttgactacagtcattccttatgagaaaaaaaacggaccaccgtctgttgaagatcttcaaatattaacaaaaagtgagcaaagacaaaatgaaactattacctgatttccttttgctgattggtaaacacctgactttagttggctgattttgttgttagtgttttgtcagtttaggatgtaaatgatgcatataattgtttatttttataagaatgaagccaaaaatggctgtgacattaaatacaacagtaacnctagtgttgatttgtactttttctgtttttcttaccttgtgaantatttatgagctaaaattttgggaaaaagcataacctaaatctccatcatctcttacatgtttaagaacatatccatttatcataaataaaattccttatggatcttatatatctatgattgtcagtaactgaataggaaagatttacggtaaacactttttatttcttatgaatgtagaacccgaggtagtagttataggtagaacataaattgacagtgatgttttaagaacatgcattcattcagcaaatatttagtgaaggcctactctgtaccaggccatgatctgggcacttgggatactttagtgaacaaagcagacaaagataatgcaccttcaaggggcttgccttaaaaaaaaaattgttagatttaaatatacatgatattgagtatctcttatgatggccgcaaatgagccttgaattctggttctatccctgttattttcagggatatccttggaagttacttactctcttttgcttacattgaaaaactaggataaaaatatttgttctatttacctcacagtaaatagattaatatatgtatgattttggctaagttactatcaattagccgttaaaatggagggattgaatttgctgatctgttaggtctttgttatggtaaatntttatgatacttgctaattaggggggaaccaaatgaaagagcatcacatggatgagtatggatgatgatacttattttggaaatttaagaggaatgggcaaggaaaacctaagagtagaagcaagtgtcttatttcttagctccctgcctgctaacttggagcttttattctttcctttggtgaataattctttaaaaattttatatttaaatatggataaatcaagtgatgccagccagtctgaaataaaaaatcaagagattaactgggtagctagccctcttattttcaggaagaacttaagttatatgtgtccaagatcacacagggggatggttagttacagagctggatctcttaattcccaggcaattatacttttaatgatgctggtttttggtatgtgattttatttagaagttagaaaaaattttaaacatgattggaagcagaaatactgaacatggtagccctctaaagaagggaacataaatattgctcataagccaggaattactggcaggcctcagcttctcagatcaagaacaaatacttcattggtcaaactaaagtcatcataattccagcatcgagatgtctttataggttgtcacagtttggaatctctggacatatttgggtccaaagctccttttctttccaaaagaagagccctgtggagacagtcacagtgtttatggatatatagtcttcctgataaaagctattaggggattttgggtgcaataataatagttaataaaaatttaaataatttgagtagtgttagttacagttaatacatagcatgtactatgtgccaggcactatgatatgacctttatatctgaattagtagcttagtcctcataacaaacctttgagattaaatctaattattattctcatttcacagatgaagagcttggtgcaaaagtggttaagtagcttgctcagcgtcacacaattaggaagtggcagagccagggtttaaacccaggaaggctgatttgacagttacactattttgccttgtcgtattggtggggaaaaacagtgaaatatttttaccaggatgctttggagaaaatttgagttggcaatctctgttaaagtataatatttgtgagtttatctcaacctgaatggtctagcttaaaaaagaaaaacgttatactaggtggctgctttttctattttagtttttacttagaagataaatttgtcaaattagaatgaggctaattctcccaggtttctccctagtgcagaggaggcaacagccaggcagatgcccgatgctgcttcatggaagtctgttcttcatttgggtcttttctttgaaagtttctaaggagtctgacaggatacgcttgttggagggtatagctgtccatttctttaagagtttctctagtttgcttgatctgcagcactgaggttttcttgctgcacagagttcattgaggtgcacattatagtaacccactttccggtattattacagagcgaaggctccttgtaaataacccagttcctctttttttgtctccactgtttggaaattttaaatcagggaagcaactctcaggtaagtgggatattcttaccgaaaataaattcttgtggacttactccactaaaataaattattgggcctttattgttgtatccccttatcaggaaaatcacctataatttgtatgagtcagttatatcctataattaaggaagattaaggccacaatgattgaaattaaataatatttttgatctaaatttttaattgttgtcttttttcccctcttctattttgcagttcttcgtgccatgaaggaggacagtgaaaaagttccgagcttgttaactgattatattctgaaagttctgtgtcctacatagagcagcaactttatctgcggtgggctccaagctagatttccgacagcattattctgagagctggctaccattacccttcttgctattggaaactcagcacatttgaacttgggtttgattcagtattaacagatcttgactacactaattctttatattatagaaccaacggaaatatgggcactattttgaattctagagatggtttttgttaaatctactaataaactgttctcttagtagattaagagagagtaatattaattgtgcatgtgcagttgtatttctcattaactgacagtatgcccatttgtttttatggctttcttatctaaactgcactgatgaactagattaaagccttgggagatttatactataaattcagtgatggcaagaaccaacactgtttttttgtgagaattgtcagtgtaactattacctaccagtattgttcagagagattgaaacagaataaacgggctgttcttgaagaagcaaaaccagaatatgcattactttggtttaatacttagtgctaacattgaaactgttggtggtgatggattttgtagcttgctgcttgtttcaccactggtcaaattttaaccattaaattgccattcacttttagaatcttgtatttaataagttttgattttcaaatgttctgcttcatgtgtctgtgaagaattgtacttttaaaagtgtgtgtcctctgaggtgcttgagaaagtgtacactgcagaactgcccattctcattactgtgtcctattttattcatgcctgtgtgtttttcttaagtatgaattctagatacagctacttatggattcatcaatatcatgagcacttttgctggttccagtcaaatcaatggcatttaataaattttttaagaagt

SEQ ID NO: 447072 - DNA, 2091 bp, Homo sapiens
ggccggcctgggcggggcgcgcgactgctccgggcggcgatggcggcggacggggactggcaggatttctatgagttccaggagccggcccggagcctcctggaccaggagaactgtaacgcgagccccgagcctggggcggaggcgggggccggggcgggtgggggcgccgacggtttcccggccctggcctgcagcttggaggagaagctgagcctgtgcttccgcccctcggatccgggcgccgagcccccgaggacggccgtgcggcccatcacggagcgcagcctcctgcagggggacgagatttggaatgccctgacagataattatgggaatgtgatgcctgtagactggaagtcatcgcatactaggaccttgcacttgcttactctgaacctctcagaaaaaggggtaagtgacagtttgctctttgatacatcagatgatgaagagctgagagaacagctggatatgcactcaatcatcgtctcctgtgttaatgatgaacccctcttcacggcagaccaggttattgaagaaattgaagaaatgatgcaggaatcaccggacccagaagatgatgaaacccctacacagtcagatcggctttcaatgctttcccaggaaattcaaactctcaagaggtctagtaccggcagttatgaagagagagtgaaaaggctctcagtgtctgagttaaatgaaatcctggaagaaattgagactgccattaaggagtactctgaggagctggtgcagcagttggctttacgagatgaactggagtttgaaaaggaagtgaaaaacagctttatttctgttcttattgaagtgcaaaacaaacagaaagagcacaaagaaacagcaaaaaagaaaaagaaactaaaaaatggcagctctcagaatgggaagaatgagagaagtcatatgcccggcacatatttgactacagtcattccttatgagaaaaaaaacggaccaccgtctgttgaagatcttcaaatattaacaaaaaagcgaaggctccttgtaaataacccagttcctctttttttgtctccactgtttggaaattttaaatcagggaagcaactctcagttcttcgtgccatgaaggaggacagtgaaaaagttccgagcttgttaactgattatattctgaaagttctgtgtcctacatagagcagcaactttatctgcggtgggctccaagctagatttccgacagcattattctgagagctggctaccattacccttcttgctattggaaactcagcacatttgaacttgggtttgattcagtattaacagatcttgactacactaattctttatattatagaaccaacggaaatatgggcactattttgaattctagagatggtttttgttaaatctactaataaactgttctcttagtagattaagagagagtaatattaattgtgcatgtgcagttgtatttctcattaactgacagtatgcccatttgtttttatggctttcttatctaaactgcactgatgaactagattaaagccttgggagatttatactataaattcagtgatggcaagaaccaacactgtttttttgtgagaattgtcagtgtaactattacctaccagtattgttcagagagattgaaacagaataaacgggctgttcttgaagaagcaaaaccagaatatgcattactttggtttaatacttagtgctaacattgaaactgttggtggtgatggattttgtagcttgctgcttgtttcaccactggtcaaattttaaccattaaattgccattcacttttagaatcttgtatttaataagttttgattttcaaatgttctgcttcatgtgtctgtgaagaattgtacttttaaaagtgtgtgtcctctgaggtgcttgagaaagtgtacactgcagaactgcccattctcattactgtgtcctattttattcatgcctgtgtgtttttcttaagtatgaattctagatacagctacttatggattcatcaatatcatgagcacttttgctggttccagtcaaatcaatggcatttaataaattttttaagaagt

SEQ ID NO: 447073 - DNA, 1965 bp, Homo sapiens
ggccggcctgggcggggcgcgcgactgctccgggcggcgatggcggcggacggggactggcaggatttctatgagttccaggagccggcccggagcctcctggaccaggagaactgtaacgcgagccccgagcctggggcggaggcgggggccggggcgggtgggggcgccgacggtttcccggccctggcctgcagcttggaggagaagctgagcctgtgcttccgcccctcggatccgggcgccgagcccccgaggacggccgtgcggcccatcacggagcgcagcctcctgcagggggacgagatttggaatgccctgacagataattatgggaatgtgatgcctgtagactggaagtcatcgcatactaggaccttgcacttgcttactctgaacctctcagaaaaaggggtaagtgacagtttgctctttgatacatcagatgatgaagagctgagagaacagctggatatgcactcaatcatcgtctcctgtgttaatgatgaacccctcttcacggcagaccaggttattgaagaaattgaagaaatgatgcaggaatcaccggacccagaagatgatgaaacccctacacagtcagatcggctttcaatgctttcccaggaaattcaaactctcaagaggtctagtaccggcagttatgaagagagagtgaaaaggctctcagtgtctgagttaaatgaaatcctggaagaaattgagactgccattaaggagtactctgaggagctggtgcagcagttggctttacgagatgaactggagtttgaaaaggaagtgaaaaacagctttatttctgttcttattgaagtgcaaaacaaacagaaagagcacaaagaaacagcaaaaaagaaaaagaaactaaaaaatggcagctctcagaatgggaagaatgagagaagtcatatgcccggcacatatttgactacagtcattccttatgagaaaaaaaacggaccaccgtctgttgaagatcttcaaatattaacaaaaattcttcgtgccatgaaggaggacattctgtgtcctacatagagcagcaactttatctgcggtgggctccaagctagatttccgacagcattattctgagagctggctaccattacccttcttgctattggaaactcagcacatttgaacttgggtttgattcagtattaacagatcttgactacactaattctttatattatagaaccaacggaaatatgggcactattttgaattctagagatggtttttgttaaatctactaataaactgttctcttagtagattaagagagagtaatattaattgtgcatgtgcagttgtatttctcattaactgacagtatgcccatttgtttttatggctttcttatctaaactgcactgatgaactagattaaagccttgggagatttatactataaattcagtgatggcaagaaccaacactgtttttttgtgagaattgtcagtgtaactattacctaccagtattgttcagagagattgaaacagaataaacgggctgttcttgaagaagcaaaaccagaatatgcattactttggtttaatacttagtgctaacattgaaactgttggtggtgatggattttgtagcttgctgcttgtttcaccactggtcaaattttaaccattaaattgccattcacttttagaatcttgtatttaataagttttgattttcaaatgttctgcttcatgtgtctgtgaagaattgtacttttaaaagtgtgtgtcctctgaggtgcttgagaaagtgtacactgcagaactgcccattctcattactgtgtcctattttattcatgcctgtgtgtttttcttaagtatgaattctagatacagctacttatggattcatcaatatcatgagcacttttgctggttccagtcaaatcaatggcatttaataaattttttaagaagt

SEQ ID NO: 447074 - DNA, 2189 bp, Homo sapiens
  misc_feature (598)..(598): n is a, c, g, or t
  misc_feature (1125)..(1126): n is a, c, g, or t
  misc_feature (1334)..(1334): n is a, c, g, or t
  misc_feature (1468)..(1468): n is a, c, g, or t
  misc_feature (1821)..(1821): n is a, c, g, or t
tacctagggaggttaaggggcctggccaatgactcgttatttgaagaaggatggagatgagagtttgtttccctagtctcagtcaaatgcccttaccatttgaccctcttgcctccctgtaatgctgttgggtaataaggtcaggtaactgcattggatagagcctgggtgtgttttattgtgaactccctctctttctcctttttgttgtatctgccttagtgcttagcttctttattacaaattagatattaaatcctgttctcacattgagagcgaattctttctccagaaaggataacaaaccttttgtttgagagagatttttcactttttgaaatggtctgtttgtttgaagttacagaagaaaaataagtgtaatgcacagttgtatttattattcatgtgaccctggaaacatttcttccccgccctgtgtttcagtttcttcatctgtaaaatgaggttaataatggttcccccttctaatgttgtttttgaagattacatgagttaatacatgtaaattgcttagaacagtgcctagcactaatataatggaagtgttgcctactgcctattggcagttttctgtacngcttcaccttcccttaggacttcttgtcagcccagttatgtgatttttcacctcgtttttgtttaggagactctactttgttgatgtttttctgagaaacaatgtgctgtctgtttttctctgtttcctttgacatttgctgttcatctttcactgaatatttgtttaagaaagacatacagaatgttaattttcattgattgtagctttcttctttttaaggatttggaatgccctgacagataattatgggaatgtgatgcctgtagactggaagtcatcgcatactaggaccttgcacttgcttactctgaacctctcagaaaaaggggtaagttaggaattgaaccaatagtgtttgaataactgatgctgataatagaactaaaacagtagcatttctgcttaacacagattcactgacctgcctctcatttctgaaattatagcagtttgggtggctctgtcttgatgtcttggctgtagggccatcaccttgctggcacattcctccagttcttctccannacactcattttttatgtgtagctaaatttccatcacaatttttttttttttgacggagtctcactctgttgcccaggctggagtacagtggcttactacaacctctgcctcctgggttcaagcgattctcccacctcaaactcccgagtagctgggattacagcatgagccaccagtcccggctaatttttgtattttcagtagaganagggtttcgctgtgttggccaggctggtctcgaactcctgacctcaggtaattcacctcccagagtgctggattacaggtgtgagccactgcacctggcagtgatgatgcactgaaacactcagtaaaatttgntgcactgaaaccctcagtaaaaatgctagcctttggtttaatatactgagagtattggaatctcaacacggagttaactttttaatgagtgtagtgacctgctagacatgatatgttgtcaggagactgtgtattcctgtgaatactggagaacctttaaaagatattttagttcttggcttttaaaatacggtcttggctaacttacctttcttggggtctcctgtgtacatcctggtattgtaaagtgaagatgtcttgactaagaagtgtgagcacgagtggtgggacaggtagggaggcagaaaagggttgagaattacttgaaatggaaaatcacagtgttaagcttntttaaatctgatgagaaacatatccaaattatctaagtttcagggcctggctgtttaagttccttatcaaataataatgtaaactcatgccagatcttcttgcgtgctctatatttcattaagtgtaattatgtgattattgagaatatagtgcagtaggcctgtcactattttacatagtattgttaatgttttgttaaaaggattttcttacatatgtgatcagaaaagcctactgttattattttctagtaaaatgtagaattctggctgtatttcccagtattcagtagctatggaaatcttcctgactgtgccagtcattaatcccattaagctttgcagactgacctggcatatatttaatg

SEQ ID NO: 447075 - DNA, 205 bp, Homo sapiens
gcagaactgaagtagtatttcttaatgtcagctcccatccagaaacacaaaccatgtcagccttagaactcatgtgaaatggcattggtagttttaatttattcatttcatcacaagcatagattattgtgttatttaaaatgtaaaacaggaagcataggagtcataaatttccttttttctcaatgcatgcctccaaattatt

SEQ ID NO: 447076 - DNA, 7061 bp, Homo sapiens
ctgcaggaaggagagaggaagaggagcagaagggggcagcagcggacgccgctaacggcctccctcggcgctgacaggctgggccggcgcccggctcgcttgggtgttcgcgtcgccacttcggcttctcggccggtcgggcccctcggcccgggcttgcggcgcgcgtcggggctgagggctgctgcggcgcagggagaggcctggtcctcgctgccgagggatgtgagtgggagctgagcccacactggagggcccccgagggcccagcctggaggtcgttcagagccgtgcccgccccggggcttcgcagaccttgacccgccgggtaggagccgcccctgcgggctcgagggcgcgctctggtcgcccgatctgtgtagccggtttcagaagcaggcaacaggaacaagatgtgaactgtttctcttctgcagaaaaagaggctcttcctcctcctcccgcgacggcaaatgttctgaaaaagactctgcatgggaatggcctgccttacgatgacagaaatggagggaacatccacctcttctatatatcagaatggtgatatttctggaaatgccaattctatgaagcaaatagatccagttcttcaggtgtatctttaccattcccttgggaaatctgaggcagattatctgacctttccatctggggagtatgttgcagaagaaatctgtattgctgcttctaaagcttgtggtatcacacctgtgtatcataatatgtttgctttaatgagtgaaacagaaaggatctggtatccacccaaccatgtcttccatatagatgagtcaaccaggcataatgtactctacagaataagattttactttcctcgttggtattgcagtggcagcaacagagcctatcggcatggaatatctcgaggtgctgaagctcctcttcttgatgactttgtcatgtcttacctctttgctcagtggcggcatgattttgtgcacggatggataaaagtacctgtgactcatgaaacacaggaagaatgtcttgggatggcagtgttagatatgatgagaatagccaaagaaaacgatcaaaccccactggccatctataactctatcagctacaagacattcttaccaaaatgtattcgagcaaagatccaagactatcatattttgacaaggaagcgaataaggtacagatttcgcagatttattcagcaattcagccaatgcaaagccactgccagaaacttgaaacttaagtatcttataaatctggaaactctgcagtctgccttctacacagagaaatttgaagtaaaagaacctggaagtggtccttcaggtgaggagatttttgcaaccattataataactggaaacggtggaattcagtggtcaagagggaaacataaagaaagtgagacactgacagaacaggatttacagttatattgcgattttcctaatattattgatgtcagtattaagcaagcaaaccaagagggttcaaatgaaagccgagttgtaactatccataagcaagatggtaaaaatctggaaattgaacttagctcattaagggaagctttgtctttcgtgtcattaattgatggatattatagattaactgcagatgcacatcattacctctgtaaagaagtagcacctccagccgtgcttgaaaatatacaaagcaactgtcatggcccaatttcgatggattttgccattagtaaactgaagaaagcaggtaatcagactggactgtatgtacttcgatgcagtcctaaggactttaataaatattttttgacttttgctgtcgagcgagaaaatgtcattgaatataaacactgtttgattacaaaaaatgagaatgaagagtacaacctcagtgggacaaagaagaacttcagcagtcttaaagatcttttgaattgttaccagatggaaactgttcgctcagacaatataattttccagtttactaaatgctgtcccccaaagccaaaagataaatcaaaccttctagtcttcagaacgaatggtgtttctgatgtaccaacctcaccaacattacagaggcctactcatatgaaccaaatggtgtttcacaaaatcagaaatgaagatttgatatttaatgaaagccttggccaaggcacttttacaaagatttttaaaggcgtacgaagagaagtaggagactacggtcaactgcatgaaacagaagttcttttaaaagttctggataaagcacacagaaactattcagagtctttctttgaagcagcaagtatgatgagcaagctttctcacaagcatttggttttaaattatggagtatgtgtctgtggagacgagaatattctggttcaggagtttgtaaaatttggatcactagatacatatctgaaaaagaataaaaattgtataaatatattatggaaacttgaagttgctaaacagttggcatgggccatgcattttctagaagaaaacacccttattcatgggaatgtatgtgccaaaaatattctgcttatcagagaagaagacaggaagacaggaaatcctcctttcatcaaacttagtgatcctggcattagtattacagttttgccaaaggacattcttcaggagagaataccatgggtaccacctgaatgcattgaaaatcctaaaaatttaaatttggcaacagacaaatggagttttggtaccactttgtgggaaatctgcagtggaggagataaacctctaagtgctctggattctcaaagaaagctacaattttatgaagataggcatcagcttcctgcaccaaagtgggcagaattagcaaaccttataaataattgtatggattatgaaccagatttcaggccttctttcagagccatcatacgagatcttaacagtttgtttactccagattatgaactattaacagaaaatgacatgttaccaaatatgaggataggtgccctagggttttctggtgcctttgaagaccgggatcctacacagtttgaagagagacatttgaaatttctacagcaacttggcaagggtaattttgggagtgtggagatgtgccggtatgaccctctacaggacaacactggggaggtggtcgctgtaaaaaagcttcagcatagtactgaagagcacctaagagactttgaaagggaaattgaaatcctgaaatccctacagcatgacaacattgtaaagtacaagggagtgtgctacagtgctggtcggcgtaatctaaaattaattatggaatatttaccatatggaagtttacgagactatcttcaaaaacataaagaacggatagatcacataaaacttctgcagtacacatctcagatatgcaagggtatggagtatcttggtacaaaaaggtatatccacagggatctggcaacgagaaatatattggtggagaacgagaacagagttaaaattggagattttgggttaaccaaagtcttgccacaagacaaagaatactataaagtaaaagaacctggtgaaagtcccatattctggtatgctccagaatcactgacagagagcaagttttctgtggcctcagatgtttggagctttggagtggttctgtatgaacttttcacatacattgagaagagtaaaagtccaccagcggaatttatgcgtatgattggcaatgacaaacaaggacagatgatcgtgttccatttgatagaacttttgaagaataatggaagattaccaagaccagatggatgcccagatgagatctatatgatcatgacagaatgctggaacaataatgtaaatcaacgcccctcctttagggatctagctcttcgagtggatcaaataagggataacatggctggatgaaagaaatgaccttcattctgagaccaaagtagatttacagaacaaagttttatatttcacattgctgtggactattattacatatatcattattatataaatcatgatgctagccagcaaagatgtgaaaatatctgctcaaaactttcaaagtttagtaagtttttcttcatgaggccaccagtaaaagacattaatgagaattccttagcaaggattttgtaagaagtttcttaaacattgtcagttaacatcactcttgtctggcaaaagaaaaaaaatagactttttcaactcagctttttgagacctgaaaaaattattatgtaaattttgcaatgttaaagatgcacagaatatgtatgtatagtttttaccacagtggatgtataataccttggcatcttgtgtgatgttttacacacatgagggctggtgttcattaatactgttttctaatttttccatagttaatctataattaattacttcactatacaaacaaattaagatgttcagataattgaataagtacctttgtgtccttgttcatttatatcgctggccagcattataagcaggtgtatacttttagcttgtagttccatgtactgtaaatatttttcacataaagggaacaaatgtctagttttatttgtataggaaatttccctgaccctaaataatacattttgaaatgaaacaagcttacaaagatataatctattttattatggtttcccttgtatctatttgtggtgaatgtgttttttaaatggaactatctccaaatttttctaagactactatgaacagttttcttttaaaattttgagattaagaatgccaggaatattgtcatcctttgagctgctgactgccaataacattcttcgatctctgggatttatgctcatgaactaaatttaagcttaagccataaaatagattagattgttttttaaaaatggatagctcattaagaagtgcagcaggttaagaattttttcctaaagactgtatatttgaggggtttcagaattttgcattgcagtcatagaagagatttatttcctttttagaggggaaatgaggtaaataagtaaaaaagtatgcttgttaattttattcaagaatgccagtagaaaattcataacgtgtatctttaagaaaaatgagcatacatcttaaatcttttcaattaagtataaggggttgttcgttgttgtcatttgttatagtgctactccactttagacaccatagctaaaataaaatatggtgggttgtgtgtgtgtgtgtgtgtgtgtgtgtgtgtgtgtgtgtgttatttatacaaaacttaaaatacttgctgttttgattaaaaagaaaatagtttcttactttatttttactggtatgttctacttttttgaaagttgtactgaagacttctgattttgggttgaagggaaggaaaaggaagaaatgttttttacattcattattatacttaaagcatttttaaagcattttaatagttctggatgcagaaatcatctaaaatgacagtgaattaggttttaaaaagattttagatttttttgaaagtttaatttttatttgtaaagactcctcaaggatttgtatatgcaacacagtaaggagatcttccattttactacctttcaagtgaaaaatagcctatcatacaatatgcttgatttcagattttcatactaaaacttaactacatacttaaaagtaggttcttatcaagggtctctaacattgctttttaaaacaagatgtgaactaacttttcttaaacatttttttaaatgcttcatcttttagttttatataaagaatcccacatgtacattcttgtttttagaatggggtgactaccttattataaaattccaagtttccaagagacttcttttcattgaggcttcgtaaagttttccattttgattctgactacacataaaaataagataaccctgtagttattaagttggttctgtacaagaaacaggtaagtaattattgtaccagttaatgccaaaatatttttcacgttaatattcttcagaaacaagggtaaaggtattcttagaattatgtaattctgtaactattccagtatattaagttatacaatctttatataaatgactttttccatgggtacttgtttggaaaatagtcactttttcacgctatttatatatgctgccagtaacactataatttgctatggaagagtgttcttttaacctaaggcttctagtttacagtcaagtgtaattttcatcacaactataacttctggtatttaaattttatttaaacagctacaaaagagttagcaaatacctacagttctgtatctatagagccaatcttgatggtgggtgtggcattatgtgctcactttattgagcctatgttaatttctttagcatgctccccctaaattgaaatagtgatgtagtaaatattcagaagcgattttcttttgcatttttacctaaccaaggaaacgggccacacaccttggtttagggatgttgtgatagcttaccttccagtttttaagaaatgcttcctacaactgctgtcaaccactgtattgtctttaatgaacactgttgtatcccatcctaattcttgtactgaaattatttctcatgaaagtttctctaatatttctaatgaaagtttctctaatttgggggcataatgtactaagaatcagtttgctgtatattagaataaatagtaacagtaagtcagcaggattatccaaacaaaagactaggttttatgagataagcttgatttaagaaaaaaacaattaaagtatgaatatcagaaatactgtgtgtttactctcagattttagttggttggatttaatatcaagataactagctgctaagcgtttcataattctcacagtgatattagatttcaaaatgacactgagagaactgaaaaactacatcagtcaaattcatgtatgtatatcatatagcctttaactttttacattaatcagattcttagtaaaatgcagactgtatacctaaatattaaaatatttacttttataatcttaccttttatttcaatataaataaaattcttcttaggttaaaaaattaatttcagttg

SEQ ID NO: 447077 - DNA, 6817 bp, Homo sapiens
tgcaggacgcgcgtccggctctcccccagcctctatccggcccggtctcctgccattcggggagactgcaggccaaccgggaggctgagttcgaagctagcagggcggcgaagccagtgtcgcccgcggcgttgagaagacggtttcagaagcaggcaacaggaacaagatgtgaactgtttctcttctgcagaaaaagaggctcttcctcctcctcccgcgacggcaaatgttctgaaaaagactctgcatgggaatggcctgccttacgatgacagaaatggagggaacatccacctcttctatatatcagaatggtgatatttctggaaatgccaattctatgaagcaaatagatccagttcttcaggtgtatctttaccattcccttgggaaatctgaggcagattatctgacctttccatctggggagtatgttgcagaagaaatctgtattgctgcttctaaagcttgtggtatcacacctgtgtatcataatatgtttgctttaatgagtgaaacagaaaggatctggtatccacccaaccatgtcttccatatagatgagtcaaccaggcataatgtactctacagaataagattttactttcctcgttggtattgcagtggcagcaacagagcctatcggcatggaatatctcgaggtgctgaagctcctcttcttgatgactttgtcatgtcttacctctttgctcagtggcggcatgattttgtgcacggatggataaaagtacctgtgactcatgaaacacaggaagaatgtcttgggatggcagtgttagatatgatgagaatagccaaagaaaacgatcaaaccccactggccatctataactctatcagctacaagacattcttaccaaaatgtattcgagcaaagatccaagactatcatattttgacaaggaagcgaataaggtacagatttcgcagatttattcagcaattcagccaatgcaaagccactgccagaaacttgaaacttaagtatcttataaatctggaaactctgcagtctgccttctacacagagaaatttgaagtaaaagaacctggaagtggtccttcaggtgaggagatttttgcaaccattataataactggaaacggtggaattcagtggtcaagagggaaacataaagaaagtgagacactgacagaacaggatttacagttatattgcgattttcctaatattattgatgtcagtattaagcaagcaaaccaagagggttcaaatgaaagccgagttgtaactatccataagcaagatggtaaaaatctggaaattgaacttagctcattaagggaagctttgtctttcgtgtcattaattgatggatattatagattaactgcagatgcacatcattacctctgtaaagaagtagcacctccagccgtgcttgaaaatatacaaagcaactgtcatggcccaatttcgatggattttgccattagtaaactgaagaaagcaggtaatcagactggactgtatgtacttcgatgcagtcctaaggactttaataaatattttttgacttttgctgtcgagcgagaaaatgtcattgaatataaacactgtttgattacaaaaaatgagaatgaagagtacaacctcagtgggacaaagaagaacttcagcagtcttaaagatcttttgaattgttaccagatggaaactgttcgctcagacaatataattttccagtttactaaatgctgtcccccaaagccaaaagataaatcaaaccttctagtcttcagaacgaatggtgtttctgatgtaccaacctcaccaacattacagaggcctactcatatgaaccaaatggtgtttcacaaaatcagaaatgaagatttgatatttaatgaaagccttggccaaggcacttttacaaagatttttaaaggcgtacgaagagaagtaggagactacggtcaactgcatgaaacagaagttcttttaaaagttctggataaagcacacagaaactattcagagtctttctttgaagcagcaagtatgatgagcaagctttctcacaagcatttggttttaaattatggagtatgtgtctgtggagacgagaatattctggttcaggagtttgtaaaatttggatcactagatacatatctgaaaaagaataaaaattgtataaatatattatggaaacttgaagttgctaaacagttggcatgggccatgcattttctagaagaaaacacccttattcatgggaatgtatgtgccaaaaatattctgcttatcagagaagaagacaggaagacaggaaatcctcctttcatcaaacttagtgatcctggcattagtattacagttttgccaaaggacattcttcaggagagaataccatgggtaccacctgaatgcattgaaaatcctaaaaatttaaatttggcaacagacaaatggagttttggtaccactttgtgggaaatctgcagtggaggagataaacctctaagtgctctggattctcaaagaaagctacaattttatgaagataggcatcagcttcctgcaccaaagtgggcagaattagcaaaccttataaataattgtatggattatgaaccagatttcaggccttctttcagagccatcatacgagatcttaacagtttgtttactccagattatgaactattaacagaaaatgacatgttaccaaatatgaggataggtgccctagggttttctggtgcctttgaagaccgggatcctacacagtttgaagagagacatttgaaatttctacagcaacttggcaagggtaattttgggagtgtggagatgtgccggtatgaccctctacaggacaacactggggaggtggtcgctgtaaaaaagcttcagcatagtactgaagagcacctaagagactttgaaagggaaattgaaatcctgaaatccctacagcatgacaacattgtaaagtacaagggagtgtgctacagtgctggtcggcgtaatctaaaattaattatggaatatttaccatatggaagtttacgagactatcttcaaaaacataaagaacggatagatcacataaaacttctgcagtacacatctcagatatgcaagggtatggagtatcttggtacaaaaaggtatatccacagggatctggcaacgagaaatatattggtggagaacgagaacagagttaaaattggagattttgggttaaccaaagtcttgccacaagacaaagaatactataaagtaaaagaacctggtgaaagtcccatattctggtatgctccagaatcactgacagagagcaagttttctgtggcctcagatgtttggagctttggagtggttctgtatgaacttttcacatacattgagaagagtaaaagtccaccagcggaatttatgcgtatgattggcaatgacaaacaaggacagatgatcgtgttccatttgatagaacttttgaagaataatggaagattaccaagaccagatggatgcccagatgagatctatatgatcatgacagaatgctggaacaataatgtaaatcaacgcccctcctttagggatctagctcttcgagtggatcaaataagggataacatggctggatgaaagaaatgaccttcattctgagaccaaagtagatttacagaacaaagttttatatttcacattgctgtggactattattacatatatcattattatataaatcatgatgctagccagcaaagatgtgaaaatatctgctcaaaactttcaaagtttagtaagtttttcttcatgaggccaccagtaaaagacattaatgagaattccttagcaaggattttgtaagaagtttcttaaacattgtcagttaacatcactcttgtctggcaaaagaaaaaaaatagactttttcaactcagctttttgagacctgaaaaaattattatgtaaattttgcaatgttaaagatgcacagaatatgtatgtatagtttttaccacagtggatgtataataccttggcatcttgtgtgatgttttacacacatgagggctggtgttcattaatactgttttctaatttttccatagttaatctataattaattacttcactatacaaacaaattaagatgttcagataattgaataagtacctttgtgtccttgttcatttatatcgctggccagcattataagcaggtgtatacttttagcttgtagttccatgtactgtaaatatttttcacataaagggaacaaatgtctagttttatttgtataggaaatttccctgaccctaaataatacattttgaaatgaaacaagcttacaaagatataatctattttattatggtttcccttgtatctatttgtggtgaatgtgttttttaaatggaactatctccaaatttttctaagactactatgaacagttttcttttaaaattttgagattaagaatgccaggaatattgtcatcctttgagctgctgactgccaataacattcttcgatctctgggatttatgctcatgaactaaatttaagcttaagccataaaatagattagattgttttttaaaaatggatagctcattaagaagtgcagcaggttaagaattttttcctaaagactgtatatttgaggggtttcagaattttgcattgcagtcatagaagagatttatttcctttttagaggggaaatgaggtaaataagtaaaaaagtatgcttgttaattttattcaagaatgccagtagaaaattcataacgtgtatctttaagaaaaatgagcatacatcttaaatcttttcaattaagtataaggggttgttcgttgttgtcatttgttatagtgctactccactttagacaccatagctaaaataaaatatggtgggttgtgtgtgtgtgtgtgtgtgtgtgtgtgtgtgtgtgtgtgttatttatacaaaacttaaaatacttgctgttttgattaaaaagaaaatagtttcttactttatttttactggtatgttctacttttttgaaagttgtactgaagacttctgattttgggttgaagggaaggaaaaggaagaaatgttttttacattcattattatacttaaagcatttttaaagcattttaatagttctggatgcagaaatcatctaaaatgacagtgaattaggttttaaaaagattttagatttttttgaaagtttaatttttatttgtaaagactcctcaaggatttgtatatgcaacacagtaaggagatcttccattttactacctttcaagtgaaaaatagcctatcatacaatatgcttgatttcagattttcatactaaaacttaactacatacttaaaagtaggttcttatcaagggtctctaacattgctttttaaaacaagatgtgaactaacttttcttaaacatttttttaaatgcttcatcttttagttttatataaagaatcccacatgtacattcttgtttttagaatggggtgactaccttattataaaattccaagtttccaagagacttcttttcattgaggcttcgtaaagttttccattttgattctgactacacataaaaataagataaccctgtagttattaagttggttctgtacaagaaacaggtaagtaattattgtaccagttaatgccaaaatatttttcacgttaatattcttcagaaacaagggtaaaggtattcttagaattatgtaattctgtaactattccagtatattaagttatacaatctttatataaatgactttttccatgggtacttgtttggaaaatagtcactttttcacgctatttatatatgctgccagtaacactataatttgctatggaagagtgttcttttaacctaaggcttctagtttacagtcaagtgtaattttcatcacaactataacttctggtatttaaattttatttaaacagctacaaaagagttagcaaatacctacagttctgtatctatagagccaatcttgatggtgggtgtggcattatgtgctcactttattgagcctatgttaatttctttagcatgctccccctaaattgaaatagtgatgtagtaaatattcagaagcgattttcttttgcatttttacctaaccaaggaaacgggccacacaccttggtttagggatgttgtgatagcttaccttccagtttttaagaaatgcttcctacaactgctgtcaaccactgtattgtctttaatgaacactgttgtatcccatcctaattcttgtactgaaattatttctcatgaaagtttctctaatatttctaatgaaagtttctctaatttgggggcataatgtactaagaatcagtttgctgtatattagaataaatagtaacagtaagtcagcaggattatccaaacaaaagactaggttttatgagataagcttgatttaagaaaaaaacaattaaagtatgaatatcagaaatactgtgtgtttactctcagattttagttggttggatttaatatcaagataactagctgctaagcgtttcataattctcacagtgatattagatttcaaaatgacactgagagaactgaaaaactacatcagtcaaattcatgtatgtatatcatatagcctttaactttttacattaatcagattcttagtaaaatgcagactgtatacctaaatattaaaatatttacttttataatcttaccttttatttcaatataaataaaattcttcttaggttaaaaaattaatttcagttg

SEQ ID NO: 447078 - DNA, 3758 bp, Homo sapiens
attcattcattttttcttatattctcttttatattcaactttttatttcaattgaaatgtaatatgataaaaatatgagttttttaacaacaaaaaactcaaaggaaatatgtttttagttcatgtgttttgagccctcctcaggggatttgtgttgagtttattacagctatggaaatggaaattatagaagttccatatttaacagccttatgtttttgatcctaaaagtagtttgttttgaaaaggtttgaaaacatacaaaagcacacatatactaaattttttcccattgactggaggaaattgagaaagaattttgctacaaattaaatgtacaaaaaatattgaaagtgggtttgttttaggaatttatgcgtatgattggcaatgacaaacaaggacagatgatcgtgttccatttgatagaacttttgaagaataatggaagattaccaagaccagatggatgcccagatgagatctatatgatcatgacagaatgctggaacaataatgtaaatcaacgcccctcctttagggatctagctcttcgagtggatcaaataagggataacatggctggatgaaagaaatgaccttcattctgagaccaaagtagatttacagaacaaagttttatatttcacattgctgtggactattattacatatatcattattatataaatcatgatgctagccagcaaagatgtgaaaatatctgctcaaaactttcaaagtttagtaagtttttcttcatgaggccaccagtaaaagacattaatgagaattccttagcaaggattttgtaagaagtttcttaaacattgtcagttaacatcactcttgtctggcaaaagaaaaaaaatagactttttcaactcagctttttgagacctgaaaaaattattatgtaaattttgcaatgttaaagatgcacagaatatgtatgtatagtttttaccacagtggatgtataataccttggcatcttgtgtgatgttttacacacatgagggctggtgttcattaatactgttttctaatttttccatagttaatctataattaattacttcactatacaaacaaattaagatgttcagataattgaataagtacctttgtgtccttgttcatttatatcgctggccagcattataagcaggtgtatacttttagcttgtagttccatgtactgtaaatatttttcacataaagggaacaaatgtctagttttatttgtataggaaatttccctgaccctaaataatacattttgaaatgaaacaagcttacaaagatataatctattttattatggtttcccttgtatctatttgtggtgaatgtgttttttaaatggaactatctccaaatttttctaagactactatgaacagttttcttttaaaattttgagattaagaatgccaggaatattgtcatcctttgagctgctgactgccaataacattcttcgatctctgggatttatgctcatgaactaaatttaagcttaagccataaaatagattagattgttttttaaaaatggatagctcattaagaagtgcagcaggttaagaattttttcctaaagactgtatatttgaggggtttcagaattttgcattgcagtcatagaagagatttatttcctttttagaggggaaatgaggtaaataagtaaaaaagtatgcttgttaattttattcaagaatgccagtagaaaattcataacgtgtatctttaagaaaaatgagcatacatcttaaatcttttcaattaagtataaggggttgttcgttgttgtcatttgttatagtgctactccactttagacaccatagctaaaataaaatatggtgggttgtgtgtgtgtgtgtgtgtgtgtgtgtgtgtgtgtgtgtgttatttatacaaaacttaaaatacttgctgttttgattaaaaagaaaatagtttcttactttatttttactggtatgttctacttttttgaaagttgtactgaagacttctgattttgggttgaagggaaggaaaaggaagaaatgttttttacattcattattatacttaaagcatttttaaagcattttaatagttctggatgcagaaatcatctaaaatgacagtgaattaggttttaaaaagattttagatttttttgaaagtttaatttttatttgtaaagactcctcaaggatttgtatatgcaacacagtaaggagatcttccattttactacctttcaagtgaaaaatagcctatcatacaatatgcttgatttcagattttcatactaaaacttaactacatacttaaaagtaggttcttatcaagggtctctaacattgctttttaaaacaagatgtgaactaacttttcttaaacatttttttaaatgcttcatcttttagttttatataaagaatcccacatgtacattcttgtttttagaatggggtgactaccttattataaaattccaagtttccaagagacttcttttcattgaggcttcgtaaagttttccattttgattctgactacacataaaaataagataaccctgtagttattaagttggttctgtacaagaaacaggtaagtaattattgtaccagttaatgccaaaatatttttcacgttaatattcttcagaaacaagggtaaaggtattcttagaattatgtaattctgtaactattccagtatattaagttatacaatctttatataaatgactttttccatgggtacttgtttggaaaatagtcactttttcacgctatttatatatgctgccagtaacactataatttgctatggaagagtgttcttttaacctaaggcttctagtttacagtcaagtgtaattttcatcacaactataacttctggtatttaaattttatttaaacagctacaaaagagttagcaaatacctacagttctgtatctatagagccaatcttgatggtgggtgtggcattatgtgctcactttattgagcctatgttaatttctttagcatgctccccctaaattgaaatagtgatgtagtaaatattcagaagcgattttcttttgcatttttacctaaccaaggaaacgggccacacaccttggtttagggatgttgtgatagcttaccttccagtttttaagaaatgcttcctacaactgctgtcaaccactgtattgtctttaatgaacactgttgtatcccatcctaattcttgtactgaaattatttctcatgaaagtttctctaatatttctaatgaaagtttctctaatttgggggcataatgtactaagaatcagtttgctgtatattagaataaatagtaacagtaagtcagcaggattatccaaacaaaagactaggttttatgagataagcttgatttaagaaaaaaacaattaaagtatgaatatcagaaatactgtgtgtttactctcagattttagttggttggatttaatatcaagataactagctgctaagcgtttcataattctcacagtgatattagatttcaaaatgacactgagagaactgaaaaactacatcagtcaaattcatgtatgtatatcatatagcctttaactttttacattaatcagattcttagtaaaatgcagactgtatacctaaatattaaaatatttacttttataatcttaccttttatttcaatataaataaaattcttcttaggttaaaaaattaatttcagttg

SEQ ID NO: 447079 - DNA, 3584 bp, Homo sapiens
tgcaggacgcgcgtccggctctcccccagcctctatccggcccggtctcctgccattcggggagactgcaggccaaccgggaggctgagttcgaagctagcagggcggcgaagccagtgtcgcccgcggcgttgagaagacggtttcagaagcaggcaacaggaacaagatgtgaactgtttctcttctgcagaaaaagaggctcttcctcctcctcccgcgacgagacaggttctcactatgttgcccaggctggacttgaactcctgagctaaagtgatcctctcaccttggcttcccagagtgcagggattacaggcaaatgttctgaaaaagactctgcatgggaatggcctgccttacgatgacagaaatggagggaacatccacctcttctatatatcagaatggtgatatttctggaaatgccaattctatgaagcaaatagatccagttcttcaggtgtatctttaccattcccttgggaaatctgaggcagattatctgacctttccatctggggagtatgttgcagaagaaatctgtattgctgcttctaaagcttgtggtatcacacctgtgtatcataatatgtttgctttaatgagtgaaacagaaaggatctggtatccacccaaccatgtcttccatatagatgagtcaaccaggcataatgtactctacagaataagattttactttcctcgttggtattgcagtggcagcaacagagcctatcggcatggaatatctcgaggtgctgaagctcctcttcttgatgactttgtcatgtcttacctctttgctcagtggcggcatgattttgtgcacggatggataaaagtacctgtgactcatgaaacacaggaagaatgtcttgggatggcagtgttagatatgatgagaatagccaaagaaaacgatcaaaccccactggccatctataactctatcagctacaagacattcttaccaaaatgtattcgagcaaagatccaagactatcatattttgacaaggaagcgaataaggtacagatttcgcagatttattcagcaattcagccaatgcaaagccactgccagaaacttgaaacttaagtatcttataaatctggaaactctgcagtctgccttctacacagagaaatttgaagtaaaagaacctggaagtggtccttcaggtgaggagatttttgcaaccattataataactggaaacggtggaattcagtggtcaagagggaaacataaagaaagtgagacactgacagaacaggatttacagttatattgcgattttcctaatattattgatgtcagtattaagcaagcaaaccaagagggttcaaatgaaagccgagttgtaactatccataagcaagatggtaaaaatctggaaattgaacttagctcattaagggaagctttgtctttcgtgtcattaattgatggatattatagattaactgcagatgcacatcattacctctgtaaagaagtagcacctccagccgtgcttgaaaatatacaaagcaactgtcatggcccaatttcgatggattttgccattagtaaactgaagaaagcaggtaatcagactggactgtatgtacttcgatgcagtcctaaggactttaataaatattttttgacttttgctgtcgagcgagaaaatgtcattgaatataaacactgtttgattacaaaaaatgagaatgaagagtacaacctcagtgggacaaagaagaacttcagcagtcttaaagatcttttgaattgttaccagatggaaactgttcgctcagacaatataattttccagtttactaaatgctgtcccccaaagccaaaagataaatcaaaccttctagtcttcagaacgaatggtgtttctgatgtaccaacctcaccaacattacagaggcctactcatatgaaccaaatggtgtttcacaaaatcagaaatgaagatttgatatttaatgaaagccttggccaaggcacttttacaaagatttttaaaggcgtacgaagagaagtaggagactacggtcaactgcatgaaacagaagttcttttaaaagttctggataaagcacacagaaactattcagagtctttctttgaagcagcaagtatgatgagcaagctttctcacaagcatttggttttaaattatggagtatgtgtctgtggagacgagaatattctggttcaggagtttgtaaaatttggatcactagatacatatctgaaaaagaataaaaattgtataaatatattatggaaacttgaagttgctaaacagttggcatgggccatgcattttctagaagaaaacacccttattcatgggaatgtatgtgccaaaaatattctgcttatcagagaagaagacaggaagacaggaaatcctcctttcatcaaacttagtgatcctggcattagtattacagttttgccaaaggacattcttcaggagagaataccatgggtaccacctgaatgcattgaaaatcctaaaaatttaaatttggcaacagacaaatggagttttggtaccactttgtgggaaatctgcagtggaggagataaacctctaagtgctctggattctcaaagaaagctacaattttatgaagataggcatcagcttcctgcaccaaagtgggcagaattagcaaaccttataaataattgtatggattatgaaccagatttcaggccttctttcagagccatcatacgagatcttaacagtttgtttactccagattatgaactattaacagaaaatgacatgttaccaaatatgaggataggtgccctagggttttctggtgcctttgaagaccgggatcctacacagtttgaagagagacatttgaaatttctacagcaacttggcaagggtaattttgggagtgtggagatgtgccggtatgaccctctacaggacaacactggggaggtggtcgctgtaaaaaagcttcagcatagtactgaagagcacctaagagactttgaaagggaaattgaaatcctgaaatccctacagcatgacaacattgtaaagtacaagggagtgtgctacagtgctggtcggcgtaatctaaaattaattatggaatatttaccatatggaagtttacgagactatcttcaaaaacataaagaacggatagatcacataaaacttctgcagtacacatctcagatatgcaagggtatggagtatcttggtacaaaaaggtatatccacagggatctggcaacgagaaatatattggtggagaacgagaacagagttaaaattggagattttgggttaaccaaagtcttgccacaagacaaagaatactataaagtaaaagaacctggtgaaagtcccatattctgcacttccttggcctatccggtatgccgcaacgttattccgattatcctgatgcatacaccgcatgaaatattatctcatccttaggctcatttatctcattagcagcagttatgctaacaatttttataatctgagaagcctttgtttcgaaaagaaaaactataacaattgaacaaccatc

SEQ ID NO: 447080 - DNA, 3600 bp, Homo sapiens
tgcaggacgcgcgtccggctctcccccagcctctatccggcccggtctcctgccattcggggagactgcaggccaaccgggaggctgagttcgaagctagcagggcggcgaagccagtgtcgcccgcggcgttgagaagacggtttcagaagcaggcaacaggaacaagatgtgaactgtttctcttctgcagaaaaagaggctcttcctcctcctcccgcgacgagacaggttctcactatgttgcccaggctggacttgaactcctgagctaaagtgatcctctcaccttggcttcccagagtgcagggattacaggcaaatgttctgaaaaagactctgcatgggaatggcctgccttacgatgacagaaatggagggaacatccacctcttctatatatcagaatggtgatatttctggaaatgccaattctatgaagcaaatagatccagttcttcaggtgtatctttaccattcccttgggaaatctgaggcagattatctgacctttccatctggggagtatgttgcagaagaaatctgtattgctgcttctaaagcttgtggtatcacacctgtgtatcataatatgtttgctttaatgagtgaaacagaaaggatctggtatccacccaaccatgtcttccatatagatgagtcaaccaggcataatgtactctacagaataagattttactttcctcgttggtattgcagtggcagcaacagagcctatcggcatggaatatctcgaggtgctgaagctcctcttcttgatgactttgtcatgtcttacctctttgctcagtggcggcatgattttgtgcacggatggataaaagtacctgtgactcatgaaacacaggaagaatgtcttgggatggcagtgttagatatgatgagaatagccaaagaaaacgatcaaaccccactggccatctataactctatcagctacaagacattcttaccaaaatgtattcgagcaaagatccaagactatcatattttgacaaggaagcgaataaggtacagatttcgcagatttattcagcaattcagccaatgcaaagccactgccagaaacttgaaacttaagtatcttataaatctggaaactctgcagtctgccttctacacagagaaatttgaagtaaaagaacctggaagtggtccttcaggtgaggagatttttgcaaccattataataactggaaacggtggaattcagtggtcaagagggaaacataaagaaagtgagacactgacagaacaggatttacagttatattgcgattttcctaatattattgatgtcagtattaagcaagcaaaccaagagggttcaaatgaaagccgagttgtaactatccataagcaagatggtaaaaatctggaaattgaacttagctcattaagggaagctttgtctttcgtgtcattaattgatggatattatagattaactgcagatgcacatcattacctctgtaaagaagtagcacctccagccgtgcttgaaaatatacaaagcaactgtcatggcccaatttcgatggattttgccattagtaaactgaagaaagcaggtaatcagactggactgtatgtacttcgatgcagtcctaaggactttaataaatattttttgacttttgctgtcgagcgagaaaatgtcattgaatataaacactgtttgattacaaaaaatgagaatgaagagtacaacctcagtgggacaaagaagaacttcagcagtcttaaagatcttttgaattgttaccagatggaaactgttcgctcagacaatataattttccagtttactaaatgctgtcccccaaagccaaaagataaatcaaaccttctagtcttcagaacgaatggtgtttctgatgtaccaacctcaccaacattacagaggcctactcatatgaaccaaatggtgtttcacaaaatcagaaatgaagatttgatatttaatgaaagccttggccaaggcacttttacaaagatttttaaaggcgtacgaagagaagtaggagactacggtcaactgcatgaaacagaagttcttttaaaagttctggataaagcacacagaaactattcagagtctttctttgaagcagcaagtatgatgagcaagctttctcacaagcatttggttttaaattatggagtatgtgtctgtggagacgagaatattctggttcaggagtttgtaaaatttggatcactagatacatatctgaaaaagaataaaaattgtataaatatattatggaaacttgaagttgctaaacagttggcatgggccatgcattttctagaagaaaacacccttattcatgggaatgtatgtgccaaaaatattctgcttatcagagaagaagacaggaagacaggaaatcctcctttcatcaaacttagtgatcctggcattagtattacagttttgccaaaggacattcttcaggagagaataccatgggtaccacctgaatgcattgaaaatcctaaaaatttaaatttggcaacagacaaatggagttttggtaccactttgtgggaaatctgcagtggaggagataaacctctaagtgctctggattctcaaagaaagctacaattttatgaagataggcatcagcttcctgcaccaaagtgggcagaattagcaaaccttataaataattgtatggattatgaaccagatttcaggccttctttcagagccatcatacgagatcttaacagtttgtttactccagattatgaactattaacagaaaatgacatgttaccaaatatgaggataggtgccctagggttttctggtgcctttgaagaccgggatcctacacagtttgaagagagacatttgaaatttctacagcaacttggcaagggtaattttgggagtgtggagatgtgccggtatgaccctctacaggacaacactggggaggtggtcgctgtaaaaaagcttcagcatagtactgaagagcacctaagagactttgaaagggaaattgaaatcctgaaatccctacagcatgacaacattgtaaagtacaagggagtgtgctacagtgctggtaagctgcccattgaaacctattttaaattcaaggtatgtgtttggcatcctgtgtaatataaatgtacaatgtcttaacgatctggacttatgccaatgcccagagggagaggcattctataatgactagagattgtgtttggtgatcatagactataactataggaagtatttggctagttggttaaacattcttttcacctcttgcttaagcttaccaagaaagtatcatttttaaaggaattgtttttgtttacattttctataaaaatatttttgaattcaatgttttttgttcgatatcaatgaggagaaaggaagttttctcatcagtttattttggtttgcctgaagagttatagaaaactgaaacgcaaatagtttcaaagcttttattcattcaaaagtttttgattcaaaaagactatgttcttaacaactatatcacctttaatgtataataaagttttgtcatcttagatttcatatatgtt

SEQ ID NO: 447081 - DNA, 862 bp, Homo sapiens
cagggggactgccagtcatcagacccctcagggtgcacctatgtcctgctgcagaactgaagtagtatttcttaatgtcagctcccatccagaaacacaaaccatgtcagccttagaactcatgtgaaatggcattggtagttttaatttattcatttcatcacaagcatagattattgtgttatttaaaatgtaaaacaggaagcataggagtcataaatttccttttttctcaatgcatgcctccaaattattatactatcatgtatttttcttctttaaatctgttttgggggcttgaacatactaaatgctccagtacttgtggactgatatttgaatatatgtgcgtttaactctaataggaagaaaacacccttattcatgggaatgtatgtgccaaaaatattctgcttatcagagaagaagacaggaagacaggaaatcctcctttcatcaaacttagtgatcctggcattagtattacagttttgccaaaggacagtaagttctagaaggattatatataatgttactaagctttacttgggcagtggtgtaaagggcatgttgttaattttccttgaattccatttaatttgtatgttcctgattaataataaaattatcacttttagcaatttaaattgttagttaaatcttagtctctatttttctttcttataagcatataaccatggactgtgaggtgattttttaaaaacagttttaatctctaattatgtatgaaggataggattttatccatttttagtatgaagttttgtaatattccttgagccacaagtaaattttctaaatattcttttcttctcgtcactaaataaaaatttagcctgag

SEQ ID NO: 447082 - DNA, 5134 bp, Homo sapiens
ctgcaggaaggagagaggaagaggagcagaagggggcagcagcggacgccgctaacggcctccctcggcgctgacaggctgggccggcgcccggctcgcttgggtgttcgcgtcgccacttcggcttctcggccggtcgggcccctcggcccgggcttgcggcgcgcgtcggggctgagggctgctgcggcgcagggagaggcctggtcctcgctgccgagggatgtgagtgggagctgagcccacactggagggcccccgagggcccagcctggaggtcgttcagagccgtgcccgccccggggcttcgcagaccttgacccgccgggtaggagccgcccctgcgggctcgagggcgcgctctggtcgcccgatctgtgtagccggtttcagaagcaggcaacaggaacaagatgtgaactgtttctcttctgcagaaaaagaggctcttcctcctcctcccgcgacggcaaatgttctgaaaaagactctgcatgggaatggcctgccttacgatgacagaaatggagggaacatccacctcttctatatatcagaatggtgatatttctggaaatgccaattctatgaagcaaatagatccagttcttcaggtgtatctttaccattcccttgggaaatctgaggcagattatctgacctttccatctggggagtatgttgcagaagaaatctgtattgctgcttctaaagcttgtggtatcacacctgtgtatcataatatgtttgctttaatgagtgaaacagaaaggatctggtatccacccaaccatgtcttccatatagatgagtcaaccaggcataatgtactctacagaataagattttactttcctcgttggtattgcagtggcagcaacagagcctatcggcatggaatatctcgaggtgctgaagctcctcttcttgatgactttgtcatgtcttacctctttgctcagtggcggcatgattttgtgcacggatggataaaagtacctgtgactcatgaaacacaggaagaatgtcttgggatggcagtgttagatatgatgagaatagccaaagaaaacgatcaaaccccactggccatctataactctatcagctacaagacattcttaccaaaatgtattcgagcaaagatccaagactatcatattttgacaaggaagcgaataaggtacagatttcgcagatttattcagcaattcagccaatgcaaagccactgccagaaacttgaaacttaagtatcttataaatctggaaactctgcagtctgccttctacacagagaaatttgaagtaaaagaacctggaagtggtccttcaggtgaggagatttttgcaaccattataataactggaaacggtggaattcagtggtcaagagggaaacataaagaaagtgagacactgacagaacaggatttacagttatattgcgattttcctaatattattgatgtcagtattaagcaagcaaaccaagagggttcaaatgaaagccgagttgtaactatccataagcaagatggtaaaaatctggaaattgaacttagctcattaagggaagctttgtctttcgtgtcattaattgatggatattatagattaactgcagatgcacatcattacctctgtaaagaagtagcacctccagccgtgcttgaaaatatacaaagcaactgtcatggcccaatttcgatggattttgccattagtaaactgaagaaagcaggtaatcagactggactgtatgtacttcgatgcagtcctaaggactttaataaatattttttgacttttgctgtcgagcgagaaaatgtcattgaatataaacactgtttgattacaaaaaatgagaatgaagagtacaacctcagtgggacaaagaagaacttcagcagtcttaaagatcttttgaattgttaccagatggaaactgttcgctcagacaatataattttccagtttactaaatgctgtcccccaaagccaaaagataaatcaaaccttctagtcttcagaacgaatggtgtttctgatgtaccaacctcaccaacattacagaggcctactcatatgaaccaaatggtgtttcacaaaatcagaaatgaagatttgatatttaatgaaagccttggccaaggcacttttacaaagatttttaaaggcgtacgaagagaagtaggagactacggtcaactgcatgaaacagaagttcttttaaaagttctggataaagcacacagaaactattcagagtctttctttgaagcagcaagtatgatgagcaagctttctcacaagcatttggttttaaattatggagtatgtgtctgtggagacgagaatattctggttcaggagtttgtaaaatttggatcactagatacatatctgaaaaagaataaaaattgtataaatatattatggaaacttgaagttgctaaacagttggcatgggccatgcattttctagaagaaaacacccttattcatgggaatgtatgtgccaaaaatattctgcttatcagagaagaagacaggaagacaggaaatcctcctttcatcaaacttagtgatcctggcattagtattacagttttgccaaaggacattcttcaggagagaataccatgggtaccacctgaatgcattgaaaatcctaaaaatttaaatttggcaacagacaaatggagttttggtaccactttgtgggaaatctgcagtggaggagataaacctctaagtgctctggattctcaaagaaagctacaattttatgaagataggcatcagcttcctgcaccaaagtgggcagaattagcaaaccttataaataattgtatggattatgaaccagatttcaggccttctttcagagccatcatacgagatcttaacagtttgtttactccagattatgaactattaacagaaaatgacatgttaccaaatatgaggataggtgccctagggttttctggtgcctttgaagaccgggatcctacacagtttgaagagagacatttgaaatttctacagcaacttggcaagggtaattttgggagtgtggagatgtgccggtatgaccctctacaggacaacactggggaggtggtcgctgtaaaaaagcttcagcatagtactgaagagcacctaagagactttgaaagggaaattgaaatcctgaaatccctacagcatgacaacattgtaaagtacaagggagtgtgctacagtgctggtcggcgtaatctaaaattaattatggaatatttaccatatggaagtttacgagactatcttcaaaaacataaagaacggatagatcacataaaacttctgcagtacacatctcagatatgcaagggtatggagtatcttggtacaaaaaggtatatccacagggatctggcaacgagaaatatattggtggagaacgagaacagagttaaaattggagattttgggttaaccaaagtcttgccacaagacaaagaatactataaagtaaaagaacctggtgaaagtcccatattctggtatgctccagaatcactgacagagagcaagttttctgtggcctcagatgtttggagctttggagtggttctgtatgaacttttcacatacattgagaagagtaaaagtccaccagcggaatttatgcgtatgattggcaatgacaaacaaggacagatgatcgtgttccatttgatagaacttttgaagaataatggaagattaccaagaccagatggatgcccagatgagatctatatgatcatgacagaatgctggaacaataatgtaaatcaacgcccctcctttagggatctagctcttcgagtggatcaaataagggataacatggctggatgaaagaaatgaccttcattctgagaccaaagtagatttacagaacaaagttttatatttcacattgctgtggactattattacatatatcattattatataaatcatgatgctagccagcaaagatgtgaaaatatctgctcaaaactttcaaagtttagtaagtttttcttcatgaggccaccagtaaaagacattaatgagaattccttagcaaggattttgtaagaagtttcttaaacattgtcagttaacatcactcttgtctggcaaaagaaaaaaaatagactttttcaactcagctttttgagacctgaaaaaattattatgtaaattttgcaatgttaaagatgcacagaatatgtatgtatagtttttaccacagtggatgtataataccttggcatcttgtgtgatgttttacacacatgagggctggtgttcattaatactgttttctaatttttccatagttaatctataattaattacttcactatacaaacaaattaagatgttcagataattgaataagtacctttgtgtccttgttcatttatatcgctggccagcattataagcaggtgtatacttttagcttgtagttccatgtactgtaaatatttttcacataaagggaacaaatgtctagttttatttgtataggaaatttccctgaccctaaataatacattttgaaatgaaacaagcttacaaagatataatctattttattatggtttcccttgtatctatttgtggtgaatgtgttttttaaatggaactatctccaaatttttctaagactactatgaacagttttcttttaaaattttgagattaagaatgccaggaatattgtcatcctttgagctgctgactgccaataacattcttcgatctctgggatttatgctcatgaactaaatttaagcttaagccataaaatagattagattgttttttaaaaatggatagctcattaagaagtgcagcaggttaagaattttttcctaaagactgtatatttgaggggtttcagaattttgcattgcagtcatagaagagatttatttcctttttagaggggaaatgaggtaaataagtaaaaaagtatgcttgttaattttattcaagaatgccagtagaaaattcataacgtgtatctttaagaaaaatgagcatacatcttaaatcttttcaattaaggtcgacgcggccgcggtcgacgcggccgcgaattc

SEQ ID NO: 447083 - DNA, 6910 bp, Homo sapiens
tgcaggacgcgcgtccggctctcccccagcctctatccggcccggtctcctgccattcggggagactgcaggccaaccgggaggctgagttcgaagctagcagggcggcgaagccagtgtcgcccgcggcgttgagaagacggtttcagaagcaggcaacaggaacaagatgtgaactgtttctcttctgcagaaaaagaggctcttcctcctcctcccgcgacgagacaggttctcactatgttgcccaggctggacttgaactcctgagctaaagtgatcctctcaccttggcttcccagagtgcagggattacaggcaaatgttctgaaaaagactctgcatgggaatggcctgccttacgatgacagaaatggagggaacatccacctcttctatatatcagaatggtgatatttctggaaatgccaattctatgaagcaaatagatccagttcttcaggtgtatctttaccattcccttgggaaatctgaggcagattatctgacctttccatctggggagtatgttgcagaagaaatctgtattgctgcttctaaagcttgtggtatcacacctgtgtatcataatatgtttgctttaatgagtgaaacagaaaggatctggtatccacccaaccatgtcttccatatagatgagtcaaccaggcataatgtactctacagaataagattttactttcctcgttggtattgcagtggcagcaacagagcctatcggcatggaatatctcgaggtgctgaagctcctcttcttgatgactttgtcatgtcttacctctttgctcagtggcggcatgattttgtgcacggatggataaaagtacctgtgactcatgaaacacaggaagaatgtcttgggatggcagtgttagatatgatgagaatagccaaagaaaacgatcaaaccccactggccatctataactctatcagctacaagacattcttaccaaaatgtattcgagcaaagatccaagactatcatattttgacaaggaagcgaataaggtacagatttcgcagatttattcagcaattcagccaatgcaaagccactgccagaaacttgaaacttaagtatcttataaatctggaaactctgcagtctgccttctacacagagaaatttgaagtaaaagaacctggaagtggtccttcaggtgaggagatttttgcaaccattataataactggaaacggtggaattcagtggtcaagagggaaacataaagaaagtgagacactgacagaacaggatttacagttatattgcgattttcctaatattattgatgtcagtattaagcaagcaaaccaagagggttcaaatgaaagccgagttgtaactatccataagcaagatggtaaaaatctggaaattgaacttagctcattaagggaagctttgtctttcgtgtcattaattgatggatattatagattaactgcagatgcacatcattacctctgtaaagaagtagcacctccagccgtgcttgaaaatatacaaagcaactgtcatggcccaatttcgatggattttgccattagtaaactgaagaaagcaggtaatcagactggactgtatgtacttcgatgcagtcctaaggactttaataaatattttttgacttttgctgtcgagcgagaaaatgtcattgaatataaacactgtttgattacaaaaaatgagaatgaagagtacaacctcagtgggacaaagaagaacttcagcagtcttaaagatcttttgaattgttaccagatggaaactgttcgctcagacaatataattttccagtttactaaatgctgtcccccaaagccaaaagataaatcaaaccttctagtcttcagaacgaatggtgtttctgatgtaccaacctcaccaacattacagaggcctactcatatgaaccaaatggtgtttcacaaaatcagaaatgaagatttgatatttaatgaaagccttggccaaggcacttttacaaagatttttaaaggcgtacgaagagaagtaggagactacggtcaactgcatgaaacagaagttcttttaaaagttctggataaagcacacagaaactattcagagtctttctttgaagcagcaagtatgatgagcaagctttctcacaagcatttggttttaaattatggagtatgtgtctgtggagacgagaatattctggttcaggagtttgtaaaatttggatcactagatacatatctgaaaaagaataaaaattgtataaatatattatggaaacttgaagttgctaaacagttggcatgggccatgcattttctagaagaaaacacccttattcatgggaatgtatgtgccaaaaatattctgcttatcagagaagaagacaggaagacaggaaatcctcctttcatcaaacttagtgatcctggcattagtattacagttttgccaaaggacattcttcaggagagaataccatgggtaccacctgaatgcattgaaaatcctaaaaatttaaatttggcaacagacaaatggagttttggtaccactttgtgggaaatctgcagtggaggagataaacctctaagtgctctggattctcaaagaaagctacaattttatgaagataggcatcagcttcctgcaccaaagtgggcagaattagcaaaccttataaataattgtatggattatgaaccagatttcaggccttctttcagagccatcatacgagatcttaacagtttgtttactccagattatgaactattaacagaaaatgacatgttaccaaatatgaggataggtgccctagggttttctggtgcctttgaagaccgggatcctacacagtttgaagagagacatttgaaatttctacagcaacttggcaagggtaattttgggagtgtggagatgtgccggtatgaccctctacaggacaacactggggaggtggtcgctgtaaaaaagcttcagcatagtactgaagagcacctaagagactttgaaagggaaattgaaatcctgaaatccctacagcatgacaacattgtaaagtacaagggagtgtgctacagtgctggtcggcgtaatctaaaattaattatggaatatttaccatatggaagtttacgagactatcttcaaaaacataaagaacggatagatcacataaaacttctgcagtacacatctcagatatgcaagggtatggagtatcttggtacaaaaaggtatatccacagggatctggcaacgagaaatatattggtggagaacgagaacagagttaaaattggagattttgggttaaccaaagtcttgccacaagacaaagaatactataaagtaaaagaacctggtgaaagtcccatattctggtatgctccagaatcactgacagagagcaagttttctgtggcctcagatgtttggagctttggagtggttctgtatgaacttttcacatacattgagaagagtaaaagtccaccagcggaatttatgcgtatgattggcaatgacaaacaaggacagatgatcgtgttccatttgatagaacttttgaagaataatggaagattaccaagaccagatggatgcccagatgagatctatatgatcatgacagaatgctggaacaataatgtaaatcaacgcccctcctttagggatctagctcttcgagtggatcaaataagggataacatggctggatgaaagaaatgaccttcattctgagaccaaagtagatttacagaacaaagttttatatttcacattgctgtggactattattacatatatcattattatataaatcatgatgctagccagcaaagatgtgaaaatatctgctcaaaactttcaaagtttagtaagtttttcttcatgaggccaccagtaaaagacattaatgagaattccttagcaaggattttgtaagaagtttcttaaacattgtcagttaacatcactcttgtctggcaaaagaaaaaaaatagactttttcaactcagctttttgagacctgaaaaaattattatgtaaattttgcaatgttaaagatgcacagaatatgtatgtatagtttttaccacagtggatgtataataccttggcatcttgtgtgatgttttacacacatgagggctggtgttcattaatactgttttctaatttttccatagttaatctataattaattacttcactatacaaacaaattaagatgttcagataattgaataagtacctttgtgtccttgttcatttatatcgctggccagcattataagcaggtgtatacttttagcttgtagttccatgtactgtaaatatttttcacataaagggaacaaatgtctagttttatttgtataggaaatttccctgaccctaaataatacattttgaaatgaaacaagcttacaaagatataatctattttattatggtttcccttgtatctatttgtggtgaatgtgttttttaaatggaactatctccaaatttttctaagactactatgaacagttttcttttaaaattttgagattaagaatgccaggaatattgtcatcctttgagctgctgactgccaataacattcttcgatctctgggatttatgctcatgaactaaatttaagcttaagccataaaatagattagattgttttttaaaaatggatagctcattaagaagtgcagcaggttaagaattttttcctaaagactgtatatttgaggggtttcagaattttgcattgcagtcatagaagagatttatttcctttttagaggggaaatgaggtaaataagtaaaaaagtatgcttgttaattttattcaagaatgccagtagaaaattcataacgtgtatctttaagaaaaatgagcatacatcttaaatcttttcaattaagtataaggggttgttcgttgttgtcatttgttatagtgctactccactttagacaccatagctaaaataaaatatggtgggttgtgtgtgtgtgtgtgtgtgtgtgtgtgtgtgtgtgtgtgttatttatacaaaacttaaaatacttgctgttttgattaaaaagaaaatagtttcttactttatttttactggtatgttctacttttttgaaagttgtactgaagacttctgattttgggttgaagggaaggaaaaggaagaaatgttttttacattcattattatacttaaagcatttttaaagcattttaatagttctggatgcagaaatcatctaaaatgacagtgaattaggttttaaaaagattttagatttttttgaaagtttaatttttatttgtaaagactcctcaaggatttgtatatgcaacacagtaaggagatcttccattttactacctttcaagtgaaaaatagcctatcatacaatatgcttgatttcagattttcatactaaaacttaactacatacttaaaagtaggttcttatcaagggtctctaacattgctttttaaaacaagatgtgaactaacttttcttaaacatttttttaaatgcttcatcttttagttttatataaagaatcccacatgtacattcttgtttttagaatggggtgactaccttattataaaattccaagtttccaagagacttcttttcattgaggcttcgtaaagttttccattttgattctgactacacataaaaataagataaccctgtagttattaagttggttctgtacaagaaacaggtaagtaattattgtaccagttaatgccaaaatatttttcacgttaatattcttcagaaacaagggtaaaggtattcttagaattatgtaattctgtaactattccagtatattaagttatacaatctttatataaatgactttttccatgggtacttgtttggaaaatagtcactttttcacgctatttatatatgctgccagtaacactataatttgctatggaagagtgttcttttaacctaaggcttctagtttacagtcaagtgtaattttcatcacaactataacttctggtatttaaattttatttaaacagctacaaaagagttagcaaatacctacagttctgtatctatagagccaatcttgatggtgggtgtggcattatgtgctcactttattgagcctatgttaatttctttagcatgctccccctaaattgaaatagtgatgtagtaaatattcagaagcgattttcttttgcatttttacctaaccaaggaaacgggccacacaccttggtttagggatgttgtgatagcttaccttccagtttttaagaaatgcttcctacaactgctgtcaaccactgtattgtctttaatgaacactgttgtatcccatcctaattcttgtactgaaattatttctcatgaaagtttctctaatatttctaatgaaagtttctctaatttgggggcataatgtactaagaatcagtttgctgtatattagaataaatagtaacagtaagtcagcaggattatccaaacaaaagactaggttttatgagataagcttgatttaagaaaaaaacaattaaagtatgaatatcagaaatactgtgtgtttactctcagattttagttggttggatttaatatcaagataactagctgctaagcgtttcataattctcacagtgatattagatttcaaaatgacactgagagaactgaaaaactacatcagtcaaattcatgtatgtatatcatatagcctttaactttttacattaatcagattcttagtaaaatgcagactgtatacctaaatattaaaatatttacttttataatcttaccttttatttcaatataaataaaattcttcttaggttaaaaaattaatttcagttg

SEQ ID NO: 447084 - DNA, 2905 bp, Homo sapiens
gataatattctttatttctccagattatgaactattaacagaaaatgacatgttaccaaatatgaggataggtgccctagggttttctggtgcctttgaagaccgggatcctacacagtttgaagagagacatttgaaatttctacagcaacttggcaagggtaattttgggagtgtggagatgtgccggtatgaccctctacaggacaacactggggaggtggtcgctgtaaaaaagcttcagcatagtactgaagagcacctaagagactttgaaagggaaattgaaatcctgaaatccctacacattataagcaggtgtatacttttagcttgtagttccatgtactgtaaatatttttcacataaagggaacaaatgtctagttttatttgtataggaaatttccctgaccctaaataatacattttgaaatgaaacaagcttacaaagatataatctattttattatggtttcccttgtatctatttgtggtgaatgtgttttttaaatggaactatctccaaatttttctaagactactatgaacagttttcttttaaaattttgagattaagaatgccaggaatattgtcatcctttgagctgctgactgccaataacattcttcgatctctgggatttatgctcatgaactaaatttaagcttaagccataaaatagattagattgttttttaaaaatggatagctcattaagaagtgcagcaggttaagaattttttcctaaagactgtatatttgaggggtttcagaattttgcattgcagtcatagaagagatttatttcctttttagaggggaaatgaggtaaataagtaaaaaagtatgcttgttaattttattcaagaatgccagtagaaaattcataacgtgtatctttaagaaaaatgagcatacatcttaaatcttttcaattaagtataaggggttgttcgttgttgtcatttgttatagtgctactccactttagacaccatagctaaaataaaatatggtgggttgtgtgtgtgtgtgtgtgtgtgtgtgtgtgtgtgtgtgtgttatttatacaaaacttaaaatacttgctgttttgattaaaaagaaaatagtttcttactttatttttactggtatgttctacttttttgaaagttgtactgaagacttctgattttgggttgaagggaaggaaaaggaagaaatgttttttacattcattattatacttaaagcatttttaaagcattttaatagttctggatgcagaaatcatctaaaatgacagtgaattaggttttaaaaagattttagatttttttgaaagtttaatttttatttgtaaagactcctcaaggatttgtatatgcaacacagtaaggagatcttccattttactacctttcaagtgaaaaatagcctatcatacaatatgcttgatttcagattttcatactaaaacttaactacatacttaaaagtaggttcttatcaagggtctctaacattgctttttaaaacaagatgtgaactaacttttcttaaacatttttttaaatgcttcatcttttagttttatataaagaatcccacatgtacattcttgtttttagaatggggtgactaccttattataaaattccaagtttccaagagacttcttttcattgaggcttcgtaaagttttccattttgattctgactacacataaaaataagataaccctgtagttattaagttggttctgtacaagaaacaggtaagtaattattgtaccagttaatgccaaaatatttttcacgttaatattcttcagaaacaagggtaaaggtattcttagaattatgtaattctgtaactattccagtatattaagttatacaatctttatataaatgactttttccatgggtacttgtttggaaaatagtcactttttcacgctatttatatatgctgccagtaacactataatttgctatggaagagtgttcttttaacctaaggcttctagtttacagtcaagtgtaattttcatcacaactataacttctggtatttaaattttatttaaacagctacaaaagagttagcaaatacctacagttctgtatctatagagccaatcttgatggtgggtgtggcattatgtgctcactttattgagcctatgttaatttctttagcatgctccccctaaattgaaatagtgatgtagtaaatattcagaagcgattttcttttgcatttttacctaaccaaggaaacgggccacacaccttggtttagggatgttgtgatagcttaccttccagtttttaagaaatgcttcctacaactgctgtcaaccactgtattgtctttaatgaacactgttgtatcccatcctaattcttgtactgaaattatttctcatgaaagtttctctaatatttctaatgaaagtttctctaatttgggggcataatgtactaagaatcagtttgctgtatattagaataaatagtaacagtaagtcagcaggattatccaaacaaaagactaggttttatgagataagcttgatttaagaaaaaaacaattaaagtatgaatatcagaaatactgtgtgtttactctcagattttagttggttggatttaatatcaagataactagctgctaagcgtttcataattctcacagtgatattagatttcaaaatgacactgagagaactgaaaaactacatcagtcaaattcatgtatgtatatcatatagcctttaactttttacattaatcagattcttagtaaaatgcagactgtatacctaaatattaaaatatttacttttataatcttaccttttatttcaatataaataaaattcttcttaggttaaaaaattaatttcagttg

SEQ ID NO: 447085 - DNA, 1167 bp, Homo sapiens
ggagacgtcggcttccgaccggaagtgagaagaggaggaagttggctggttgcaccgatctgggggcttcccgggctcgggtaaccggagtgctggtatctaatcgtcgctcaaaagctcctaggtgcgcgggtggatataattcccggcttctcgagaagacactacagcctcaaggaggtatatcccgtgccttacctgactgggggctctgagtccagttgtgttgtcttcaacttagacaccatggaggcacctccagtcaccatgatgcctgtcactgggggcaccattaacatgatggagtacctgttgcagggaagtgttttagatcacagtttggaaagcctcatccaccgccttcgtggtttgtgtgacaacatggaacctgagactttccttgaccatgagatggtattcctccttaagggccagcaagccagcccatttgttctcagggcccgacgctctatggacagggcaggggcaccctggcatctgcgctacctgggacagccagaaatgggagacaagaaccgccatgccctggtgcgaaactgcgtggacattgccacatctgagaacctcaccgacttcttgatggaaatgggcttccgcatggaccatgagtttgttgctaagggacatttgttccgtaagggcatcatgaagattatggtgtacaagattttccgcatcctggtgccagggaacacagacagcactgaggccttgtcactctcctatctcgtggaattaagtgtggtagcacccgctgggcaggacatggtctctgatgacatgaagaacttcgcagaacagctaaaacctctggttcacctagagaaaatagaccccaagaggctcatgtgactaagaggatctgtccacatttggggcctatccttacttgtttgaaaaaatatgtttgctttttttggtttttgttttgttttgtttttgagacagagtctcgctttgcactccagcctgggtgagaagagcgaaactccgtctcaaaaaaaaataaaaatgaagaggggaaaccagaataaattatcttttggaaaggacaatttcttgtttggccatttgtgtataaggttggtaacattagaggctgtgagcttgtgttacatggtaataaagccaatgaagagaaaaaaa

SEQ ID NO: 447086 - DNA, 1075 bp, Homo sapiens
ggagacgtcggcttccgaccggaagtgagaagaggaggaagttggctggttgcaccgatctgggggcttcccgggctcgggtaaccggagtgctggtatctaatcgtcgctcaaaagctcctaggtgcgcgggtggatataattcccggcttctcgagaagacactacagcctcaaggaggtatatcccgtgccttacctgactgggggctctgagtccagttgtgttgtcttcaacttagacaccatggaggcacctccagtcaccatgatgcctgtcactgggggcaccattaacatgatggagtacctgttgcagggaagtgttttagatcacagtttggaaagcctcatccaccgccttcgtggtttgtgtgacaacatggaacctgagactttccttgaccatgagatggtattcctccttaagggccagcaagccagcccatttgttctcagggcccgacgctctatggacagggcaggggcaccctggcatctgcgctacctgggacagccagaaatgggagacaagaaccgccatgccctggtgcgaaactgcgtggacattgccacatctgagaacctcaccgacttcttgatggaaatgggcttccgcatggaccatgagtttgttgctaagggacatttgttccgtaagggcatcatgaagattatggtgtacaagattttccgcatcctggtgccagggaacacagacagcactgaggccttgtcactctcctatctcgtggaattaagtgtggtagcacccgctgggcaggacatggtctctgatgacatgaagaacttcgcagaacagctaaaacctctggttcacctagagaaaatagaccccaagaggctcatgtgactaagaggatctgtccacatttggggcctatccttacttgtttgaaaaaatataaaaaaaaataaaaatgaagaggggaaaccagaataaattatcttttggaaaggacaatttcttgtttggccatttgtgtataaggttggtaacattagaggctgtgagcttgtgttacatggtaataaagccaatgaagagaaaaaaa

SEQ ID NO: 447087 - DNA, 1326 bp, Homo sapiens
ggagacgtcggcttccgaccggaagtgagaagaggaggaagttggctggttgcaccgatctgggggcttcccgggctcgggtaaccggagtgctggtatctaatcgtcgctcaaaagctcctaggtgcgcgggtggatataattcccggcttctcgagaagacactacagcctcaaggaggtatatcccgtgccttacctgactgggggctctgagtccagttgtgttgtcttcaacttagacaccatggaggcacctccagtcaccatgatgcctgtcactgggggcaccattaacatgatggagtacctgttgcagggaagtgttttagatcacagtttggaaagcctcatccaccgccttcgtggtttgtgtgacaacatggaacctgagactttccttgaccatgagatggtattcctccttaagggccagcaagccagcccatttgttctcagggcccgacgctctatggacagggcaggggcaccctggcatctgcgctacctgggacagccagaaatgggagacaagaaccgccatgccctggtgcgaaactgcgtggacattgccacatctgagaacctcaccgacttcttgatggaaatgggcttccgcatggaccatgagtttgttgctaagggacatttgttccgtaagggcatcatgaagattatggtgtacaagattttccgcatcctggtgccagggaacacagacagcactgaggccttgtcactctcctatctcgtggaattaagtgtggtagcacccgctgggcaggacatggtctctgatgacatgaagaacttcgcagaacagctaaaacctctggttcacctagagaaaatagaccccaagaggctcatgtgactaagaggatctgtccacatttggggcctatccttacttgtttgaaaaaatatgtttgctttttttggtttttgttttgttttgtttttgagacagagtctcgctttgtttcccaggctggagtgcagtggcacgatctcggctcactgcaacctctgcctcctgggttcaagcaattctcccacctcagctacttgggaggctgaggctggagaatcgcttgaacccaggaggtgaaggttgcagtgaccagagatgacgccattgcactccagcctgggtgagaagagcgaaactccgtctcaaaaaaaaataaaaatgaagaggggaaaccagaataaattatcttttggaaaggacaatttcttgtttggccatttgtgtataaggttggtaacattagaggctgtgagcttgtgttacatggtaataaagccaatgaagagaaaaaaa

SEQ ID NO: 447088 - DNA, 1019 bp, Homo sapiens
ggagacgtcggcttccgaccggaagtgagaagaggaggaagttggctggttgcaccgatctgggggcttcccgggctcgggtaaccggagtgctggtatctaatcgtcgctcaaaagctcctaggtatatcccgtgccttacctgactgggggctctgagtccagttgtgttgtcttcaacttagacaccatggaggcacctccagtcaccatgatgcctgtcactgggggcaccattaacatgatggagtacctgttgcagggaagtgttttagatcacagtttggaaagcctcatccaccgccttcgtggtttgtgtgacaacatggaacctgagactttccttgaccatgagatggtattcctccttaagggccagcaagccagcccatttgttctcagggcccgacgctctatggacagggcaggggcaccctggcatctgcgctacctgggacagccagaaatgggagacaagaaccgccatgccctggtgcgaaactgcgtggacattgccacatctgagaacctcaccgacttcttgatggaaatgggcttccgcatggaccatgagtttgttgctaagggacatttgttccgtaagggcatcatgaagattatggtgtacaagattttccgcatcctggtgccagggaacacagacagcactgaggccttgtcactctcctatctcgtggaattaagtgtggtagcacccgctgggcaggacatggtctctgatgacatgaagaacttcgcagaacagctaaaacctctggttcacctagagaaaatagaccccaagaggctcatgtgactaagaggatctgtccacatttggggcctatccttacttgtttgaaaaaatataaaaaaaaataaaaatgaagaggggaaaccagaataaattatcttttggaaaggacaatttcttgtttggccatttgtgtataaggttggtaacattagaggctgtgagcttgtgttacatggtaataaagccaatgaagagaaaaaaa

SEQ ID NO: 447089 - DNA, 988 bp, Homo sapiens
aaaaaaaaaaaaaatcactggcctcattttataaggaagacattgagtcccagggtgaggggttatagataggactttctcaagattgcacaggtatatcccgtgccttacctgactgggggctctgagtccagttgtgttgtcttcaacttagacaccatggaggcacctccagtcaccatgatgcctgtcactgggggcaccattaacatgatggagtacctgttgcagggaagtgttttagatcacagtttggaaagcctcatccaccgccttcgtggtttgtgtgacaacatggaacctgagactttccttgaccatgagatggtattcctccttaagggccagcaagccagcccatttgttctcagggcccgacgctctatggacagggcaggggcaccctggcatctgcgctacctgggacagccagaaatgggagacaagaaccgccatgccctggtgcgaaactgcgtggacattgccacatctgagaacctcaccgacttcttgatggaaatgggcttccgcatggaccatgagtttgttgctaagggacatttgttccgtaagggcatcatgaagattatggtgtacaagattttccgcatcctggtgccagggaacacagacagcactgaggccttgtcactctcctatctcgtggaattaagtgtggtagcacccgctgggcaggacatggtctctgatgacatgaagaacttcgcagaacagctaaaacctctggttcacctagagaaaatagaccccaagaggctcatgtgactaagaggatctgtccacatttggggcctatccttacttgtttgaaaaaatataaaaaaaaataaaaatgaagaggggaaaccagaataaattatcttttggaaaggacaatttcttgtttggccatttgtgtataaggttggtaacattagaggctgtgagcttgtgttacatggtaataaagccaatgaagagaaaaaaa

SEQ ID NO: 447090 - DNA, 1874 bp, Homo sapiens
ggagacgtcggcttccgaccggaagtgagaagaggaggaagttggctggttgcaccgatctgggggcttcccgggctcgggtaaccggagtgctggtatctaatcgtcgctcaaaagctcctaggtgcgcgggtggatataattcccggcttctcgagaagacactacagcctcaaggaggtatatcccgtgccttacctgactgggggctctgagtccagttgtgttgtcttcaacttagacaccatggaggcacctccagtcaccatgatgcctgtcactgggggcaccattaacatgatggagtacctgttgcagggaagtgttttagatcacagtttggaaagcctcatccaccgccttcgtggtttgtgtgacaacatggaacctgagactttccttgaccatgagatggtattcctccttaagggccagcaagccagcccatttgttctcagggcccgacgctctatggacagggcaggggcaccctggcatctgcgctacctgggacagccagaaatgggagacaagaaccgccatgccctggtgcgaaactgcgtggacattgccacatctgagaacctcaccgacttcttgatggaaatgggcttccgcatggaccatgagtttgttgctaagggacatttgttccgtaagggcatcatgaagattatggtgtacaagattttccgcatcctggtgccagggaacacagacagcactgaggccttgtcactctcctatctcgtggaattaagtgtggtagcacccgctgggcaggacatggtctctgatgacatgaagaacttcgcagaacagctaaaacctctggttcacctagagaaaatagaccccaagaggctcatgtgactaagaggatctgtccacatttggggcctatccttacttgtttgaaaaaatatgtttgctttttttggtttttgttttgttttgtttttgagacagagtctcgctttgtttcccaggctggagtgcagtggcacgatctcggctcactgcaacctctgcctcctgggttcaagcaattctcccacctcagcctcctgagtagctgggattacaggcacatgccaccatgctcagctaatttttgtatttttagtagaaatggggattcaccatgttggtcaggctattctcgaactcctgacctcgtgatccacccaccttggcctcccaaagtgctgggattacaggcatgagccaccacgcctggccaaaaaaatatgttttaaatgtcccatttcaccattgccaggcaggcattcttccttcagggagaggatggtgagaattaattggttctttgcactgttctcctcatgtggcgatttcactttcatgacagcctttctatattaaaggctcaggatgtcacggagaatctatctaatcccactgtattaagaggggaaaccgggccaagcgcagtggctcacacctctaatcccagcactttgggaggctgaggtaggtggatcacccaaggtcaggagtttgagaccagcctggccaaatggtgaaaccccatctctacgaaaaatacaaaatttagccgggcatggtagcaggcgcttgtaatcccagctacttgggaggctgaggctggagaatcgcttgaacccaggaggtgaaggttgcagtgaccagagatgacgccattgcactccagcctgggtgagaagagcgaaactccgtctcaaaaaaaaataaaaatgaagaggggaaaccagaataaattatcttttggaaaggacaatttcttgtttggccatttgtgtataaggttggtaacattagaggctgtgagcttgtgttacatggtaataaagccaatgaagagaaaaaaa

SEQ ID NO: 447091 - DNA, 1113 bp, Homo sapiens
ggagacgtcggcttccgaccggaagtgagaagaggaggaagttggctggttgcaccgatctgggggcttcccgggctcgggtaaccggagtgctggtatctaatcgtcgctcaaaagctcctaggtgcgcgggtggatataattcccggcttctcgagaagacactacagcctcaaggaggtatatcccgtgccttacctgactgggggctctgagtccagttgtgttgtcttcaacttagacaccatggaggcacctccagtcaccatgatgcctgtcactgggggcaccattaacatgatggagtacctgttgcagggaagtgttttagatcacagtttggaaagcctcatccaccgccttcgtggtttgtgtgacaacatggaacctgagactttccttgaccatgagatggtattcctccttaagggccagcaagccagcccatttgttctcagggcccgacgctctatggacagggcaggggcaccctggcatctgcgctacctgggacagccagaaatgggagacaagaaccgccatgccctggtgcgaaactgcgtggacattgccacatctgagaacctcaccgacttcttgatggaaatgggcttccgcatggaccatgagtttgttgctaagggacatttgttccgtaagggcatcatgaagattatggtgtacaagattttccgcatcctggtgccagggaacacagacagcactgaggccttgtcactctcctatctcgtggaattaagtgtggtagcacccgctgggcaggacatggtctctgatgacatgaagaacttcgcagaacagctaaaacctctggttcacctagagaaaatagaccccaagaggctcatgtgactaagaggatctgtccacatttggggcctatccttacttgtttgaaaaaatatgcactccagcctgggtgagaagagcgaaactccgtctcaaaaaaaaataaaaatgaagaggggaaaccagaataaattatcttttggaaaggacaatttcttgtttggccatttgtgtataaggttggtaacattagaggctgtgagcttgtgttacatggtaataaagccaatgaagagaaaaaaa

SEQ ID NO: 447092 - DNA, 1039 bp, Homo sapiens
  misc_feature (163)..(163): n is a, c, g, or t
gtggtcgctaggcttgttttccttagtgagcatcctggtcctatgactagtgcttggtgttcttctaactaactaggaatacgcgcggaaggacaactcgagcgttctgaacagattatccctagatggagttctgaggtctgttagcgtgtgatgtctattncaagctaggtaggttcgctaacatgtcgagcttcgatatcaatagttagcgcccctgcccacgtgaacatgatgcctgtcactgggggcaccattaacatgatggagtacctgttgcagggaagtgttttagatcacagtttggaaagcctcatccaccgccttcgtggtttgtgtgacaacatggaacctgagactttccttgaccatgagatggtattcctccttaagggccagcaagccagcccatttgttctcagggcccgacgctctatggacagggcaggggcaccctggcatctgcgctacctgggacagccagaaatgggagacaagaaccgccatgccctggtgcgaaactgcgtggacattgccacatctgagaacctcaccgacttcttgatggaaatgggcttccgcatggaccatgagtttgttgctaagggacatttgttccgtaagggcatcatgaagattatggtgtacaagattttccgcatcctggtgccagggaacacagacagcactgaggccttgtcactctcctatctcgtggaattaagtgtggtagcacccgctgggcaggacatggtctctgatgacatgaagaacttcgcagaacagctaaaacctctggttcacctagagaaaatagaccccaagaggctcatgtgactaagaggatctgtccacatttggggcctatccttacttgtttgaaaaaatataaaaaaaaataaaaatgaagaggggaaaccagaataaattatcttttggaaaggacaatttcttgtttggccatttgtgtataaggttggtaacattagaggctgtgagcttgtgttacatggtaataaagccaatgaagagaaaaaaa

SEQ ID NO: 447093 - DNA, 428 bp, Homo sapiens
aaatggaatactttcaaaccttcattagtatcaaatatatatacatacacaaacatatatatgtatgtacatatatttattttgtttgtttttttcccccgagacagggtcactcaggctggattgcagtggtgtgatcttagctccctgcagccttgaactcctgggctcaaaggatcgtcctccttagcctcctgagtagctgggattacaggcgtgtgacaccatacctggctaatttttaaattttttttgtagagacatcatctcattatgttgcccagactgatcttgaacttctggactcaagcaatcctcctgccttggcctctcgaagtgttgtgaaggttaaatgagttaatacataaagtgatctgaatgctgcctgacacaaagaaagcactcaataaatagtaacttttaaagtt

SEQ ID NO: 447094 - DNA, 2147 bp, Homo sapiens
agtagatcaaaacagctattttttgtcactactgtcatttaacagaaatgctgcatacgtcatctaatctactaataacaaacttatgaggtaagtaacgttgtccccatttgacacacgagcaaactgaggtttagattaggcaactcattggattacatgctcctcttaatggcacagagggtgtgttccaggacatggtgcttgccattatcatttggtactgctgctcactgtgttggtcctatgagtttcttcagtctatgaatttcaggtcagggtggtcgacgtcttacagagatgcctgtaatcctgtcagcatgagattgcatgggacctctgcggtttggtcgcgcatttaccgcgcctgtcgctgggtcagacgacctggcagtagagggtgaaggatggagaaggcagaaggcagggcacggagactactagtcccaggattccacgggcgccttccggcggaaagtgtttgtcatatgggcggggaccctggacgacattcgggcagcggcggccgctgggtgcagccgagcggtgtggagcggagagaatactcgaagggctctcctgatactaacagttttacgatttaaaacttcgccagaatttcgacagggtctcactgtattgcccaggttggtctcgaactcctggcttcaagcgattctcccacctcagcctcccaaagtgctgggattacaggcgtgagccaccacgcctggcctcactcaaacagtaaacgaggtatgtgacgcattcccagactcttcagccaactgagcatcagcttcttcacagcaattgggtcctgattaatgtcctcccaagacagacttcattggatccacgatcaagaggactctgccaggtttttctgacccctctacattgctataaagtgccaaggccttaagacttgggtacgtgtgttacaacggcaagagtgccagcgccaacaaaagacccattggacctgtcagctcctctgtttcaccaagcagacacaataaccttaccaacaaagcagagtaagccaagtgcctctgtgtgacaccaccagcagctgatgacgcataagaaaaatataactaatttagactagagccctatctcttcttgagaagctgggatttgaaggagctatcctgagatctgtactgctagtaagtgactgataacattataaactggatcggtccctgagttcagagactgagttgcaattgagtgaaaaatagacaacgaaatcttgaagaattgcacggaggtgcaagccaagtttatttggctctccaaataatattggttgaactaagaaattggtaaacgaaacctgtaataggactggtgtttgggcgtctctctctgtcactgttgtctcttgctgtcacattgctgtctgtgttgtctttctaggtccagatgttttcagataattcacattgccctgattgtggacaacagtggttccctagtttagaactaggccactggttgtaccaaactgaacttgttgaaaatgaatgttaccaggtattcttagaccgtattaacagagctgattattgtcctgagtgttatcctgataatcctgctaatagaagccttgttcttccttggtctttcccacttgagtgggctccccagaatctcaccagatggacctttgagaaagcttgccatccatttcttctgggtcctccactggttagaaaaagaatacatgactctcgagtagctggttttaaccctgcattacagttaatcttgaccagaacagataaaaccttaaacaaaaaactgggccaaaacaaatagcttctataatagtcaaatttgtcaagtctagaggcttttgtgtaggtagcccaaggaagatggaaaaataattcatttctaagtctgacccagattgtcactactttgggaactgcttaaattgttggatctgcttccgtggcctatacatattttattcacatgaatttagttagtattccagccagcctgttcatctagactgaggctaatctgttcatctagactgaggctaatccgtatttcctataaactgttttggaactaacttaccactcctaaaaaaatttctgcaacctaatgagtgtcatatgaca

SEQ ID NO: 447095 - DNA, 2403 bp, Homo sapiens
agtagatcaaaacagctattttttgtcactactgtcatttaacagaaatgctgcatacgtcatctaatctactaataacaaacttatgaggtaagtaacgttgtccccatttgacacacgagcaaactgaggtttagattaggcaactcattggattacatgctcctcttaatggcacagagggtgtgttccaggacatggtgcttgccattatcatttggtactgctgctcactgtgttggtcctatgagtttcttcagtctatgaatttcaggtcagggtggtcgacgtcttacagagatgcctgtaatcctgtcagcatgagattgcatgggacctctgcggtttggtcgcgcatttaccgcgcctgtcgctgggtcagacgacctggcagtagagggtgaaggatggagaaggcagaaggcagggcacggagactactagtcccaggattccacgggcgccttccggcggaaagtgtttgtcatatgggcggggaccctggacgacattcgggcagcggcggccgctgggtgcagccgagcggtgtggagcggagagaatactcgaagggctctcctgatactaacagttttacgatttaaaacttcgccagaatttttcgagaccagcctgaccaacatggagaaaccccgtttctactaaaaatacacagttgggctggggtggtggctcatgcctataataccagcactttgggaggctgaggcgggcagatcacctgaggttgggagttcaagaccaacctgaccaacatggagaaaccccgtctctcctaaaaatacaaaagtagccgggcatggtggtgcatacctgtaatcccagctactcgggaggttgaagcaagagaatcacttgaactcaggaggcggaggttgcagtgagccaagattgcaccattgccctccagcctgagcaacaagagtgaaactccgtctcaaaaaaatatccctaaacaacacattaattttatatccttttgaaactttatgtatgtgacgcattcccagactcttcagccaactgagcatcagcttcttcacagcaattgggtcctgattaatgtcctcccaagacagacttcattggatccacgatcaagaggactctgccaggtttttctgacccctctacattgctataaagtgccaaggccttaagacttgggtacgtgtgttacaacggcaagagtgccagcgccaacaaaagacccattggacctgtcagctcctctgtttcaccaagcagacacaataaccttaccaacaaagcagagtaagccaagtgcctctgtgtgacaccaccagcagctgatgacgcataagaaaaatataactaatttagactagagccctatctcttcttgagaagctgggatttgaaggagctatcctgagatctgtactgctagtaagtgactgataacattataaactggatcggtccctgagttcagagactgagttgcaattgagtgaaaaatagacaacgaaatcttgaagaattgcacggaggtgcaagccaagtttatttggctctccaaataatattggttgaactaagaaattggtaaacgaaacctgtaataggactggtgtttgggcgtctctctctgtcactgttgtctcttgctgtcacattgctgtctgtgttgtctttctaggtccagatgttttcagataattcacattgccctgattgtggacaacagtggttccctagtttagaactaggccactggttgtaccaaactgaacttgttgaaaatgaatgttaccaggtattcttagaccgtattaacagagctgattattgtcctgagtgttatcctgataatcctgctaatagaagccttgttcttccttggtctttcccacttgagtgggctccccagaatctcaccagatggacctttgagaaagcttgccatccatttcttctgggtcctccactggttagaaaaagaatacatgactctcgagtagctggttttaaccctgcattacagttaatcttgaccagaacagataaaaccttaaacaaaaaactgggccaaaacaaatagcttctataatagtcaaatttgtcaagtctagaggcttttgtgtaggtagcccaaggaagatggaaaaataattcatttctaagtctgacccagattgtcactactttgggaactgcttaaattgttggatctgcttccgtggcctatacatattttattcacatgaatttagttagtattccagccagcctgttcatctagactgaggctaatctgttcatctagactgaggctaatccgtatttcctataaactgttttggaactaacttaccactcctaaaaaaatttctgcaacctaatgagtgtcatatgaca

SEQ ID NO: 447096 - DNA, 1345 bp, Homo sapiens
agtagatcaaaacagctattttttgtcactactgtcatttaacagaaatgctgcatacgtcatctaatctactaataacaaacttatgaggtaagtaacgttgtccccatttgacacacgagcaaactgaggtttagattaggcaactcattggattacatgctcctcttaatggcacagagggtgtgttccaggacatggtgcttgccattatcatttggtactgctgctcactgtgttggtcctatgagtttcttcagtctatgaatttcaggtcagggtggtcgacgtcttacagagatgcctgtaatcctgtcagcatgagattgcatgggacctctgcggtttggtcgcgcatttaccgcgcctgtcgctgggtcagacgacctggcagtagagggtgaaggatggagaaggcagaaggcagggcacggagactactagtcccaggattccacgggcgccttccggcggaaagtgtttgtcatatgggcggggaccctggacgacattcgggcagcggcggccgctgggtgcagccgagcggtgtggagcggagagaatactcgaagggctctcctgatactaacagttttacgatttaaaacttcgccagaatttcgacagggtctcactgtattgcccaggttggtctcgaactcctggcttcaagcgattctcccacctcagcctcccaaagtgctgggattacaggcgtgagccaccacgcctggcctcactcaaacagtaaacgaggtatgtgacgcattcccagactcttcagccaactgagcatcagcttcttcacagcaattgggtcctgattaatgtcctcccaagacagacttcattggatccacgatcaagaggactctgccaggtttttctgacccctctacattgctataaagtgccaaggccttaagacttgggtacgtgtgttacaacggcaagagtgccagcgccaacaaaagacccattggacctgtcagctcctctgtttcaccaagcagacacaataaccttaccaacaaagcagagtaagccaagtgcctctgtgtgacaccaccagcagctgatgacgcataagaaaaatataactaatttagactagagccctatctcttcttgagaagctgggatttgaaggagctatcctgagatctgtactgctaagacatcatctcattatgttgcccagactgatcttgaacttctggactcaagcaatcctcctgccttggcctctcgaagtgttgtgaaggttaaatgagttaatacataaagtgatctgaatgctgcctgacacaaagaaagcactcaataaatagtaacttttaaagtt

SEQ ID NO: 447097 - DNA, 1224 bp, Homo sapiens
agtagatcaaaacagctattttttgtcactactgtcatttaacagaaatgctgcatacgtcatctaatctactaataacaaacttatgaggtaagtaacgttgtccccatttgacacacgagcaaactgaggtttagattaggcaactcattggattacatgctcctcttaatggcacagagggtgtgttccaggacatggtgcttgccattatcatttggtactgctgctcactgtgttggtcctatgagtttcttcagtctatgaatttcaggtcagggtggtcgacgtcttacagagatgcctgtaatcctgtcagcatgagattgcatgggacctctgcggtttggtcgcgcatttaccgcgcctgtcgctgggtcagacgacctggcagtagagggtgaaggatggagaaggcagaaggcagggcacggagactactagtcccaggattccacgggcgccttccggcggaaagtgtttgtcatatgggcggggaccctggacgacattcgggcagcggcggccgctgggtgcagccgagcggtgtggagcggagagaatactcgaagggctctcctgatactaacagttttacgatttaaaacttcgccagaatttttcgagaccagcctgaccaacatggagaaaccccgtttctactaaaaatacacagttgggctggggtggtggctcatgcctataataccagcactttgggaggctgaggcgggcagatcacctgaggttgggagttcaagaccaacctgaccaacatggagaaaccccgtctctcctaaaaatacaaaagtagccgggcatggtggtgcatacctgtaatcccagctactcgggaggttgaagcaagagaatcacttgaactcaggaggcggaggttgcagtgagccaagattgcaccattgccctccagcctgagcaacaagagtgaaactccgtctcaaaaaaatatccctaaacaacacattaattttatatccttttgaaactttatgtaagtggaaagtttatataagaatgtgtgcatgtgtttatttttttccttgtgctacttgcattttttttttaagctcaacattcttgagtttcatctgtgtttagaatgacagtatcctattgtacagcaatacccttaatttattcattctcccgttcgtggccattgtggctgttattttgctattacacagtgctaccatgaatatt

SEQ ID NO: 447098 - DNA, 1284 bp, Homo sapiens
agtagatcaaaacagctattttttgtcactactgtcatttaacagaaatgctgcatacgtcatctaatctactaataacaaacttatgaggtaagtaacgttgtccccatttgacacacgagcaaactgaggtttagattaggcaactcattggattacatgctcctcttaatggcacagagggtgtgttccaggacatggtgcttgccattatcatttggtactgctgctcactgtgttggtcctatgagtttcttcagtctatgaatttcaggtcagggtggtcgacgtcttacagagatgcctgtaatcctgtcagcatgagattgcatgggacctctgcggtttggtcgcgcatttaccgcgcctgtcgctgggtcagacgacctggcagtagagggtgaaggatggagaaggcagaaggcagggcacggagactactagtcccaggattccacgggcgccttccggcggaaagtgtttgtcatatgggcggggaccctggacgacattcgggcagcggcggccgctgggtgcagccgagcggtgtggagcggagagaatactcgaagggctctcctgatactaacagttttacgatttaaaacttcgccagaatttcgacagggtctcactgtattgcccaggttggtctcgaactcctggcttcaagcgattctcccacctcagcctcccaaagtgctgggattacaggcgtgagccaccacgcctggcctcactcaaacagtaaacgagtcactgtatatatgccttatttcctgggtccatgggaagcatgagtctgttgggacttgggacaagaagaaaacaagacatcttcacaaggaaaaccaagtactaaaaaaagtatcctcccaactctgaagagatagaacacaaacatggccgacagtggacttagggaacctcaagaggactctcaaaaggatttggaaaatgatccatcagtaaattctcaggcgcaggagaccacaatcatagcaagtaatgctgaagaagctgagatcctacactctgcctgtggtcttagcaaagaccaccaagaggtagagacagaaggtccagaaagtgcagatacaggtgataaatcagaaagtccagatgaagcaaatgtggggaaacatccaaaggataaaacagaagatgagaacaagcagagttttctggatggcggaaaagggcatcacctcccttcagaaaatctgggaagagcagatgcacacttagggagcagctctgtggccctccctaaggaagcgagtg

SEQ ID NO: 447099 - DNA, 570 bp, Homo sapiens
cctctgcctcccaggctcaagtgatcctcccacctcagcagctgggactacagtcactgtatatatgccttatttcctgggtccatgggaagcatgagtctgttgggacttgggacaagaagaaaacaagacatcttcacaaggaaaaccaagtactaaaaaaagtatcctcccaactctgaagagatagaacacaaacatggccgacagtggacttagggaacctcaagaggactctcaaaaggatttggaaaatgatccatcagtaaattctcaggcgcaggagaccacaatcatagcaagtaatgctgaagaagctgagatcctacactctgcctgtggtcttagcaaagaccaccaagaggtagagacagaaggtccagaaagtgcagatacaggtgataaatcagaaagtccagatgaagcaaatgtggggaaacatccaaaggataaaacagaagatgagaacaagcagagttttctggatggcggaaaagggcatcacctcccttcagaaaatctgggtaaagaacccttggatccagatcccagccattctccaagtgacaa

SEQ ID NO: 447100 - DNA, 1757 bp, Homo sapiens
  misc_feature (14)..(14): n is a, c, g, or t
  misc_feature (59)..(59): n is a, c, g, or t
tccgtgtcttcagnaccccccacattggctgacagtgcctgtccagcccctctgcctgntgcggtggagacggcttcgggccaggcggggctcctgctgtctcaggctttggtgtggaggggaggggcagcggcggccgctgggtgcagccgagcggtgtggagcggagagaatactcgaagggctctcctgatactaacagttttacgatttaaaacttcgccagaatttcgacagggtctcactgtattgcccaggttggtctcgaactcctggcttcaagcgattctcccacctcagcctcccaaagtgctgggattacaggcgtgagccaccacgcctggcctcactcaaacagtaaacgaggtatgtgacgcattcccagactcttcagccaactgagcatcagcttcttcacagcaattgggtcctgattaatgtcctcccaagacagacttcattggatccacgatcaagaggactctgccaggtttttctgacccctctacattgctataaagtgccaaggccttaagacttgggtacgtgtgttacaacggcaagagtgccagcgccaacaaaagacccattggacctgtcagctcctctgtttcaccaagcagacacaataaccttaccaacaaagcagagtaagccaagtgcctctgtgtgacaccaccagcagctgatgacgcataagaaaaatataactaatttagactagagccctatctcttcttgagaagctgggatttgaaggagctatcctgagatctgtactgctagtaagtgactgataacattataaactggatcggtccctgagttcagagactgagttgcaattgagtgaaaaatagacaacgaaatcttgaagaattgcacggaggtgcaagccaagtttatttggctctccaaataatattggttgaactaagaaattggtaaacgaaacctgtaataggactggtgtttgggcgtctctctctgtcactgttgtctcttgctgtcacattgctgtctgtgttgtctttctaggtccagatgttttcagataattcacattgccctgattgtggacaacagtggttccctagtttagaactaggccactggttgtaccaaactgaacttgttgaaaatgaatgttaccaggtattcttagaccgtattaacagagctgattattgtcctgagtgttatcctgataatcctgctaatagaagccttgttcttccttggtctttcccacttgagtgggctccccagaatctcaccagatggacctttgagaaagcttgccatccatttcttctgggtcctccactggttagaaaaagaatacatgactctcgagtagctggttttaaccctgcattacagttaatcttgaccagaacagataaaaccttaaacaaaaaactgggccaaaacaaatagcttctataatagtcaaatttgtcaagtctagaggcttttgtgtaggtagcccaaggaagatggaaaaataattcatttctaagtctgacccagattgtcactactttgggaactgcttaaattgttggatctgcttccgtggcctatacatattttattcacatgaatttagttagtattccagccagcctgttcatctagactgaggctaatctgttcatctagactgaggctaatccgtatttcctataaactgttttggaactaacttaccactcctaaaaaaatttctgcaacctaatgagtgtcatatgaca

SEQ ID NO: 447101 - DNA, 1273 bp, Homo sapiens
agtagatcaaaacagctattttttgtcactactgtcatttaacagaaatgctgcatacgtcatctaatctactaataacaaacttatgaggtaagtaacgttgtccccatttgacacacgagcaaactgaggtttagattaggcaactcattggattacatgctcctcttaatggcacagagggtgtgttccaggacatggtgcttgccattatcatttggtactgctgctcactgtgttggtcctatgagtttcttcagtctatgaatttcaggtcagggtggtcgacgtcttacagagatgcctgtaatcctgtcagcatgagattgcatgggacctctgcggtttggtcgcgcatttaccgcgcctgtcgctgggtcagacgacctggcagtagagggtgaaggatggagaaggcagaaggcagggcacggagactactagtcccaggattccacgggcgccttccggcggaaagtgtttgtcatatgggcggggaccctggacgacattcgggcagcggcggccgctgggtgcagccgagcggtgtggagcggagagaatactcgaagggctctcctgatactaacagttttacgatttaaaacttcgccagaatttcgacagggtctcactgtattgcccaggttggtctcgaactcctggcttcaagcgattctcccacctcagcctcccaaagtgctgggattacaggcgtgagccaccacgcctggcctcactcaaacagtaaacgagtcactgtatatatgccttatttcctgggtccatgggaagcatgagtctgttgggacttgggacaagaagaaaacaagacatcttcacaaggaaaaccaagtactaaaaaaagtatcctcccaactctgaagagatagaacacaaacatggccgacagtggacttagggaacctcaagaggactctcaaaaggatttggaaaatgatccatcagtaaattctcaggcgcaggagaccacaatcatagcaagtaatgctgaagaagctgagatcctacactctgcctgtggtcttagcaaagaccaccaagaggtagagacagaaggtccagaaagtgcagatacaggtgataaatcagaaagtccagatgaagcaaatgtggggaaacatccaaaggataaaacagaagatgagaacaagcagagttttctggatggcggaaaagggcatcacctcccttcagaaaatctgggtaaagaacccttggatccagatcccagccattctccaagtgacaa

SEQ ID NO: 447102 - DNA, 4730 bp, Homo sapiens
gaagactgccgggatccaggtctccggggtccgctttggccagaggcgcggaaggaagcagtgcccggcgacactgcacccatcccggctgcttttgctgcgccctctcagcttcccaagaaaggcatcgtcatgtgatcatcacctaagaactagaacatcagcaggccctagaagcctcactcttgcccctccctttaatatctcaaaggatgacacttctgtggtgtgtagtgagtctctacttttatggaatcctgcaaagtgatgcctcagaacgctgcgatgactggggactagacaccatgaggcaaatccaagtgtttgaagatgagccagctcgcatcaagtgcccactctttgaacacttcttgaaattcaactacagcacagcccattcagctggccttactctgatctggtattggactaggcaggaccgggaccttgaggagccaattaacttccgcctccccgagaaccgcattagtaaggagaaagatgtgctgtggttccggcccactctcctcaatgacactggcaactatacctgcatgttaaggaacactacatattgcagcaaagttgcatttcccttggaagttgttcaaaaagacagctgtttcaattcccccatgaaactcccagtgcataaactgtatatagaatatggcattcagaggatcacttgtccaaatgtagatggatattttccttccagtgtcaaaccgactatcacttggtatatgggctgttataaaatacagaattttaataatgtaatacccgaaggtatgaacttgagtttcctcattgccttaatttcaaataatggaaattacacatgtgttgttacatatccagaaaatggacgtacgtttcatctcaccaggactctgactgtaaaggtagtaggctctccaaaaaatgcagtgccccctgtgatccattcacctaatgatcatgtggtctatgagaaagaaccaggagaggagctactcattccctgtacggtctattttagttttctgatggattctcgcaatgaggtttggtggaccattgatggaaaaaaacctgatgacatcactattgatgtcaccattaacgaaagtataagtcatagtagaacagaagatgaaacaagaactcagattttgagcatcaagaaagttacctctgaggatctcaagcgcagctatgtctgtcatgctagaagtgccaaaggcgaagttgccaaagcagccaaggtgaagcagaaagtgccagctccaagatacacagtggaactggcttgtggttttggagccacagtcctgctagtggtgattctcattgttgtttaccatgtttactggctagagatggtcctattttaccgggctcattttggaacagatgaaaccattttagatggaaaagagtatgatatttatgtatcctatgcaaggaatgcggaagaagaagaatttgtattactgaccctccgtggagttttggagaatgaatttggatacaagctgtgcatctttgaccgagacagtctgcctgggggaattgtcacagatgagactttgagcttcattcagaaaagcagacgcctcctggttgttctaagccccaactacgtgctccagggaacccaagccctcctggagctcaaggctggcctagaaaatatggcctctcggggcaacatcaacgtcattttagtacagtacaaagctgtgaaggaaacgaaggtgaaagagctgaagagggctaagacggtgctcacggtcattaaatggaaaggggaaaaatccaagtatccacagggcaggttctggaagcagctgcaggtggccatgccagtgaagaaaagtcccaggcggtctagcagtgatgagcagggcctctcgtattcatctttgaaaaatgtatgaaaggaataatgaaaagggtaaaaagaacaaggggtgctccaggaagaaagagtccccccagtcttcattcgcagtttatggtttcataggcaaaaataatggtctaagcctcccaatagggataaatttagggtgactgtgtggctgactattctgcttcctcaggcaacactaaagtttagaaagatatcatcaacgttctgtcaccagtctctgatgccactatgttctttgcaggcaaagacttgttcaatgcgaatttccccttctacattgtctatccctgtttttatatgtctccattctttttaaaatcttaacatatggagcagcctttcctatgaatttaaatatgcctttaaaataagtcactgttgacagggtcatgagtttccgagtatagttttctttttatcttttttactcgtccgttgaaaagataatcaaggcctacattttagctgaggataatgaacttttttcctcattcggctgtataatacataaccacagcaagactgacatccacttaggatgatacaaagcagtgtaactgaaaatgtttcttttaattgatttaaaggacttgtcttctataccacccttgtcctcatctcaggtaatttatgaaatctatgtaaacttgaaaaatatttcttaatttttgtttttgctccagtcaattcctgattatccacaggtcaacccacattttttcattccttctccctatctgcttatatcgcattgctcatttagagtttgcaggaggctccatactaggttcagtctgaaagaaatctcctaatggtgctatagagagggaggtaacagaaagactcttttagggcatttttctgactcatgaaaagagcacagaaaaggatgtttggcaatttgtcttttaagtcttaaccttgctaatgtgaatactgggaaagtgattttttctcactcgtttttgttgctccattgtaaagggcggaggtcagtcttagtggccttgagagttgcttttggcattaatattctaagagaattaactgtatttcctgtcacctattcactagtgcaggaaatatacttgctccaaataagtcagtatgagaagtcactgtcaatgaaagttgttttgtttgttttcagtaatattttgctgtttttaagacttggaaaactaagtgcagagtttacagagtggtaaatatctatgttacatgtagattatacatatatatacacacgtgtatatgagatatatatcttatatctccacaaacacaaattatatatatacatatccacacacatacattacatatatctgtgtatataaatccacatgcacatgaaatatatatatatatataatttgtgtgtgtgtatgtgtatgtatatgactttaaatagctatgggtacaatattaaaaaccactggaactcttgtccagtttttaaattatgtttttactggaatgtttttgtgtcagtgttttctgtacatattatttgttaattcacagctcacagagtgatagttgtcatagttcttgccttccctaagtttatataaataacttaagtattgctacagtttatctaggttgcagtggcatctgctgtgcacagagcttccatggtcactgctaagcagtagccagccatcgggcattaattgatttcctactatattcccagcagacacatttagaaactaagctatgttaacctcagtgctcaactatttgaactgttgagtgataaaggaaacaaatataactgtaaatgaatcttggtatcctgtgaaacagaataattcgtaatttaagaaagcccttatcccggtaacatgaatgttgatgaacaaatgtaaaattatatcctatatttaagtacccataataaatcatttccctctataagtgttattgattattttaaattgaaaaaagtttcacttggatgaaaaaagtagaaaagtaggtcattcttggatctacttttttttagccttattaatatttttccctattagaaaccacaattactccctctattaacccttcacttactagaccagaaaagaacttattccagataagctttgaatatcaattcttacataaactttaggcaaacagggaatagtctagtcaccaaaggaccattctcttgccaatgctgcattccttttgcacttttggattccatatttatcccaaatgctgttgggcacccctagaaataccttgatgttttttctatttatatgcctgcctttggtacttaattttacaaatgctgtaatataaagcatatcaagtttatgtgatacgtatcattgcaagagaatttgtttcaagatttttttttaatgttccagaagatggccaatagagaacattcaagggaaatggggaaacataatttagagaacaagaacaaaccatgtctcaaatttttttaaaaaaaattaatggttttaaatatatgctatagggacgttccatgcccaggttaacaaagaactgtgatatatagagtgtctaattacaaaatcatatacgatttatttaattctcttctgtattgtaacttagatgattcccaaggactctaataaaaaatcacttcattgtatttggaaacaaaaacatcattcattaattacttattttctttccataggttttaatattttgagagtgtcttttttatttcattcatgaacttttgtatttttcatttttcatttgatttgtaaatttacttatgttaaaaataaaccatttattttcagctttg

SEQ ID NO: 447103 - DNA, 1005 bp, Homo sapiens
gaagactgccgggatccaggtctccggggtccgctttggccagaggcgcggaaggaagcagtgcccggcgacactgcacccatcccggctgcttttgctgcgccctctcagcttcccaagaaaggatgacacttctgtggtgtgtagtgagtctctacttttatggaatcctgcaaagtgatgcctcaggtaagtgaatggcttttgacaatgtattaaaatgcaagtcatgcgtagggtaatgagtccactcttcctgaaaatgaatttaaataaacataatgttattcatgtccattgtcttctgcggtagcaaataatcataaagcagaataatagaattttgatgatgggaaagaaccattgctgtctctagtcttcatgggatagagtacacagggggcagtgggccgctgtgtttaaacacaggtatttttcattaccttcacactcagccaactagaatattgcttttttcccttacctcaggtcctatgggggaaaaatgggagtgataatagcacaatctgtttttcaaatttgagccagtggtggaaaagttatcagtggtaataatccattgagatgttaaataaaataatgagtttttgtcatattgtttctatataggaaaaagaaaggatctgtctttagactcattctttctctggatgttgctttataagaggaaccagctaagacctttatagagtttgaaaaccaaactcagtcatcatgggcctggatcacgtgaaattagatatggaagagacttgctatttgaaagtccatcttttcagatctcctcttcttcccagaattatgcccagaatcactctctatctctgactattaatcattacatttcagcctatgtttttggactaatcaaattcttagaaagtttttagtacataaaactgaaatttgtctctttgattttagtatctaaaactgaaatttgtctctttccaaacatttacttggttcaactgtaggactgaa

SEQ ID NO: 447104 - DNA, 1092 bp, Homo sapiens
gaagactgccgggatccaggtctccggggtccgctttggccagaggcgcggaaggaagcagtgcccggcgacactgcacccatcccggctgcttttgctgcgccctctcagcttcccaagaaaggcatcgtcatgtgatcatcacctaagaactagaacatcagcaggccctagaagcctcactcttgcccctccctttaatatctcaaaggatgacacttctgtggtgtgtagtgagtctctacttttatggaatcctgcaaagtgatgcctcaggtaagtgaatggcttttgacaatgtattaaaatgcaagtcatgcgtagggtaatgagtccactcttcctgaaaatgaatttaaataaacataatgttattcatgtccattgtcttctgcggtagcaaataatcataaagcagaataatagaattttgatgatgggaaagaaccattgctgtctctagtcttcatgggatagagtacacagggggcagtgggccgctgtgtttaaacacaggtatttttcattaccttcacactcagccaactagaatattgcttttttcccttacctcaggtcctatgggggaaaaatgggagtgataatagcacaatctgtttttcaaatttgagccagtggtggaaaagttatcagtggtaataatccattgagatgttaaataaaataatgagtttttgtcatattgtttctatataggaaaaagaaaggatctgtctttagactcattctttctctggatgttgctttataagaggaaccagctaagacctttatagagtttgaaaaccaaactcagtcatcatgggcctggatcacgtgaaattagatatggaagagacttgctatttgaaagtccatcttttcagatctcctcttcttcccagaattatgcccagaatcactctctatctctgactattaatcattacatttcagcctatgtttttggactaatcaaattcttagaaagtttttagtacataaaactgaaatttgtctctttgattttagtatctaaaactgaaatttgtctctttccaaacatttacttggttcaactgtaggactgaa

SEQ ID NO: 447105 - DNA, 1965 bp, Homo sapiens
gaagactgccgggatccaggtctccggggtccgctttggccagaggcgcggaaggaagcagtgcccggcgacactgcacccatcccggctgcttttgctgcgccctctcagcttcccaagaaaggatgacacttctgtggtgtgtagtgagtctctacttttatggaatcctgcaaagtgatgcctcagaacgctgcgatgactggggactagacaccatgaggcaaatccaagtgtttgaagatgagccagctcgcatcaagtgcccactctttgaacacttcttgaaattcaactacagcacagcccattcagctggccttactctgatctggtattggactaggcaggaccgggaccttgaggagccaattaacttccgcctccccgagaaccgcattagtaaggagaaagatgtgctgtggttccggcccactctcctcaatgacactggcaactatacctgcatgttaaggaacactacatattgcagcaaagttgcatttcccttggaagttgttcaaaaagacagctgtttcaattcccccatgaaactcccagtgcataaactgtatatagaatatggcattcagaggatcacttgtccaaatgtagatggatattttccttccagtgtcaaaccgactatcacttggtatatgggctgttataaaatacagaattttaataatgtaatacccgaaggtatgaacttgagtttcctcattgccttaatttcaaataatggaaattacacatgtgttgttacatatccagaaaatggacgtacgtttcatctcaccaggactctgactgtaaaggtagtaggctctccaaaaaatgcagtgccccctgtgatccattcacctaatgatcatgtggtctatgagaaagaaccaggagaggagctactcattccctgtacggtctattttagttttctgatggattctcgcaatgaggtttggtggaccattgatggaaaaaaacctgatgacatcactattgatgtcaccattaacgaaagtataagtcatagtagaacagaagatgaaacaagaactcagattttgagcatcaagaaagttacctctgaggatctcaagcgcagctatgtctgtcatgctagaagtgccaaaggcgaagttgccaaagcagccaaggtgaagcagaaaggtaatagatgcggtcagtgatgaatctctcagctccaaattaacattgtggtgaataaggacaaaaggagagattgagaacaagagagctccagcacctagcctgacggcatctaacccatagtaatgaatcaaacttaaatgaaaaatatgaaagttttcatctatgtaagatactcaaaatattgtttctgatattgttagtaccgtaatgcccaaatgtagctaaaaaaatcgacgtgagtacagtgagacacaattttgtgtctgtacaattatgaaaaattaaaaacaaagaaaatattcaaagctaccaaagatagaaaaaactggtagagccacatattgttggtgaattattaagacccttttaaaaatcattcatggtagagtttaagagtcataaaaaagattgcatcatctgacctaagactttcggaatttttcctgaacaaataacagaaagggaattatataccttttaatattattagaagcattatctgtagttgtaaaacattattaatagcagccatccaattgtatgcaactaattaaggtattgaatgtttattttccaaaaatgcataattataatattattttaaacactatgtatcaatatttaagcaggtttataatataccagcagccacaattgctaaaatgaaaatcatttaaattatgattttaaatggtatacacatgatttctatgttgatagtactatattattctacaataaatggaaattataaagccttcttgtcagaagtgctgctcctaaatc

SEQ ID NO: 447106 - DNA, 1350 bp, Homo sapiens
tgtttattcacataggaacctccaaacatatagaagtaaagacacagggctgttataaaatacagaattttaataatgtaatacccgaaggtatgaacttgagtttcctcattgccttaatttcaaataatggaaattacacatgtgttgttacatatccagaaaatggacgtacgtttcatctcaccaggactctgactgtaaaggtagtaggctctccaaaaaatgcagtgccccctgtgatccattcacctaatgatcatgtggtctatgagaaagaaccaggagaggagctactcattccctgtacggtctattttagttttctgatggattctcgcaatgaggtttggtggaccattgatggaaaaaaacctgatgacatcactattgatgtcaccattaacgaaagtataagtcatagtagaacagaagatgaaacaagaactcagattttgagcatcaagaaagttacctctgaggatctcaagcgcagctatgtctgtcatgctagaagtgccaaaggcgaagttgccaaagcagccaaggtgaagcagaaaggtaatagatgcggtcagtgatgaatctctcagctccaaattaacattgtggtgaataaggacaaaaggagagattgagaacaagagagctccagcacctagcctgacggcatctaacccatagtaatgaatcaaacttaaatgaaaaatatgaaagttttcatctatgtaagatactcaaaatattgtttctgatattgttagtaccgtaatgcccaaatgtagctaaaaaaatcgacgtgagtacagtgagacacaattttgtgtctgtacaattatgaaaaattaaaaacaaagaaaatattcaaagctaccaaagatagaaaaaactggtagagccacatattgttggtgaattattaagacccttttaaaaatcattcatggtagagtttaagagtcataaaaaagattgcatcatctgacctaagactttcggaatttttcctgaacaaataacagaaagggaattatataccttttaatattattagaagcattatctgtagttgtaaaacattattaatagcagccatccaattgtatgcaactaattaaggtattgaatgtttattttccaaaaatgcataattataatattattttaaacactatgtatcaatatttaagcaggtttataatataccagcagccacaattgctaaaatgaaaatcatttaaattatgattttaaatggtatacacatgatttctatgttgatagtactatattattctacaataaatggaaattataaagccttcttgtcagaagtgctgctcctaaatc

SEQ ID NO: 447107 - DNA, 1308 bp, Homo sapiens
tgtttattcacataggaacctccaaacatatagaagtaaagacacagggctgttataaaatacagaattttaataatgtaatacccgaaggtatgaacttgagtttcctcattgccttaatttcaaataatggaaattacacatgtgttgttacatatccagaaaatggacgtacgtttcatctcaccaggactctgactgtaaaggtagtaggctctccaaaaaatgcagtgccccctgtgatccattcacctaatgatcatgtggtctatgagaaagaaccaggagaggagctactcattccctgtacggtctattttagttttctgatggattctcgcaatgaggtttggtggaccattgatggaaatataagtcatagtagaacagaagatgaaacaagaactcagattttgagcatcaagaaagttacctctgaggatctcaagcgcagctatgtctgtcatgctagaagtgccaaaggcgaagttgccaaagcagccaaggtgaagcagaaaggtaatagatgcggtcagtgatgaatctctcagctccaaattaacattgtggtgaataaggacaaaaggagagattgagaacaagagagctccagcacctagcctgacggcatctaacccatagtaatgaatcaaacttaaatgaaaaatatgaaagttttcatctatgtaagatactcaaaatattgtttctgatattgttagtaccgtaatgcccaaatgtagctaaaaaaatcgacgtgagtacagtgagacacaattttgtgtctgtacaattatgaaaaattaaaaacaaagaaaatattcaaagctaccaaagatagaaaaaactggtagagccacatattgttggtgaattattaagacccttttaaaaatcattcatggtagagtttaagagtcataaaaaagattgcatcatctgacctaagactttcggaatttttcctgaacaaataacagaaagggaattatataccttttaatattattagaagcattatctgtagttgtaaaacattattaatagcagccatccaattgtatgcaactaattaaggtattgaatgtttattttccaaaaatgcataattataatattattttaaacactatgtatcaatatttaagcaggtttataatataccagcagccacaattgctaaaatgaaaatcatttaaattatgattttaaatggtatacacatgatttctatgttgatagtactatattattctacaataaatggaaattataaagccttcttgtcagaagtgctgctcctaaatc

SEQ ID NO: 447108 - DNA, 450 bp, Homo sapiens
ctgccgggatccaggtctccggggtccgctttggccagaggcgcggaaggaagcagtgcccggcgacactgcacccatcccggctgcttttgctgcgccctctcagcttcccaagaaaggtgagtctcgcgccgccgtgagggctcagaagtcaccaagccgcagaatctcagggtagacggattcttagagatcctatcgttaaaccctcctactttacagaagaggaaactgaggcacagaacgaggcagcggctgggataggtcatactgctagttaggactggagcccggattcgaacccaaacgttcagagacccatctttgctttgcagggatttaagtaacgcggttgtgggacgtctgctcgttgccgcccccatcctcagccctttgaggggtctacccttgttttcctcctcaccgccccctccccgctaccaccccccg

SEQ ID NO: 447109 - DNA, 589 bp, Homo sapiens
gaagactgccgggatccaggtctccggggtccgctttggccagaggcgcggaaggaagcagtgcccggcgacactgcacccatcccggctgcttttgctgcgccctctcagcttcccaagaaaggaaaccgaggctcatagagttacgtagcatggcctatgtattagtctgtgttcatgctgctgataaagacagacccaagactgggcagtttgcaaaagaaagaggttcattggacttatagttccacatggctggggaggcctgacaatcatggcggaagtcaaggaggagcaagtcacatcttacgtggatggcagcaggccaaaaaagagaacttgtgcagagaaactctcattttgaaaactatctgatcttgtgagacccattcactatcacgagaatagcatgggacagacctaccccacatgattcaatcatctcccactgggtccctcccacaacatgtgggaattatgggagctacaagatgagatttgggtggggacacagagccaaaccatatcagcctgtgtaacagcacaaagcaagacatgatgctgagactcatctacgcattttattcta

SEQ ID NO: 447110 - DNA, 2001 bp, Homo sapiens
  misc_feature (99)..(99): n is a, c, g, or t
  misc_feature (128)..(128): n is a, c, g, or t
  misc_feature (136)..(136): n is a, c, g, or t
  misc_feature (171)..(171): n is a, c, g, or t
  misc_feature (184)..(184): n is a, c, g, or t
  misc_feature (211)..(211): n is a, c, g, or t
  misc_feature (262)..(262): n is a, c, g, or t
  misc_feature (275)..(275): n is a, c, g, or t
  misc_feature (340)..(340): n is a, c, g, or t
  misc_feature (353)..(353): n is a, c, g, or t
  misc_feature (362)..(363): n is a, c, g, or t
  misc_feature (379)..(379): n is a, c, g, or t
  misc_feature (385)..(385): n is a, c, g, or t
gaagactgccgggatccaggtctccggggtccgctttggccagaggcgcggaaggaagcagtgcccggcgacactgcacccatcccggctgcttttggnggggggtgtgagggttcgcgcgcaggaanggggtggnggttcgtgtggtgtgtaggtgaggtgtgtaggttntagtggaagtggnggaaaggtgagtgggtgaggaaggggngggagtgaggtggggaggtaggaggagggagtgaggggaaagtggagaggngtttgagaggagngaggggagggggggagtgaaggtggggaggtgtttgaaggagttgttgaaattgaagtagggganaggggattgaggnggggttagnntgatgtggtattggantagggngggggggggggttgaggagggaattaagttgggggtgggggagaaccgcattagtaaggagaaagatgtgctgtggttccggcccactctcctcaatgacactggcaactatacctgcatgttaaggaacactacatattgcagcaaagttgcatttcccttggaagttgttcaaaaagacagctgtttcaattcccccatgaaactcccagtgcataaactgtatatagaatatggcattcagaggatcacttgtccaaatgtagatggatattttccttccagtgtcaaaccgactatcacttggtatatgggctgttataaaatacagaattttaataatgtaatacccgaaggtatgaacttgagtttcctcattgccttaatttcaaataatggaaattacacatgtgttgttacatatccagaaaatggacgtacgtttcatctcaccaggactctgactgtaaaggtagtaggctctccaaaaaatgcagtgccccctgtgatccattcacctaatgatcatgtggtctatgagaaagaaccaggagaggagctactcattccctgtacggtctattttagttttctgatggattctcgcaatgaggtttggtggaccattgatggaaaaaaacctgatgacatcactattgatgtcaccattaacgaaagtataagtcatagtagaacagaagatgaaacaagaactcagattttgagcatcaagaaagttacctctgaggatctcaagcgcagctatgtctgtcatgctagaagtgccaaaggcgaagttgccaaagcagccaaggtgaagcagaaaggtaatagatgcggtcagtgatgaatctctcagctccaaattaacattgtggtgaataaggacaaaaggagagattgagaacaagagagctccagcacctagcctgacggcatctaacccatagtaatgaatcaaacttaaatgaaaaatatgaaagttttcatctatgtaagatactcaaaatattgtttctgatattgttagtaccgtaatgcccaaatgtagctaaaaaaatcgacgtgagtacagtgagacacaattttgtgtctgtacaattatgaaaaattaaaaacaaagaaaatattcaaagctaccaaagatagaaaaaactggtagagccacatattgttggtgaattattaagacccttttaaaaatcattcatggtagagtttaagagtcataaaaaagattgcatcatctgacctaagactttcggaatttttcctgaacaaataacagaaagggaattatataccttttaatattattagaagcattatctgtagttgtaaaacattattaatagcagccatccaattgtatgcaactaattaaggtattgaatgtttattttccaaaaatgcataattataatattattttaaacactatgtatcaatatttaagcaggtttataatataccagcagccacaattgctaaaatgaaaatcatttaaattatgattttaaatggtatacacatgatttctatgttgatagtactatattattctacaataaatggaaattataaagccttcttgtcagaagtgctgctcctaaatc

SEQ ID NO: 447111 - DNA, 2569 bp, Homo sapiens
gaagaactggaactgggctggccatagggggaagcggcgcgttaaatccgccccctctccataccctactttcaaggggtgggcggtagaggggaggttggggttggagcagcggcgagggggcccctcccttgcacctccccccaccggacttggtcgcgcccgaagtgtaacactttctctttgtcggaggagctcctctgtttcctgtgcagtagctcccgttgcggcggcacccgtggcagccctggcggacgcaggagcgatggcagcgaccgatatagctcgccaggtgggtgaaggttgccgaactgtccccctggctggacatgtggggtttgacagcttgcctgaccagctggtgaataagtccgtcagccagggcttctgcttcaacatcctgtgcgtgggagagacaggtttgggcaagtccaccctcatggacaccctgttcaacaccaaattcgaaggggagccagccacccacacacagccgggtgtccagctccagtctaatacctatgacctccaagagagcaacgtgaggctaaagctcacgatcgttagcacagttggctttggggaccagatcaacaaagaggacagctacaagcctatcgtggaattcatcgatgcacaattcgaggcctacctgcaggaagagctaaagatccgaagagtgctacacacctaccatgactcccgaatccatgtctgcttgtatttcattgcccccacgggtcattccctgaagtctctggacctagtgactatgaagaagctggacagtaaggtgaacatcatccccatcattgccaaagcagatgccatttcgaagagtgagctaacaaagttcaaaatcaaaatcaccagcgagcttgtcagcaacggagtccagatctatcagtttcctacagatgatgagtcggtggcagagatcaatggaaccatgaacgcccacctgccgtttgctgtcattggcagcacagaagaactgaagataggcaacaagatgatgagggcgcggcagtatccttggggcactgtgcaggttgaaaacgaggcccactgcgactttgtgaagctgcgggagatgctgattcgggtcaacatggaggatctgcgggagcagacccacacccggcactatgagctgtatcgccgctgtaagctggaggagatgggcttcaaggacaccgaccctgacagcaaacccttcagtttacaggagacatatgaggccaaaaggaacgagttcctaggggaactccagaaaaaagaagaggagatgagacagatgttcgtccagcgagtcaaagagaaagaagcggagctcaaagaggcagagaaagagctgcacgagaagtttgaccgtctgaagaaactgcaccaggacgagaagaagaaactggaggataagaagaaatccctggatgatgaagtgaatgctttcaagcaaagaaagacggcggctgagctgctccagtcccagggctcccaggctggaggctcacagactctgaagagagacaaagagaagaaaaactttttttaatcttgtcttcagcagctgcactaagtctaaaggagaagactgccattatagaagagttagggttccatattgtctcaaatcagaaatcaaccaatttcctctcccctcaaactgcaagcacacacacatacaccacaccactcaacaagtgttcatgtgtccctgtgtccaggcaagaagctctcttcctgactcacatggtattttaaatggaagtgtcttgtcctaactaacaaggcaggaaaagaaccatcagagctggaaaatggacgaaatgtaacctcagagaaacaactacaggaccactcacccaagtgtaagtgactggggcaggacacctcagctgtgggtatgaaagtactgttctgttcacaaggttttgtttgagttttatgtttttcttttaaacatttctctggttcgatgggttgactgtctacagccactgttaaacatttctgaatatgcaagagaaagtcaagtgacatttgtatcttcttcagcattcgcagaccttctatagattccagcaaagggggaaaatgtatccactatctaacacttaggtagagaagggagggggtttaagcttagtgagggcaaaattactccattccaccttccgagaccagttagggttttgagagaggtttctgctcaacctgggatctggagggagagctttgatgttggtaaatctgccttgaattcattggtttaacttgcatcaaaataccatgtgagtgtgctcattctcatatatcccctaccaccatcaccaccattctgctgttcagtgtctcttgagagagcctctttgcatgttttccagaatctgtgtgtgtttttcctttcttctcctttgttctttttgctcaaaggtgtgaccagtcattgcccctctggggctttcattctccaggagaaacatcccagaaccagcactgtttagcctgatacctttctaatgtccatgtcaattttcaataaaattcaaagaaatgctaaaaaaaa

SEQ ID NO: 447112 - DNA, 4664 bp, Homo sapiens
ggaccgcacaggcaaagaggcgcggggctggggttagcctggggcagaaggcgggtgaaggttgccgaactgtccccctggctggacatgtggggtttgacagcttgcctgaccagctggtgaataagtccgtcagccagggcttctgcttcaacatcctgtgcgtgggagagacaggtttgggcaagtccaccctcatggacaccctgttcaacaccaaattcgaaggggagccagccacccacacacagccgggtgtccagctccagtctaatacctatgacctccaagagagcaacgtgaggctaaagctcacgatcgttagcacagttggctttggggaccagatcaacaaagaggacagctacaagcctatcgtggaattcatcgatgcacaattcgaggcctacctgcaggaagagctaaagatccgaagagtgctacacacctaccatgactcccgaatccatgtctgcttgtatttcattgcccccacgggtcattccctgaagtctctggacctagtgactatgaagaagctggacagtaaggtgaacatcatccccatcattgccaaagcagatgccatttcgaagagtgagctaacaaagttcaaaatcaaaatcaccagcgagcttgtcagcaacggagtccagatctatcagtttcctacagatgatgagtcggtggcagagatcaatggaaccatgaacgcccacctgccgtttgctgtcattggcagcacagaagaactgaagataggcaacaagatgatgagggcgcggcagtatccttggggcactgtgcaggttgaaaacgaggcccactgcgactttgtgaagctgcgggagatgctgattcgggtcaacatggaggatctgcgggagcagacccacacccggcactatgagctgtatcgccgctgtaagctggaggagatgggcttcaaggacaccgaccctgacagcaaacccttcagtttacaggagacatatgaggccaaaaggaacgagttcctaggggaactccagaaaaaagaagaggagatgagacagatgttcgtccagcgagtcaaagagaaagaagcggagctcaaagaggcagagaaagagctgcacgagaagtttgaccgtctgaagaaactgcaccaggacgagaagaagaaactggaggataagaagaaatccctggatgatgaagtgaatgctttcaagcaaagaaagacggcggctgagctgctccagtcccagggctcccaggctggaggctcacagactctgaagagagacaaagagaagaaaaattaactctgctgtttgctgcatgctgcatgagacccagggtcctgtttgggcttcctgtagacacccttttcctgcgcaacagagctgggcctccctttctctaatttcccccttaacatgcctggggggcatacaatccaacccgcgccctctcctctcttcctgccaaggtttatagaaacctgagaatctgagggtgatgtctggccgctggtcaagaagccaacagtcatgtggctcgcagatgcatcctgcatcccagtccccctcccagcacccccagccatcccccctgtcttcccccacatctttgccagaggtgtgacatggtcagggggcccatctgctactctttcccaccagctcccctgttccagttctggttgctgttagtttccctgaggtatttgcaaccaccatggctgggtaaccaccgatcagcacagctgtccccttggtctcctgtatcccagtcactagtcctccctggtccaccccaccctcatcctcaggagccacagccatttcttagagggtttcaaaaggacagcctttggcgccttttccttctaacctttgagtccagccctttccagttttcattcactcgaagtaactgcactcaagctgtgctcaaaatcggcaacgcatttatttacaccaagcccttcccataaaacacaactgctgaagaaaatagcagacgtttcccctctctctaactctgggtatcccacagatgcaaaagggagaataaacctgaatattattaccagcctagagtcttgaatgatagccttaccgaattcttcttgtgaggtatttcagcatctcggggggtaatttccggaagggctccatactgtcccaataaggtgaggccagtagcaggaataataaatcccactttgtaggctggaaaactgagctgtcaaaagaatcaagtgtttgggggtttgctctgatgagtcttctagttcatttggtgaatgtcatgatgatttttaacatgcattttgcatgcatcccccaataagaagagatgagactcggccggagagaagaaaaggcccttaactttctttccaatttaaggagttgagagtttaaaaatattccagccctaagtttttatcatgggtcccatctgatagtggctttgggaacctctgtgaagtagagagccctcccttgtcagggttatgaggcacagtggcctttggtgtttggccagtgacagtgtgagagatggagttgacctggcaatgatctgtggctaacatgccgtctctctgcccttcctttgcagtaatccatggctgtgtactgaatagtattccccgctacagctggactggactccatttagccttttaagccgaggttcctattttaactgacagctttcctttggggtgccaggcagcgaggccccccacccctatcctgccatgtacttcaagctcacttcttctttttgagttccgcaacttgctcctgcctcccagccccactggcactgaccatgaccacctacttctattttttttttagagtttctttttttgatcacttactttcaaagcacacagtcaaacaaggttatgccaaatttccaggcctttttgaagtattgagaaggggaaggggatttctcacttcaattatagatcataataggaagcaaaaagaaaaaaatgaaaagcaaacatatgcacgcacttttcttgttgacaaagcaagaatataggtttgctgtgtaggtttggtgctctattgattggtgagtgaccagagcaagtatgaaggtgatgctgccaaagcacaagcctttttgaagtattgagaaggggaaggggatttctcacttcaattatagatcataataggaagcaaaaagaaaaaaatgaaaagcaaacatatgcacgcacttttcttgttgacaaagcaagaatgtaggtttgctgtgtaggtttggtgctctattgattggtgagtgaccagagcaagtatgaaggtgatgctgccaaagcacaagccagtttcttgggaaaattcaagttacagtggagtatttttttgaagaccatatgcttggaggtagaaacaaaccaacgaccaaaaaaaaaaaaaaaaaaaaaatctgctcagatactcagccagtagctcagagagatgctgagttaggcctgtcaggtctccttgggaaaggcttcatatttgcaactttgatgattctatgtccagcttcagagctgctttcccagaaattcacgcttaaacaaccaaccggtaaccaccacttccccacaccgccgcctggtaattatttgcattacaaaccggaggcgccctcatttgcatttgtgtacagattaactagttaaggcttgagaagctctgaataattcaaaagtattagacccacacagccttggagagaccttcagaaactaaggaggagttttatattaagggagacattttagtcagtaagacgatataacctacttactccgtaaggggaaatgaaggcccggagaagggaagggacttgaccgaggtcccacttctgtttcgaggcagaagccagactaattttcatgcctcctgactcccaatcagtttcacaaagggattcaatctgtttatatacgttacattcctggatacgaggtcttttgatgttcagagtaactgactagttagtattagaagaccctcgaggtttttttccacagaaaaacatctgaagatggattgggtgagggctggcaaaacgaaggcatgccgggccagctccttaacccaatgacccagtgatgctgcaaggctggaacggggtccaggagactgtgtgtaacaggtgccctaggtgacccttataatcagggaagtttggtgaacaaaaatcgaacccatgagtgaacataaattaaaaagttgatcaacctattaaaatgtgtatttcattgggtagcttttctcactgtagacagattttttccttcttcaatgaaaaggcttttaaattagtacaactgttactatttaaaaaaaaaataccctaagtactctgtttacttctggtgaaacaaaaccagtcattagaaatggtctgtgcttttattttcccagactggagtggcttttctgaaacacacacacacacacacacacacacacacacacacacacacgtacacacatccctcacttctcttaagccaagaagtttgctttccctagctgcagtgtagatggctcttgtttttgtttttttgttttaatcatttggcattcacatgtggctgttaatatgtgcttgtttttaattaaaacaagaagctttaaaaaaat

SEQ ID NO: 447113 - DNA, 670 bp, Homo sapiens
  misc_feature (28)..(28): n is a, c, g, or t
  misc_feature (32)..(32): n is a, c, g, or t
aaacttcggctaggtacgaggctgggtngttnagaagaccctcgaggtttttttccacagaaaaacatctgaagatggattgggtgagggctggcaaaacgaaggcatgccgggccagctccttaacccaatgacccagtgatgctgcaaggctggaacggggtccaggagactgtgtgtaacaggtgccctaggtgacccttataatcagggaagtttggtgaacaaaaatcgaacccatgagtgaacataaattaaaaagttgatcaacctattaaaatgtgtatttcattgggtagcttttctcactgtagacagattttttccttcttcaatgaaaaggcttttaaattagtacaactgttactatttaaaaaaaaaataccctaagtactctgtttacttctggtgaaacaaaaccagtcattagaaatggtctgtgcttttattttcccagactggagtggcttttctgaaacacacacacacacacacacacacacacacacacacacacacgtacacacatccctcacttctcttaagccaagaagtttgctttccctagctgcagtgtagatggctcgtggtagagggtgaacacagtggggcatacacagtgtggcgtgaaagagtgtgcgtgttttaattaaacaagaagtttaaaatt

SEQ ID NO: 447114 - DNA, 322 bp, Homo sapiens
ccacccgcctcgaattgcatgcccgccgcacgaaccaaaatggggggggaggggggcaattgctcatatatcccctaccaccatcaccaccattctgctgttcagtgtctcttgagagagcctctttgcatgttttccagaatctgtgtgtgtttttcctttcttctcctttgttctttttgctcaaaggtgtgaccagtcattgcccctctggggctttcattctccaggagaaacatcccagaaccagcactgtttagcctgatacctttctaatgtccatgtcaattttcaataaaattcaaagaaatgctaaaaaaaa

SEQ ID NO: 447115 - DNA, 368 bp, Homo sapiens
ttcctttttgtaaactttttattggaaacagctaccaacttacaagtaagttgcaaaaattaaaatggtaccaaaaacagctacataacctcacccagatctacgtttgggaaggttttatttatctcatttgctttatcatttgccccttccctatccctgtatactagatacacacacacacacacacacacacacacacacacacgtacacacatccctcacttctcttaagccaagaagtttgctttccctagctgcagtgtagatggctcttgtttttgtttttttgttttaatcatttggcattcacatgtggctgttaatatgtgcttgtttttaattaaaacaagaagctttaaaaaaat

SEQ ID NO: 447116 - DNA, 3387 bp, Homo sapiens
gaagaactggaactgggctggccatagggggaagcggcgcgttaaatccgccccctctccataccctactttcaaggggtgggcggtagaggggaggttggggttggagcagcggcgagggggcccctcccttgcacctccccccaccggacttggtcgcgcccgaagtgtaacactttctctttgtcggaggagctcctctgtttcctgtgcagtagctcccgttgcggcggcacccgtggcagccctggcggacgcaggagcgatggcagcgaccgatatagctcgccaggtgggtgaaggttgccgaactgtccccctggctggacatgtggggtttgacagcttgcctgaccagctggtgaataagtccgtcagccagggcttctgcttcaacatcctgtgcgtgggagagacaggtttgggcaagtccaccctcatggacaccctgttcaacaccaaattcgaaggggagccagccacccacacacagccgggtgtccagctccagtctaatacctatgacctccaagagagcaacgtgaggctaaagctcacgatcgttagcacagttggctttggggaccagatcaacaaagaggacagctacaagcctatcgtggaattcatcgatgcacaattcgaggcctacctgcaggaagagctaaagatccgaagagtgctacacacctaccatgactcccgaatccatgtctgcttgtatttcattgcccccacgggtcattccctgaagtctctggacctagtgactatgaagaagctggacagtaaggtgaacatcatccccatcattgccaaagcagatgccatttcgaagagtgagctaacaaagttcaaaatcaaaatcaccagcgagcttgtcagcaacggagtccagatctatcagtttcctacagatgatgagtcggtggcagagatcaatggaaccatgaacgcccacctgccgtttgctgtcattggcagcacagaagaactgaagataggcaacaagatgatgagggcgcggcagtatccttggggcactgtgcaggttgaaaacgaggcccactgcgactttgtgaagctgcgggagatgctgattcgggtcaacatggaggatctgcgggagcagacccacacccggcactatgagctgtatcgccgctgtaagctggaggagatgggcttcaaggacaccgaccctgacagcaaacccttcagtttacaggagacatatgaggccaaaaggaacgagttcctaggggaactccagaaaaaagaagaggagatgagacagatgttcgtccagcgagtcaaagagaaagaagcggagctcaaagaggcagagaaagagctgcacgagaagtttgaccgtctgaagaaactgcaccaggacgagaagaagaaactggaggataagaagaaatccctggatgatgaagtgaatgctttcaagcaaagaaagacggcggctgagctgctccagtcccagggctcccaggctggaggctcacagactctgaagagagacaaagagaagaaaaataatccatggctgtgtactgaatagtattccccgctacagctggactggactccatttagccttttaagccgaggttcctattttaactgacagctttcctttggggtgccaggcagcgaggccccccacccctatcctgccatgtacttcaagctcacttcttctttttgagttccgcaacttgctcctgcctcccagccccactggcactgaccatgaccacctacttctattttttttttagagtttctttttttgatcacttactttcaaagcacacagtcaaacaaggttatgccaaatttccaggcctttttgaagtattgagaaggggaaggggatttctcacttcaattatagatcataataggaagcaaaaagaaaaaaatgaaaagcaaacatatgcacgcacttttcttgttgacaaagcaagaatgtaggtttgctgtgtaggtttggtgctctattgattggtgagtgaccagagcaagtatgaaggtgatgctgccaaagcacaagccagtttcttgggaaaattcaagttacagtggagtatttttttgaagaccatatgcttggaggtagaaacaaaccaacgaccaaaaaaaaaaaaaaaaaaaaaatctgctcagatactcagccagtagctcagagagatgctgagttaggcctgtcaggtctccttgggaaaggcttcatatttgcaactttgatgattctatgtccagcttcagagctgctttcccagaaattcacgcttaaacaaccaaccggtaaccaccacttccccacaccgccgcctggtaattatttgcattacaaaccggaggcgccctcatttgcatttgtgtacagattaactagttaaggcttgagaagctctgaataattcaaaagtattagacccacacagccttggagagaccttcagaaactaaggaggagttttatattaagggagacattttagtcagtaagacgatataacctacttactccgtaaggggaaatgaaggcccggagaagggaagggacttgaccgaggtcccacttctgtttcgaggcagaagccagactaattttcatgcctcctgactcccaatcagtttcacaaagggattcaatctgtttatatacgttacattcctggatacgaggtcttttgatgttcagagtaactgactagttagtattagaagaccctcgaggtttttttccacagaaaaacatctgaagatggattgggtgagggctggcaaaacgaaggcatgccgggccagctccttaacccaatgacccagtgatgctgcaaggctggaacggggtccaggagactgtgtgtaacaggtgccctaggtgacccttataatcagggaagtttggtgaacaaaaatcgaacccatgagtgaacataaattaaaaagttgatcaacctattaaaatgtgtatttcattgggtagcttttctcactgtagacagattttttccttcttcaatgaaaaggcttttaaattagtacaactgttactatttaaaaaaaaaataccctaagtactctgtttacttctggtgaaacaaaaccagtcattagaaatggtctgtgcttttattttcccagactggagtggcttttctgaaacacacacacacacacacacacacacacacacacacacacacgtacacacatccctcacttctcttaagccaagaagtttgctttccctagctgcagtgtagatggctcttgtttttgtttttttgttttaatcatttggcattcacatgtggctgttaatatgtgcttgtttttaattaaaacaagaagctttaaaaaaat

SEQ ID NO: 447117 - DNA, 2858 bp, Homo sapiens
gaagaactggaactgggctggccatagggggaagcggcgcgttaaatccgccccctctccataccctactttcaaggggtgggcggtagaggggaggttggggttggagcagcggcgagggggcccctcccttgcacctccccccaccggacttggtcgcgcccgaagtgtaacactttctctttgtcggaggagctcctctgtttcctgtgcagtagctcccgttgcggcggcacccgtggcagccctggcggacgcaggagcgatggcagcgaccgatatagctcgccaggtgggtgaaggttgccgaactgtccccctggctggacatgtggggtttgacagcttgcctgaccagctggtgaataagtccgtcagccagggcttctgcttcaacatcctgtgcgtgggagagacaggtttgggcaagtccaccctcatggacaccctgttcaacaccaaattcgaaggggagccagccacccacacacagccgggtgtccagctccagtctaatacctatgacctccaagagagcaacgtgaggctaaagctcacgatcgttagcacagttggctttggggaccagatcaacaaagaggacagctacaagcctatcgtggaattcatcgatgcacaattcgaggcctacctgcaggaagagctaaagatccgaagagtgctacacacctaccatgactcccgaatccatgtctgcttgtatttcattgcccccacgggtcattccctgaagtctctggacctagtgactatgaagaagctggacagtaaggtgaacatcatccccatcattgccaaagcagatgccatttcgaagagtgagctaacaaagttcaaaatcaaaatcaccagcgagcttgtcagcaacggagtccagatctatcagtttcctacagatgatgagtcggtggcagagatcaatggaaccatgaacgcccacctgccgtttgctgtcattggcagcacagaagaactgaagataggcaacaagatgatgagggcgcggcagtatccttggggcactgtgcaggttgaaaacgaggcccactgcgactttgtgaagctgcgggagatgctgattcgggtcaacatggaggatctgcgggagcagacccacacccggcactatgagctgtatcgccgctgtaagctggaggagatgggcttcaaggacaccgaccctgacagcaaacccttcagtttacaggagacatatgaggccaaaaggaacgagttcctaggggaactccagaaaaaagaagaggagatgagacagatgttcgtccagcgagtcaaagagaaagaagcggagctcaaagaggcagagaaagagctgcacgagaagtttgaccgtctgaagaaactgcaccaggacgagaagaagaaactggaggataagaagaaatccctggatgatgaagtgaatgctttcaagcaaagaaagacggcggctgagctgctccagtcccagggctcccaggctggaggctcacagactctgaagagagacaaagagaagaaaaataatccatggctgtgtactgaatagtattccccgctacagctggactggactccatttagccttttaagccgaggttcctattttaactgacagctttcctttggggtgccaggcagcgaggccccccacccctatcctgccatgtacttcaagctcacttcttctttttgagttccgcaacttgctcctgcctcccagccccactggcactgaccatgaccacctacttctattttttttttagagtttctttttttgatcacttactttcaaagcacacagtcaaacaaggttatgccaaatttccaggcctttttgaagtattgagaaggggaaggggatttctcacttcaattatagatcataataggaagcaaaaagaaaaaaatgaaaagcaaacatatgcacgcacttttcttgttgacaaagcaagaatgtaggtttgctgtgtaggtttggtgctctattgattggtgagtgaccagagcaagtatgaaggtgatgctgccaaagcacaagccagtttcttgggaaaattcaagttacagtggagtatttttttgaagaccatatgcttggaggtagaaacaaaccaacgaccaaaaaaaaaaaaaaaaaaaaaatctgctcagatactcagccagtagctcagagagatgctgagttaggcctgtcaggtctccttgggaaaggcttcatatttgcaactttgatgattctatgtccagcttcagagctgctttcccagaaattcacgcttaaacaaccaaccggtaaccaccacttccccacaccgccgcctggtaattatttgcattacaaaccggaggcgccctcatttgcatttgtgtacagattaactagttaaggcttgagaagctctgaataattcaaaagtattagacccacacagccttggagagaccttcagaaactaaggaggagttttatattaagggagacattttagtcagtaagacgatataacctacttactccgtaaggggaaatgaaggcccggagaagggaagggacttgaccgaggtcccacttctgtttcgaggcagaagccagactaattttcatgcctcctgactcccaatcagtttcacaaagggattcaatctgtttatatacgttacattcctggatacgaggtcttttgatgttcagagtaactgactagttagtattagaagaccctcgaggtttttttccacagaaaaacatctgaagatggatagctccgggctgtcaacacgctgccttccccttccgctccttacccccatgccccacagcctcgcgggcc

SEQ ID NO: 447118 - DNA, 3334 bp, Homo sapiens
gaagaactggaactgggctggccatagggggaagcggcgcgttaaatccgccccctctccataccctactttcaaggggtgggcggtagaggggaggttggggttggagcagcggcgagggggcccctcccttgcacctccccccaccggacttggtcgcgcccgaagtgtaacactttctctttgtcggaggagctcctctgtttcctgtgcagtagctcccgttgcggcggcacccgtggcagccctggcggacgcaggagcgatggcagcgaccgatatagctcgccaggtgggtgaaggttgccgaactgtccccctggctggacatgtggggtttgacagcttgcctgaccagctggtgaataagtccgtcagccagggcttctgcttcaacatcctgtgcgtgggagagacaggtttgggcaagtccaccctcatggacaccctgttcaacaccaaattcgaaggggagccagccacccacacacagccgggtgtccagctccagtctaatacctatgacctccaagagagcaacgtgaggctaaagctcacgatcgttagcacagttggctttggggaccagatcaacaaagaggacagctacaagcctatcgtggaattcatcgatgcacaattcgaggcctacctgcaggaagagctaaagatccgaagagtgctacacacctaccatgactcccgaatccatgtctgcttgtatttcattgcccccacgggtcattccctgaagtctctggacctagtgactatgaagaagctggacagtaaggtgaacatcatccccatcattgccaaagcagatgccatttcgaagagtgagctaacaaagttcaaaatcaaaatcaccagcgagcttgtcagcaacggagtccagatctatcagtttcctacagatgatgagtcggtggcagagatcaatggaaccatgaacgcccacctgccgtttgctgtcattggcagcacagaagaactgaagataggcaacaagatgatgagggcgcggcagtatccttggggcactgtgcaggttgaaaacgaggcccactgcgactttgtgaagctgcgggagatgctgattcgggtcaacatggaggatctgcgggagcagacccacacccggcactatgagctgtatcgccgctgtaagctggaggagatgggcttcaaggacaccgaccctgacagcaaacccttcagtttacaggagacatatgaggccaaaaggaacgagttcctaggggaactccagaaaaaagaagaggagatgagacagatgttcgtccagcgagtcaaagagaaagaagcggagctcaaagaggcagagaaagagctgcacgagaagtttgaccgtctgaagaaactgcaccaggacgagaagaagaaactggaggataagaagaaatccctggatgatgaagtgaatgctttcaagcaaagaaagacggcggctgagctgctccagtcccagggctcccaggctggaggctcacagactctgaagagagacaaagagaagaaaaataatccatggctgtgtactgaatagtattccccgctacagctggactggactccatttagccttttaagccgaggttcctattttaactgacagctttcctttggggtgccaggcagcgaggccccccacccctatcctgccatgtacttcaagctcacttcttctttttgagttccgcaacttgctcctgcctcccagccccactggcactgaccatgaccacctacttctattttttttttagagtttctttttttgatcacttactttcaaagcacacagtcaaacaaggttatgccaaatttccaggcctttttgaagtattgagaaggggaaggggatttctcacttcaattatagatcataataggaagcaaaaagaaaaaaatgaaaagcaaacatatgcacgcacttttcttgttgacaaagcaagaatgtaggtttgctgtgtaggtttggtgctctattgattggtgagtgaccagagcaagtatgaaggtgatgctgccaaagcacaagccagtttcttgggaaaattcaagttacagtggagtatttttttgaagaccatatgcttggaggtagaaacaaaccaacgaccaaaaaaaaaaaaaaaaaaaaaatctgctcagatactcagccagtagctcagagagatgctgagttaggcctgtcaggtctccttgggaaaggcttcatatttgcaactttgatgattctatgtccagcttcagagctgctttcccagaaattcacgcttaaacaaccaaccggtaaccaccacttccccacaccgccgcctggtaattatttgcattacaaaccggaggcgccctcatttgcatttgtgtacagattaactagttaaggcttgagaagctctgaataattcttttatattaagggagacattttagtcagtaagacgatataacctacttactccgtaaggggaaatgaaggcccggagaagggaagggacttgaccgaggtcccacttctgtttcgaggcagaagccagactaattttcatgcctcctgactcccaatcagtttcacaaagggattcaatctgtttatatacgttacattcctggatacgaggtcttttgatgttcagagtaactgactagttagtattagaagaccctcgaggtttttttccacagaaaaacatctgaagatggattgggtgagggctggcaaaacgaaggcatgccgggccagctccttaacccaatgacccagtgatgctgcaaggctggaacggggtccaggagactgtgtgtaacaggtgccctaggtgacccttataatcagggaagtttggtgaacaaaaatcgaacccatgagtgaacataaattaaaaagttgatcaacctattaaaatgtgtatttcattgggtagcttttctcactgtagacagattttttccttcttcaatgaaaaggcttttaaattagtacaactgttactatttaaaaaaaaaataccctaagtactctgtttacttctggtgaaacaaaaccagtcattagaaatggtctgtgcttttattttcccagactggagtggcttttctgaaacacacacacacacacacacacacacacacacacacacacacgtacacacatccctcacttctcttaagccaagaagtttgctttccctagctgcagtgtagatggctcttgtttttgtttttttgttttaatcatttggcattcacatgtggctgttaatatgtgcttgtttttaattaaaacaagaagctttaaaaaaat

SEQ ID NO: 447119 - DNA, 4906 bp, Homo sapiens
gaagaactggaactgggctggccatagggggaagcggcgcgttaaatccgccccctctccataccctactttcaaggggtgggcggtagaggggaggttggggttggagcagcggcgagggggcccctcccttgcacctccccccaccggacttggtcgcgcccgaagtgtaacactttctctttgtcggaggagctcctctgtttcctgtgcagtagctcccgttgcggcggcacccgtggcagccctggcggacgcaggagcgatggcagcgaccgatatagctcgccaggtgggtgaaggttgccgaactgtccccctggctggacatgtggggtttgacagcttgcctgaccagctggtgaataagtccgtcagccagggcttctgcttcaacatcctgtgcgtgggagagacaggtttgggcaagtccaccctcatggacaccctgttcaacaccaaattcgaaggggagccagccacccacacacagccgggtgtccagctccagtctaatacctatgacctccaagagagcaacgtgaggctaaagctcacgatcgttagcacagttggctttggggaccagatcaacaaagaggacagctacaagcctatcgtggaattcatcgatgcacaattcgaggcctacctgcaggaagagctaaagatccgaagagtgctacacacctaccatgactcccgaatccatgtctgcttgtatttcattgcccccacgggtcattccctgaagtctctggacctagtgactatgaagaagctggacagtaaggtgaacatcatccccatcattgccaaagcagatgccatttcgaagagtgagctaacaaagttcaaaatcaaaatcaccagcgagcttgtcagcaacggagtccagatctatcagtttcctacagatgatgagtcggtggcagagatcaatggaaccatgaacgcccacctgccgtttgctgtcattggcagcacagaagaactgaagataggcaacaagatgatgagggcgcggcagtatccttggggcactgtgcaggttgaaaacgaggcccactgcgactttgtgaagctgcgggagatgctgattcgggtcaacatggaggatctgcgggagcagacccacacccggcactatgagctgtatcgccgctgtaagctggaggagatgggcttcaaggacaccgaccctgacagcaaacccttcagtttacaggagacatatgaggccaaaaggaacgagttcctaggggaactccagaaaaaagaagaggagatgagacagatgttcgtccagcgagtcaaagagaaagaagcggagctcaaagaggcagagaaagagctgcacgagaagtttgaccgtctgaagaaactgcaccaggacgagaagaagaaactggaggataagaagaaatccctggatgatgaagtgaatgctttcaagcaaagaaagacggcggctgagctgctccagtcccagggctcccaggctggaggctcacagactctgaagagagacaaagagaagaaaaattaactctgctgtttgctgcatgctgcatgagacccagggtcctgtttgggcttcctgtagacacccttttcctgcgcaacagagctgggcctccctttctctaatttcccccttaacatgcctggggggcatacaatccaacccgcgccctctcctctcttcctgccaaggtttatagaaacctgagaatctgagggtgatgtctggccgctggtcaagaagccaacagtcatgtggctcgcagatgcatcctgcatcccagtccccctcccagcacccccagccatcccccctgtcttcccccacatctttgccagaggtgtgacatggtcagggggcccatctgctactctttcccaccagctcccctgttccagttctggttgctgttagtttccctgaggtatttgcaaccaccatggctgggtaaccaccgatcagcacagctgtccccttggtctcctgtatcccagtcactagtcctccctggtccaccccaccctcatcctcaggagccacagccatttcttagagggtttcaaaaggacagcctttggcgccttttccttctaacctttgagtccagccctttccagttttcattcactcgaagtaactgcactcaagctgtgctcaaaatcggcaacgcatttatttacaccaagcccttcccataaaacacaactgctgaagaaaatagcagacgtttcccctctctctaactctgggtatcccacagatgcaaaagggagaataaacctgaatattattaccagcctagagtcttgaatgatagccttaccgaattcttcttgtgaggtatttcagcatctcggggggtaatttccggaagggctccatactgtcccaataaggtgaggccagtagcaggaataataaatcccactttgtaggctggaaaactgagctgtcaaaagaatcaagtgtttgggggtttgctctgatgagtcttctagttcatttggtgaatgtcatgatgatttttaacatgcattttgcatgcatcccccaataagaagagatgagactcggccggagagaagaaaaggcccttaactttctttccaatttaaggagttgagagtttaaaaatattccagccctaagtttttatcatgggtcccatctgatagtggctttgggaacctctgtgaagtagagagccctcccttgtcagggttatgaggcacagtggcctttggtgtttggccagtgacagtgtgagagatggagttgacctggcaatgatctgtggctaacatgccgtctctctgcccttcctttgcagtaatccatggctgtgtactgaatagtattccccgctacagctggactggactccatttagccttttaagccgaggttcctattttaactgacagctttcctttggggtgccaggcagcgaggccccccacccctatcctgccatgtacttcaagctcacttcttctttttgagttccgcaacttgctcctgcctcccagccccactggcactgaccatgaccacctacttctattttttttttagagtttctttttttgatcacttactttcaaagcacacagtcaaacaaggttatgccaaatttccaggcctttttgaagtattgagaaggggaaggggatttctcacttcaattatagatcataataggaagcaaaaagaaaaaaatgaaaagcaaacatatgcacgcacttttcttgttgacaaagcaagaatataggtttgctgtgtaggtttggtgctctattgattggtgagtgaccagagcaagtatgaaggtgatgctgccaaagcacaagcctttttgaagtattgagaaggggaaggggatttctcacttcaattatagatcataataggaagcaaaaagaaaaaaatgaaaagcaaacatatgcacgcacttttcttgttgacaaagcaagaatgtaggtttgctgtgtaggtttggtgctctattgattggtgagtgaccagagcaagtatgaaggtgatgctgccaaagcacaagccagtttcttgggaaaattcaagttacagtggagtatttttttgaagaccatatgcttggaggtagaaacaaaccaacgaccaaaaaaaaaaaaaaaaaaaaaatctgctcagatactcagccagtagctcagagagatgctgagttaggcctgtcaggtctccttgggaaaggcttcatatttgcaactttgatgattctatgtccagcttcagagctgctttcccagaaattcacgcttaaacaaccaaccggtaaccaccacttccccacaccgccgcctggtaattatttgcattacaaaccggaggcgccctcatttgcatttgtgtacagattaactagttaaggcttgagaagctctgaataattcaaaagtattagacccacacagccttggagagaccttcagaaactaaggaggagttttatattaagggagacattttagtcagtaagacgatataacctacttactccgtaaggggaaatgaaggcccggagaagggaagggacttgaccgaggtcccacttctgtttcgaggcagaagccagactaattttcatgcctcctgactcccaatcagtttcacaaagggattcaatctgtttatatacgttacattcctggatacgaggtcttttgatgttcagagtaactgactagttagtattagaagaccctcgaggtttttttccacagaaaaacatctgaagatggattgggtgagggctggcaaaacgaaggcatgccgggccagctccttaacccaatgacccagtgatgctgcaaggctggaacggggtccaggagactgtgtgtaacaggtgccctaggtgacccttataatcagggaagtttggtgaacaaaaatcgaacccatgagtgaacataaattaaaaagttgatcaacctattaaaatgtgtatttcattgggtagcttttctcactgtagacagattttttccttcttcaatgaaaaggcttttaaattagtacaactgttactatttaaaaaaaaaataccctaagtactctgtttacttctggtgaaacaaaaccagtcattagaaatggtctgtgcttttattttcccagactggagtggcttttctgaaacacacacacacacacacacacacacacacacacacacacacgtacacacatccctcacttctcttaagccaagaagtttgctttccctagctgcagtgtagatggctcttgtttttgtttttttgttttaatcatttggcattcacatgtggctgttaatatgtgcttgtttttaattaaaacaagaagctttaaaaaaat

SEQ ID NO: 447120 - DNA, 3432 bp, Homo sapiens
gaagaactggaactgggctggccatagggggaagcggcgcgttaaatccgccccctctccataccctactttcaaggggtgggcggtagaggggaggttggggttggagcagcggcgagggggcccctcccttgcacctccccccaccggacttggtcgcgcccgaagtgtaacactttctctttgtcggaggagctcctctgtttcctgtgcagtagctcccgttgcggcggcacccgtggcagccctggcggacgcaggagcgatggcagcgaccgatatagctcgccaggtgggtgaaggttgccgaactgtccccctggctggacatgtggggtttgacagcttgcctgaccagctggtgaataagtccgtcagccagggcttctgcttcaacatcctgtgcgtgggagagacaggtttgggcaagtccaccctcatggacaccctgttcaacaccaaattcgaaggggagccagccacccacacacagccgggtgtccagctccagtctaatacctatgacctccaagagagcaacgtgaggctaaagctcacgatcgttagcacagttggctttggggaccagatcaacaaagaggacagctacaagcctatcgtggaattcatcgatgcacaattcgaggcctacctgcaggaagagctaaagatccgaagagtgctacacacctaccatgactcccgaatccatgtctgcttgtatttcattgcccccacgggtcattccctgaagtctctggacctagtgactatgaagaagctggacagtaaggtgaacatcatccccatcattgccaaagcagatgccatttcgaagagtgagctaacaaagttcaaaatcaaaatcaccagcgagcttgtcagcaacggagtccagatctatcagtttcctacagatgatgagtcggtggcagagatcaatggaaccatgaacgcccacctgccgtttgctgtcattggcagcacagaagaactgaagataggcaacaagatgatgagggcgcggcagtatccttggggcactgtgcaggttgaaaacgaggcccactgcgactttgtgaagctgcgggagatgctgattcgggtcaacatggaggatctgcgggagcagacccacacccggcactatgagctgtatcgccgctgtaagctggaggagatgggcttcaaggacaccgaccctgacagcaaacccttcagtttacaggagacatatgaggccaaaaggaacgagttcctaggggaactccagaaaaaagaagaggagatgagacagatgttcgtccagcgagtcaaagagaaagaagcggagctcaaagaggcagagaaagagctgcacgagaagtttgaccgtctgaagaaactgcaccaggacgagaagaagaaactggaggataagaagaaatccctggatgatgaagtgaatgctttcaagcaaagaaagacggcggctgagctgctccagtcccagggctcccaggctggaggctcacagactctgaagagagacaaagagaagaaaaattaactctgctgtttgctgcatgctgcatgagacccagggtcctgtaatccatggctgtgtactgaatagtattccccgctacagctggactggactccatttagccttttaagccgaggttcctattttaactgacagctttcctttggggtgccaggcagcgaggccccccacccctatcctgccatgtacttcaagctcacttcttctttttgagttccgcaacttgctcctgcctcccagccccactggcactgaccatgaccacctacttctattttttttttagagtttctttttttgatcacttactttcaaagcacacagtcaaacaaggttatgccaaatttccaggcctttttgaagtattgagaaggggaaggggatttctcacttcaattatagatcataataggaagcaaaaagaaaaaaatgaaaagcaaacatatgcacgcacttttcttgttgacaaagcaagaatgtaggtttgctgtgtaggtttggtgctctattgattggtgagtgaccagagcaagtatgaaggtgatgctgccaaagcacaagccagtttcttgggaaaattcaagttacagtggagtatttttttgaagaccatatgcttggaggtagaaacaaaccaacgaccaaaaaaaaaaaaaaaaaaaaaatctgctcagatactcagccagtagctcagagagatgctgagttaggcctgtcaggtctccttgggaaaggcttcatatttgcaactttgatgattctatgtccagcttcagagctgctttcccagaaattcacgcttaaacaaccaaccggtaaccaccacttccccacaccgccgcctggtaattatttgcattacaaaccggaggcgccctcatttgcatttgtgtacagattaactagttaaggcttgagaagctctgaataattcaaaagtattagacccacacagccttggagagaccttcagaaactaaggaggagttttatattaagggagacattttagtcagtaagacgatataacctacttactccgtaaggggaaatgaaggcccggagaagggaagggacttgaccgaggtcccacttctgtttcgaggcagaagccagactaattttcatgcctcctgactcccaatcagtttcacaaagggattcaatctgtttatatacgttacattcctggatacgaggtcttttgatgttcagagtaactgactagttagtattagaagaccctcgaggtttttttccacagaaaaacatctgaagatggattgggtgagggctggcaaaacgaaggcatgccgggccagctccttaacccaatgacccagtgatgctgcaaggctggaacggggtccaggagactgtgtgtaacaggtgccctaggtgacccttataatcagggaagtttggtgaacaaaaatcgaacccatgagtgaacataaattaaaaagttgatcaacctattaaaatgtgtatttcattgggtagcttttctcactgtagacagattttttccttcttcaatgaaaaggcttttaaattagtacaactgttactatttaaaaaaaaaataccctaagtactctgtttacttctggtgaaacaaaaccagtcattagaaatggtctgtgcttttattttcccagactggagtggcttttctgaaacacacacacacacacacacacacacacacacacacacacacgtacacacatccctcacttctcttaagccaagaagtttgctttccctagctgcagtgtagatggctcttgtttttgtttttttgttttaatcatttggcattcacatgtggctgttaatatgtgcttgtttttaattaaaacaagaagctttaaaaaaat

SEQ ID NO: 447121 - DNA, 2321 bp, Homo sapiens
gaagaactggaactgggctggccatagggggaagcggcgcgttaaatccgccccctctccataccctactttcaaggggtgggcggtagaggggaggttggggttggagcagcggcgagggggcccctcccttgcacctccccccaccggacttggtcgcgcccgaagtgtaacactttctctttgtcggaggagctcctctgtttcctgtgcagtagctcccgttgcggcggcacccgtggcagccctggcggacgcaggagcgatggcagcgaccgatatagctcgccaggtgggtgaaggttgccgaactgtccccctggctggacatgtggggtttgacagcttgcctgaccagctggtgaataagtccgtcagccagggcttctgcttcaacatcctgtgcgtgggagagacaggtttgggcaagtccaccctcatggacaccctgttcaacaccaaattcgaaggggagccagccacccacacacagccgggtgtccagctccagtctaatacctatgacctccaagagagcaacgtgaggctaaagctcacgatcgttagcacagttggctttggggaccagatcaacaaagaggacagctacaagcctatcgtggaattcatcgatgcacaattcgaggcctacctgcaggaagagctaaagatccgaagagtgctacacacctaccatgactcccgaatccatgtctgcttgtatttcattgcccccacgggtcattccctgaagtctctggacctagtgactatgaagaagctggacagtaaggtgaacatcatccccatcattgccaaagcagatgccatttcgaagagtgagctaacaaagttcaaaatcaaaatcaccagcgagcttgtcagcaacggagtccagatctatcagtttcctacagatgatgagtcggtggcagagatcaatggaaccatgaacgcccacctgccgtttgctgtcattggcagcacagaagaactgaagataggcaacaagatgatgagggcgcggcagtatccttggggcactgtgcaggttgaaaacgaggcccactgcgactttgtgaagctgcgggagatgctgattcgggtcaacatggaggatctgcgggagcagacccacacccggcactatgagctgtatcgccgctgtaagctggaggagatgggcttcaaggacaccgaccctgacagcaaacccttcagtttacaggagacatatgaggccaaaaggaacgagttcctaggggaactccagaaaaaagaagaggagatgagacagatgttcgtccagcgagtcaaagagaaagaagcggagctcaaagaggcagagaaagagctgcacgagaagtttgaccgtctgaagaaactgcaccaggacgagaagaagaaactggaggataagaagaaatccctggatgatgaagtgaatgctttcaagcaaagaaagacggcggctgagctgctccagtcccagggctcccaggctggaggctcacagactctgaagagagacaaagagaagaaaaattaactctgctgtttgctgcatgctgcatgagacccagggtcctgtttgggcttcctgtagacacccttttcctgcgcaacagagctgggcctccctttctctaatttcccccttaacatgcctggggggcatacaatccaacccgcgccctctcctctcttcctgccaaggtttatagaaacctgagaatctgagggtgatgtctggccgctggtcaagaagccaacagtcatgtggctcgcagatgcatcctgcatcccagtccccctcccagcacccccagccatcccccctgtcttcccccacatctttgccagaggtgtgacatggtcagggggcccatctgctactctttcccaccagctcccctgttccagttctggttgctgttagtttccctgaggtatttgcaaccaccatggctgggtaaccaccgatcagcacagctgtccccttggtctcctgtatcccagtcactagtcctccctggtccaccccaccctcatcctcaggagccacagccatttcttagagggtttcaaaaggacagcctttggcgccttttccttctaacctttgagtccagccctttccagttttcattcactcgaagtaactgcactcaagctgtgctcaaaatcggcaacgcatttatttacaccaagcccttcccataaaacacaactgctgaagaaaatagcagacgtttcccctctctctaactctgggtatcccacagatgcaaaagggagaataaacctgaatattattacca

SEQ ID NO: 447122 - DNA, 2742 bp, Homo sapiens
gaagaactggaactgggctggccatagggggaagcggcgcgttaaatccgccccctctccataccctactttcaaggggtgggcggtagaggggaggttggggttggagcagcggcgagggggcccctcccttgcacctccccccaccggacttggtcgcgcccgaagtgtaacactttctctttgtcggaggagctcctctgtttcctgtgcagtagctcccgttgcggcggcacccgtggcagccctggcggacgcaggagcgatggcagcgaccgatatagctcgccaggtgggtgaaggttgccgaactgtccccctggctggacatgtggggtttgacagcttgcctgaccagctggtgaataagtccgtcagccagggcttctgcttcaacatcctgtgcgtgggagagacaggtttgggcaagtccaccctcatggacaccctgttcaacaccaaattcgaaggggagccagccacccacacacagccgggtgtccagctccagtctaatacctatgacctccaagagagcaacgtgaggctaaagctcacgatcgttagcacagttggctttggggaccagatcaacaaagaggacagctacaagcctatcgtggaattcatcgatgcacaattcgaggcctacctgcaggaagagctaaagatccgaagagtgctacacacctaccatgactcccgaatccatgtctgcttgtatttcattgcccccacgggtcattccctgaagtctctggacctagtgactatgaagaagctggacagtaaggtgaacatcatccccatcattgccaaagcagatgccatttcgaagagtgagctaacaaagttcaaaatcaaaatcaccagcgagcttgtcagcaacggagtccagatctatcagtttcctacagatgatgagtcggtggcagagatcaatggaaccatgaacgcccacctgccgtttgctgtcattggcagcacagaagaactgaagataggcaacaagatgatgagggcgcggcagtatccttggggcactgtgcaggttgaaaacgaggcccactgcgactttgtgaagctgcgggagatgctgattcgggtcaacatggaggatctgcgggagcagacccacacccggcactatgagctgtatcgccgctgtaagctggaggagatgggcttcaaggacaccgaccctgacagcaaacccttcagtttacaggagacatatgaggccaaaaggaacgagttcctaggggaactccagaaaaaagaagaggagatgagacagatgttcgtccagcgagtcaaagagaaagaagcggagctcaaagaggcagagaaagagctgcacgagaagtttgaccgtctgaagaaactgcaccaggacgagaagaagaaactggaggataagaagaaatccctggatgatgaagtgaatgctttcaagcaaagaaagacggcggctgagctgctccagtcccagggctcccaggctggaggctcacagactctgaagagagacaaagagaagaaaaattaactctgctgtttgctgcatgctgcatgagacccagggtcctgtttgggcttcctgtagacacccttttcctgcgcaacagagctgggcctccctttctctaatttcccccttaacatgcctggggggcatacaatccaacccgcgccctctcctctcttcctgccaaggtttatagaaacctgagaatctgagggtgatgtctggccgctggtcaagaagccaacagtcatgtggctcgcagatgcatcctgcatcccagtccccctcccagcacccccagccatcccccctgtcttcccccacatctttgccagaggtgtgacatggtcagggggcccatctgctactctttcccaccagctcccctgttccagttctggttgctgttagtttccctgaggtatttgcaaccaccatggctgggtaaccaccgatcagcacagctgtccccttggtctcctgtatcccagtcactagtcctccctggtccaccccaccctcatcctcaggagccacagccatttcttagagggtttcaaaaggacagcctttggcgccttttccttctaacctttgagtccagccctttccagttttcattcactcgaagtaactgcactcaagctgtgctcaaaatcggcaacgcatttatttacaccaagcccttcccataaaacacaactgctgaagaaaatagcagacgtttcccctctctctaactctgggtatcccacagatgcaaaagggagaataaacctgaatattattaccaaaaaaaaagaaacaaaaaaaaaaaaaaaaaaaaaaaaaaaaaaaaaggggggggcgcgcgtccaaaaaatctctcccgagggggcgcccaattggggggctccccgggttttttgtgccaacgacgggggccccacaattagagggaggcgacacatatattaacacgaccagaaggaccacgggcaacgcgcaacgttataacaaacaaaagacggcggcacgagcggggaaaacaaagcggaacactcgaggggacactctggggaaaaagaggcaccccctataacaactcgcgggggggaggggagcaacatctttgggcggcaccagaagttcaccctacacacgacataactaaaaaggccccctagaggggggcacaatatcaaagcattgtacacacacggcacaaagcgtac

SEQ ID NO: 447123 - DNA, 1948 bp, Homo sapiens
gaagaactggaactgggctggccatagggggaagcggcgcgttaaatccgccccctctccataccctactttcaaggggtgggcggtagaggggaggttggggttggagcagcggcgagggggcccctcccttgcacctccccccaccggacttggtcgcgcccgaagtgtaacactttctctttgtcggaggagctcctctgtttcctgtgcagtagctcccgttgcggcggcacccgtggcagccctggcggacgcaggagcgatggcagcgaccgatatagctcgccaggtgggtgaaggttgccgaactgtccccctggctggacatgtggggtttgacagcttgcctgaccagctggtgaataagtccgtcagccagggcttctgcttcaacatcctgtgcgtgggagagacaggtttgggcaagtccaccctcatggacaccctgttcaacaccaaattcgaaggggagccagccacccacacacagccgggtgtccagctccagtctaatacctatgacctccaagagagcaacgtgaggctaaagctcacgatcgttagcacagttggctttggggaccagatcaacaaagaggacagctacaagcctatcgtggaattcatcgatgcacaattcgaggcctacctgcaggaagagctaaagatccgaagagtgctacacacctaccatgactcccgaatccatgtctgcttgtatttcattgcccccacgggtcattccctgaagtctctggacctagtgactatgaagaagctggacagtaaggtgaacatcatccccatcattgccaaagcagatgccatttcgaagagtgagctaacaaagttcaaaatcaaaatcaccagcgagcttgtcagcaacggagtccagatctatcagtttcctacagatgatgagtcggtggcagagatcaatggaaccatgaacgcccacctgccgtttgctgtcattggcagcacagaagaactgaagataggcaacaagatgatgagggcgcggcagtatccttggggcactgtgcaggttgaaaacgaggcccactgcgactttgtgaagctgcgggagatgctgattcgggtcaacatggaggatctgcgggagcagacccacacccggcactatgagctgtatcgccgctgtaagctggaggagatgggcttcaaggacaccgaccctgacagcaaacccttcagtttacaggagacatatgaggccaaaaggaacgagttcctaggggaactccagaaaaaagaagaggagatgagacagatgttcgtccagcgagtcaaagagaaagaagcggagctcaaagaggcagagaaagagctgcacgagaagtttgaccgtctgaagaaactgcaccaggacgagaagaagaaagctggaggctcacagactctgaagagagacaaagagaagaaaaagtaagtagcaggctgctctggggtggtgccttctctttcctcctgctcatcctcccagggcaggacgtggcacctgaaggggctgaggactggtgaccagaggtgagctgtgggctgtcagactggttgaggtacctataactggtcccagcatccctgtggcacctttggattccctgagcttggggagttgagagtagcagaggggtgtggtcccagaggcccagcccatctgtccagcttgctcaggaaagccctgcaaactcaaggtccataggaaaggaagggaaaagaggaaaagcaaaggagagtgagagagcagaagggaagaaaaaaattagaggtgcagcaatataagagaggaacaaggccgggcacggtggctcacacctataatcccagcactttgggaagccaaggcaggaggaacacttgaggtcaggagtccaagaccagcctggcctatatggcgaaaccccgtctctgcttaaaaaaa

SEQ ID NO: 447124 - DNA, 2630 bp, Homo sapiens
ccaagcgacaggtccagaatcaatcaaccaatcgattgcccaaagcaagatgccatttttccggaaggaaggttggaagctttaaacaaaaaggtattcaaaatcaaaatcaccagcgagcttgtcagcaacggagtccagatctatcagtttcctacagatgatgagtcggtggcagagatcaatggaaccatgaacgcccacctgccgtttgctgtcattggcagcacagaagaactgaagataggcaacaagatgatgagggcgcggcagtatccttggggcactgtgcaggttgaaaacgaggcccactgcgactttgtgaagctgcgggagatgctgattcgggtcaacatggaggatctgcgggagcagacccacacccggcactatgagctgtatcgccgctgtaagctggaggagatgggcttcaaggacaccgaccctgacagcaaacccttcagtttacaggagacatatgaggccaaaaggaacgagttcctaggggaactccagaaaaaagaagaggagatgagacagatgttcgtccagcgagtcaaagagaaagaagcggagctcaaagaggcagagaaagagctgcacgagaagtttgaccgtctgaagaaactgcaccaggacgagaagaagaaactggaggataagaagaaatccctggatgatgaagtgaatgctttcaagcaaagaaagacggcggctgagctgctccagtcccagggctcccaggctggaggctcacagactctgaagagagacaaagagaagaaaaataatccatggctgtgtactgaatagtattccccgctacagctggactggactccatttagccttttaagccgaggttcctattttaactgacagctttcctttggggtgccaggcagcgaggccccccacccctatcctgccatgtacttcaagctcacttcttctttttgagttccgcaacttgctcctgcctcccagccccactggcactgaccatgaccacctacttctattttttttttagagtttctttttttgatcacttactttcaaagcacacagtcaaacaaggttatgccaaatttccaggcctttttgaagtattgagaaggggaaggggatttctcacttcaattatagatcataataggaagcaaaaagaaaaaaatgaaaagcaaacatatgcacgcacttttcttgttgacaaagcaagaatgtaggtttgctgtgtaggtttggtgctctattgattggtgagtgaccagagcaagtatgaaggtgatgctgccaaagcacaagccagtttcttgggaaaattcaagttacagtggagtatttttttgaagaccatatgcttggaggtagaaacaaaccaacgaccaaaaaaaaaaaaaaaaaaaaaatctgctcagatactcagccagtagctcagagagatgctgagttaggcctgtcaggtctccttgggaaaggcttcatatttgcaactttgatgattctatgtccagcttcagagctgctttcccagaaattcacgcttaaacaaccaaccggtaaccaccacttccccacaccgccgcctggtaattatttgcattacaaaccggaggcgccctcatttgcatttgtgtacagattaactagttaaggcttgagaagctctgaataattcaaaagtattagacccacacagccttggagagaccttcagaaactaaggaggagttttatattaagggagacattttagtcagtaagacgatataacctacttactccgtaaggggaaatgaaggcccggagaagggaagggacttgaccgaggtcccacttctgtttcgaggcagaagccagactaattttcatgcctcctgactcccaatcagtttcacaaagggattcaatctgtttatatacgttacattcctggatacgaggtcttttgatgttcagagtaactgactagttagtattagaagaccctcgaggtttttttccacagaaaaacatctgaagatggattgggtgagggctggcaaaacgaaggcatgccgggccagctccttaacccaatgacccagtgatgctgcaaggctggaacggggtccaggagactgtgtgtaacaggtgccctaggtgacccttataatcagggaagtttggtgaacaaaaatcgaacccatgagtgaacataaattaaaaagttgatcaacctattaaaatgtgtatttcattgggtagcttttctcactgtagacagattttttccttcttcaatgaaaaggcttttaaattagtacaactgttactatttaaaaaaaaaataccctaagtactctgtttacttctggtgaaacaaaaccagtcattagaaatggtctgtgcttttattttcccagactggagtggcttttctgaaacacacacacacacacacacacacacacacacacacacacacgtacacacatccctcacttctcttaagccaagaagtttgctttccctagctgcagtgtagatggctcttgtttttgtttttttgttttaatcatttggcattcacatgtggctgttaatatgtgcttgtttttaattaaaacaagaagctttaaaaaaat

SEQ ID NO: 447125 - DNA, 3335 bp, Homo sapiens
aacgggtgatgcggttgaagaaagcctaggtctcttagatgattacctggaggataagaagaaatccctggatgatgaagtgaatgctttcaagcaaagaaagacggcggctgagctgctccagtcccagggctcccaggctggaggctcacagactctgaagagagacaaagagaagaaaaattaactctgctgtttgctgcatgctgcatgagacccagggtcctgtttgggcttcctgtagacacccttttcctgcgcaacagagctgggcctccctttctctaatttcccccttaacatgcctggggggcatacaatccaacccgcgccctctcctctcttcctgccaaggtttatagaaacctgagaatctgagggtgatgtctggccgctggtcaagaagccaacagtcatgtggctcgcagatgcatcctgcatcccagtccccctcccagcacccccagccatcccccctgtcttcccccacatctttgccagaggtgtgacatggtcagggggcccatctgctactctttcccaccagctcccctgttccagttctggttgctgttagtttccctgaggtatttgcaaccaccatggctgggtaaccaccgatcagcacagctgtccccttggtctcctgtatcccagtcactagtcctccctggtccaccccaccctcatcctcaggagccacagccatttcttagagggtttcaaaaggacagcctttggcgccttttccttctaacctttgagtccagccctttccagttttcattcactcgaagtaactgcactcaagctgtgctcaaaatcggcaacgcatttatttacaccaagcccttcccataaaacacaactgctgaagaaaatagcagacgtttcccctctctctaactctgggtatcccacagatgcaaaagggagaataaacctgaatattattaccagcctagagtcttgaatgatagccttaccgaattcttcttgtgaggtatttcagcatctcggggggtaatttccggaagggctccatactgtcccaataaggtgaggccagtagcaggaataataaatcccactttgtaggctggaaaactgagctgtcaaaagaatcaagtgtttgggggtttgctctgatgagtcttctagttcatttggtgaatgtcatgatgatttttaacatgcattttgcatgcatcccccaataagaagagatgagactcggccggagagaagaaaaggcccttaactttctttccaatttaaggagttgagagtttaaaaatattccagccctaagtttttatcatgggtcccatctgatagtggctttgggaacctctgtgaagtagagagccctcccttgtcagggttatgaggcacagtggcctttggtgtttggccagtgacagtgtgagagatggagttgacctggcaatgatctgtggctaacatgccgtctctctgcccttcctttgcagtaatccatggctgtgtactgaatagtattccccgctacagctggactggactccatttagccttttaagccgaggttcctattttaactgacagctttcctttggggtgccaggcagcgaggccccccacccctatcctgccatgtacttcaagctcacttcttctttttgagttccgcaacttgctcctgcctcccagccccactggcactgaccatgaccacctacttctattttttttttagagtttctttttttgatcacttactttcaaagcacacagtcaaacaaggttatgccaaatttccaggcctttttgaagtattgagaaggggaaggggatttctcacttcaattatagatcataataggaagcaaaaagaaaaaaatgaaaagcaaacatatgcacgcacttttcttgttgacaaagcaagaatgtaggtttgctgtgtaggtttggtgctctattgattggtgagtgaccagagcaagtatgaaggtgatgctgccaaagcacaagccagtttcttgggaaaattcaagttacagtggagtatttttttgaagaccatatgcttggaggtagaaacaaaccaacgaccaaaaaaaaaaaaaaaaaaaaaatctgctcagatactcagccagtagctcagagagatgctgagttaggcctgtcaggtctccttgggaaaggcttcatatttgcaactttgatgattctatgtccagcttcagagctgctttcccagaaattcacgcttaaacaaccaaccggtaaccaccacttccccacaccgccgcctggtaattatttgcattacaaaccggaggcgccctcatttgcatttgtgtacagattaactagttaaggcttgagaagctctgaataattcaaaagtattagacccacacagccttggagagaccttcagaaactaaggaggagttttatattaagggagacattttagtcagtaagacgatataacctacttactccgtaaggggaaatgaaggcccggagaagggaagggacttgaccgaggtcccacttctgtttcgaggcagaagccagactaattttcatgcctcctgactcccaatcagtttcacaaagggattcaatctgtttatatacgttacattcctggatacgaggtcttttgatgttcagagtaactgactagttagtattagaagaccctcgaggtttttttccacagaaaaacatctgaagatggattgggtgagggctggcaaaacgaaggcatgccgggccagctccttaacccaatgacccagtgatgctgcaaggctggaacggggtccaggagactgtgtgtaacaggtgccctaggtgacccttataatcagggaagtttggtgaacaaaaatcgaacccatgagtgaacataaattaaaaagttgatcaacctattaaaatgtgtatttcattgggtagcttttctcactgtagacagattttttccttcttcaatgaaaaggcttttaaattagtacaactgttactatttaaaaaaaaaataccctaagtactctgtttacttctggtgaaacaaaaccagtcattagaaatggtctgtgcttttattttcccagactggagtggcttttctgaaacacacacacacacacacacacacacacacacacacacacacgtacacacatccctcacttctcttaagccaagaagtttgctttccctagctgcagtgtagatggctcttgtttttgtttttttgttttaatcatttggcattcacatgtggctgttaatatgtgcttgtttttaattaaaacaagaagctttaaaaaaat

SEQ ID NO: 447126 - DNA, 679 bp, Homo sapiens
  misc_feature (28)..(28): n is a, c, g, or t
  misc_feature (32)..(32): n is a, c, g, or t
aaacttcggctaggtacgaggctgggtngttnagaagaccctcgaggtttttttccacagaaaaacatctgaagatggattgggtgagggctggcaaaacgaaggcatgccgggccagctccttaacccaatgacccagtgatgctgcaaggctggaacggggtccaggagactgtgtgtaacaggtgccctaggtgacccttataatcagggaagtttggtgaacaaaaatcgaacccatgagtgaacataaattaaaaagttgatcaacctattaaaatgtgtatttcattgggtagcttttctcactgtagacagattttttccttcttcaatgaaaaggcttttaaattagtacaactgttactatttaaaaaaaaaataccctaagtactctgtttacttctggtgaaacaaaaccagtcattagaaatggtctgtgcttttattttcccagactggagtggcttttctgaaacacacacacacacacacacacacacacacacacacacacacgtacacacatccctcacttctcttaagccaagaagtttgctttccctagctgcagtgtagatggctcttgtttttgtttttttgttttaatcatttggcattcacatgtggctgttaatatgtgcttgtttttaattaaaacaagaagctttaaaaaaat

SEQ ID NO: 447127 - DNA, 2614 bp, Homo sapiens
gaagaactggaactgggctggccatagggggaagcggcgcgttaaatccgccccctctccataccctactttcaaggggtgggcggtagaggggaggttggggttggagcagcggcgagggggcccctcccttgcacctccccccaccggacttggtcgcgcccgaagtgtaacactttctctttgtcggaggagctcctctgtttcctgtgcagtagctcccgttgcggcggcacccgtggcagccctggcggacgcaggagcgatggcagcgaccgatatagctcgccaggtgggtgaaggttgccgaactgtccccctggctggacatgtggggtttgacagcttgcctgaccagctggtgaataagtccgtcagccagggcttctgcttcaacatcctgtgcgtgggagagacaggtttgggcaagtccaccctcatggacaccctgttcaacaccaaattcgaaggggagccagccacccacacacagccgggtgtccagctccagtctaatacctatgacctccaagagagcaacgtgaggctaaagctcacgatcgttagcacagttggctttggggaccagatcaacaaagaggacagctacaagcctatcgtggaattcatcgatgcacaattcgaggcctacctgcaggaagagctaaagatccgaagagtgctacacacctaccatgactcccgaatccatgtctgcttgtatttcattgcccccacgggtcattccctgaagtctctggacctagtgactatgaagaagctggacagtaaggtgaacatcatccccatcattgccaaagcagatgccatttcgaagagtgagctaacaaagttcaaaatcaaaatcaccagcgagcttgtcagcaacggagtccagatctatcagtttcctacagatgatgagtcggtggcagagatcaatggaaccatgaacgcccacctgccgtttgctgtcattggcagcacagaagaactgaagataggcaacaagatgatgagggcgcggcagtatccttggggcactgtgcaggttgaaaacgaggcccactgcgactttgtgaagctgcgggagatgctgattcgggtcaacatggaggatctgcgggagcagacccacacccggcactatgagctgtatcgccgctgtaagctggaggagatgggcttcaaggacaccgaccctgacagcaaacccttcagtttacaggagacatatgaggccaaaaggaacgagttcctaggggaactccagaaaaaagaagaggagatgagacagatgttcgtccagcgagtcaaagagaaagaagcggagctcaaagaggcagagaaagagctgcacgagaagtttgaccgtctgaagaaactgcaccaggacgagaagaagaaactggaggataagaagaaatccctggatgatgaagtgaatgctttcaagcaaagaaagacggcggctgagctgctccagtcccagggctcccaggctggaggctcacagactctgaagagagacaaagagaagaaaaattaactctgctgtttgctgcatgctgcatgagacccagggtcctgctttttttaatcttgtcttcagcagctgcactaagtctaaaggagaagactgccattatagaagagttagggttccatattgtctcaaatcagaaatcaaccaatttcctctcccctcaaactgcaagcacacacacatacaccacaccactcaacaagtgttcatgtgtccctgtgtccaggcaagaagctctcttcctgactcacatggtattttaaatggaagtgtcttgtcctaactaacaaggcaggaaaagaaccatcagagctggaaaatggacgaaatgtaacctcagagaaacaactacaggaccactcacccaagtgtaagtgactggggcaggacacctcagctgtgggtatgaaagtactgttctgttcacaaggttttgtttgagttttatgtttttcttttaaacatttctctggttcgatgggttgactgtctacagccactgttaaacatttctgaatatgcaagagaaagtcaagtgacatttgtatcttcttcagcattcgcagaccttctatagattccagcaaagggggaaaatgtatccactatctaacacttaggtagagaagggagggggtttaagcttagtgagggcaaaattactccattccaccttccgagaccagttagggttttgagagaggtttctgctcaacctgggatctggagggagagctttgatgttggtaaatctgccttgaattcattggtttaacttgcatcaaaataccatgtgagtgtgctcattctcatatatcccctaccaccatcaccaccattctgctgttcagtgtctcttgagagagcctctttgcatgttttccagaatctgtgtgtgtttttcctttcttctcctttgttctttttgctcaaaggtgtgaccagtcattgcccctctggggctttcattctccaggagaaacatcccagaaccagcactgtttagcctgatacctttctaatgtccatgtcaattttcaataaaattcaaagaaatgctaaaaaaaa

SEQ ID NO: 447128 - DNA, 2034 bp, Homo sapiens
ggggaaactcggccgatatcctccttggccaggaaagattgttaatccaccaaaggacttgaagaaacctcgcggaaagaaatgcttctttgtgaaattttttggaacagaagatcatgcctggatcaaagtggaacagctgaagccatatcatgctcataaagaggaaatgataaaaattaacaagggtaaacgattccagcaagcggtagatgctgtcgaagagttcctcaggagagccaaagggaaagaccagacgtcatcccacaattcttctgatgacaagaatcgacgtaattccagtgaggagagaagtaggccaaactcaggtgatgagaagcgcaaacttagcctgtctgaagggaaggtgaagaagaacatgggagaaggaaagaagagggtgtcttcaggctcttcagagagaggctccaaatcccctctgaaaagagcccaagagcaaagtccccggaagcggggtcggcccccaaaggatgagaaggatctcaccatcccggagtctagtaccgtgaaggggatgatggccggaccgatggccgcgtttaaatggcagccaaccgcaagcgagcctgttaaagatgcagatcctcatttccatcatttcctgctaagccaaacagagaaggaaactggctccacctccatccaggcagctgacagcacagccgtgaatggcagcatcacacccacagacaaaaagataggatttttgggccttggtctcatgggaagtggaatcgtctccaacttgctaaaaatgggtcacacagtgactgtctggaaccgcactgcagagaaatgtgatttgttcatccaggagggggcccgtctgggaagaacccccgctgaagtcgtctcaacctgcgacatcactttcgcctgcgtgtcggatcccaaggcggccaaggacctggtgctgggccccagtggtgtgctgcaagggatccgccctgggaagtgctacgtggacatgtcaacagtggacgctgacaccgtcactgagctggcccaggtgattgtgtccaggggggggcgctttctggaagcccccgtctcagggaatcagcagctgtctaatgacgggatgttggtgatcttagcggctggagacaggggcttatatgaggactgcagcagctgcttccaggcgatggggaagacctccttcttcctaggtgaagtgggcaatgcagccaagatgatgctgatcgtgaacatggtccaagggagcttcatggccactattgccgaggggctgaccctggcccaggtgacaggccagtcccagcagacactcttggacatcctcaatcagggacagttggccagcatcttcctggaccagaagtgccaaaatatcctgcaaggaaactttaagcctgatttctacctgaaatacattcagaaggatctccgcttagccattgcgctgggtgatgcggtcaaccatccgactcccatggcagctgcagcaaatgaggtgtacaaaagagccaaggcgctggaccagtccgacaacgatatgtccgccgtgtaccgagcctacatacactaagctgtcgacaccccgccctcacccctccaatcccccctctgaccccctcttcctcacatggggtcgggggcctgggagttcattctggaccagcccacctatctccatttccttttatacagactttgagacttgccatcagcacagcacacagcagcacccttcccctgaggccggtggggaggggacaagtgtcagcaggattggcgtgtgggaaagctcttgagctgggcactggccccccggacgaggtggctgtgtgttcacacacacacacacacacacacacacacacacacacgtacacacatccctcacttctcttaagccaagaagtttgctttccctagctgcagtgtagatggctcttgtttttgtttttttgttttaatcatttggcattcacatgtggctgttaatatgtgcttgtttttaattaaaacaagaagctttaaaaaaat

SEQ ID NO: 447129 - DNA, 3436 bp, Homo sapiens
gaagaactggaactgggctggccatagggggaagcggcgcgttaaatccgccccctctccataccctactttcaaggggtgggcggtagaggggaggttggggttggagcagcggcgagggggcccctcccttgcacctccccccaccggacttggtcgcgcccgaagtgtaacactttctctttgtcggaggagctcctctgtttcctgtgcagtagctcccgttgcggcggcacccgtggcagccctggcggacgcaggagcgatggcagcgaccgatatagctcgccaggtgggtgaaggttgccgaactgtccccctggctggacatgtggggtttgacagcttgcctgaccagctggtgaataagtccgtcagccagggcttctgcttcaacatcctgtgcgtgggagagacaggtttgggcaagtccaccctcatggacaccctgttcaacaccaaattcgaaggggagccagccacccacacacagccgggtgtccagctccagtctaatacctatgacctccaagagagcaacgtgaggctaaagctcacgatcgttagcacagttggctttggggaccagatcaacaaagaggacagctacaagcctatcgtggaattcatcgatgcacaattcgaggcctacctgcaggaagagctaaagatccgaagagtgctacacacctaccatgactcccgaatccatgtctgcttgtatttcattgcccccacgggtcattccctgaagtctctggacctagtgactatgaagaagctggacagtaaggtgaacatcatccccatcattgccaaagcagatgccatttcgaagagtgagctaacaaagttcaaaatcaaaatcaccagcgagcttgtcagcaacggagtccagatctatcagtttcctacagatgatgagtcggtggcagagatcaatggaaccatgaacgcccacctgccgtttgctgtcattggcagcacagaagaactgaagataggcaacaagatgatgagggcgcggcagtatccttggggcactgtgcaggttgaaaacgaggcccactgcgactttgtgaagctgcgggagatgctgattcgggtcaacatggaggatctgcgggagcagacccacacccggcactatgagctgtatcgccgctgtaagctggaggagatgggcttcaaggacaccgaccctgacagcaaacccttcagtttacaggagacatatgaggccaaaaggaacgagttcctaggggaactccagaaaaaagaagaggagatgagacagatgttcgtccagcgagtcaaagagaaagaagcggagctcaaagaggcagagaaagagctgcacgagaagtttgaccgtctgaagaaactgcaccaggacgagaagaagaaactggaggataagaagaaatccctggatgatgaagtgaatgctttcaagcaaagaaagacggcggctgagctgctccagtcccagggctcccaggctggaggctcacagactctgaagagagacaaagagaagaaaaataatccatggctgtgtactgaatagtattccccgctacagctggactggactccatttagccttttaagccgaggttcctattttaactgacagctttcctttggggtgccaggcagcgaggccccccacccctatcctgccatgtacttcaagctcacttcttctttttgagttccgcaacttgctcctgcctcccagccccactggcactgaccatgaccacctacttctattttttttttagagtttctttttttgatcacttactttcaaagcacacagtcaaacaaggttatgccaaatttccaggcctttttgaagtattgagaaggggaaggggatttctcacttcaattatagatcataataggaagcaaaaagaaaaaaatgaaaagcaaacatatgcacgcacttttcttgttgacaaagcaagaatgtaggtttgctgtgtaggtttggtgctctattgattggtgagtgaccagagcaagtatgaaggtgatgctgccaaagcacaagccagtttcttgggaaaattcaagttacagtggagtatttttttgaagaccatatgcttggaggtagaaacaaaccaacgaccaaaaaaaaaaaaaaaaaaaaaatctgctcagatactcagccagtagctcagagagatgctgagttaggcctgtcaggtctccttgggaaaggcttcatatttgcaactttgatgattctatgtccagcttcagagctgctttcccagaaattcacgcttaaacaaccaaccggtaaccaccacttccccacaccgccgcctggtaattatttgcattacaaaccggaggcgccctcatttgcatttgtgtacagattaactagttaaggcttgagaagctctgaataattcaaaagtattagacccacacagccttggagagaccttcagaaactaaggaggagttttatattaagggagacattttagtcagtaagacgatataacctacttactccgtaaggggaaatgaaggcccggagaagggaagggacttgaccgaggtcccacttctgtttcgaggcagaagccagactaattttcatgcctcctgactcccaatcagtttcacaaagggattcaatctgtttatatacgttacattcctggatacgaggtcttttgatgttcagagtaactgactagttagtattagaagaccctcgaggtttttttccacagaaaaacatctgaagatggattgggtgagggctggcaaaacgaaggcatgccgggccagctccttaacccaatgacccagtgatgctgcaaggctggaacggggtccaggagactgtgtgtaacaggtgccctaggtgacccttataatcagggaagtttggtgaacaaaaatcgaacccatgagtgaacataaattaaaaagttgatcaacctattaaaatgtgtatttcattgggtagcttttctcactgtagacagattttttccttcttcaatgaaaaggcttttaaattagtacaactgttactatttaaaaaaaaaataccctaagtactctgtttacttctggtgaaacaaaaccagtcattagaaatggtctgtgcttttattttcccagactggagtggcttttctgaaacacacacacacacacacacacacacacacacacacacacacgtacacacatccctcacttctcttaagccaagaagtttgctttccctagctgcagtgtagatggctccgcgcgcgaagagagcccagggaacaacacattgcgggcatacacagtggtggctgaacatagagagcaggaaacaacacaacaccacgaggctcaacaaacaacacaaacaaaaaaccccaggcaacaagccgggggaaaa

SEQ ID NO: 447130 - DNA, 4697 bp, Homo sapiens
gaagaactggaactgggctggccatagggggaagcggcgcgttaaatccgccccctctccataccctactttcaaggggtgggcggtagaggggaggttggggttggagcagcggcgagggggcccctcccttgcacctccccccaccggacttggtcgcgcccgaagtgtaacactttctctttgtcggaggagctcctctgtttcctgtgcagtagctcccgttgcggcggcacccgtggcagccctggcggacgcaggagcgatggcagcgaccgatatagctcgccaggtgggtgaaggttgccgaactgtccccctggctggacatgtggggtttgacagcttgcctgaccagctggtgaataagtccgtcagccagggcttctgcttcaacatcctgtgcgtgggagagacaggtttgggcaagtccaccctcatggacaccctgttcaacaccaaattcgaaggggagccagccacccacacacagccgggtgtccagctccagtctaatacctatgacctccaagagagcaacgtgaggctaaagctcacgatcgttagcacagttggctttggggaccagatcaacaaagaggacagctacaagcctatcgtggaattcatcgatgcacaattcgaggcctacctgcaggaagagctaaagatccgaagagtgctacacacctaccatgactcccgaatccatgtctgcttgtatttcattgcccccacgggtcattccctgaagtctctggacctagtgactatgaagaagctggacagtaaggtgaacatcatccccatcattgccaaagcagatgccatttcgaagagtgagctaacaaagttcaaaatcaaaatcaccagcgagcttgtcagcaacggagtccagatctatcagtttcctacagatgatgagtcggtggcagagatcaatggaaccatgaacgcccacctgccgtttgctgtcattggcagcacagaagaactgaagataggcaacaagatgatgagggcgcggcagtatccttggggcactgtgcaggttgaaaacgaggcccactgcgactttgtgaagctgcgggagatgctgattcgggtcaacatggaggatctgcgggagcagacccacacccggcactatgagctgtatcgccgctgtaagctggaggagatgggcttcaaggacaccgaccctgacagcaaacccttcagtttacaggagacatatgaggccaaaaggaacgagttcctaggggaactccagaaaaaagaagaggagatgagacagatgttcgtccagcgagtcaaagagaaagaagcggagctcaaagaggcagagaaagagctgcacgagaagtttgaccgtctgaagaaactgcaccaggacgagaagaagaaactggaggataagaagaaatccctggatgatgaagtgaatgctttcaagcaaagaaagacggcggctgagctgctccagtcccagggctcccaggctggaggctcacagactctgaagagagacaaagagaagaaaaattaactctgctgtttgctgcatgctgcatgagacccagggtcctgtttgggcttcctgtagacacccttttcctgcgcaacagagctgggcctccctttctctaatttcccccttaacatgcctggggggcatacaatccaacccgcgccctctcctctcttcctgccaaggtttatagaaacctgagaatctgagggtgatgtctggccgctggtcaagaagccaacagtcatgtggctcgcagatgcatcctgcatcccagtccccctcccagcacccccagccatcccccctgtcttcccccacatctttgccagaggtgtgacatggtcagggggcccatctgctactctttcccaccagctcccctgttccagttctggttgctgttagtttccctgaggtatttgcaaccaccatggctgggtaaccaccgatcagcacagctgtccccttggtctcctgtatcccagtcactagtcctccctggtccaccccaccctcatcctcaggagccacagccatttcttagagggtttcaaaaggacagcctttggcgccttttccttctaacctttgagtccagccctttccagttttcattcactcgaagtaactgcactcaagctgtgctcaaaatcggcaacgcatttatttacaccaagcccttcccataaaacacaactgctgaagaaaatagcagacgtttcccctctctctaactctgggtatcccacagatgcaaaagggagaataaacctgaatattattaccagcctagagtcttgaatgatagccttaccgaattcttcttgtgaggtatttcagcatctcggggggtaatttccggaagggctccatactgtcccaataaggtgaggccagtagcaggaataataaatcccactttgtaggctggaaaactgagctgtcaaaagaatcaagtgtttgggggtttgctctgatgagtcttctagttcatttggtgaatgtcatgatgatttttaacatgcattttgcatgcatcccccaataagaagagatgagactcggccggagagaagaaaaggcccttaactttctttccaatttaaggagttgagagtttaaaaatattccagccctaagtttttatcatgggtcccatctgatagtggctttgggaacctctgtgaagtagagagccctcccttgtcagggttatgaggcacagtggcctttggtgtttggccagtgacagtgtgagagatggagttgacctggcaatgatctgtggctaacatgccgtctctctgcccttcctttgcagtaatccatggctgtgtactgaatagtattccccgctacagctggactggactccatttagccttttaagccgaggttcctattttaactgacagctttcctttggggtgccaggcagcgaggccccccacccctatcctgccatgtacttcaagctcacttcttctttttgagttccgcaacttgctcctgcctcccagccccactggcactgaccatgaccacctacttctattttttttttagagtttctttttttgatcacttactttcaaagcacacagtcaaacaaggttatgccaaatttccaggcctttttgaagtattgagaaggggaaggggatttctcacttcaattatagatcataataggaagcaaaaagaaaaaaatgaaaagcaaacatatgcacgcacttttcttgttgacaaagcaagaatgtaggtttgctgtgtaggtttggtgctctattgattggtgagtgaccagagcaagtatgaaggtgatgctgccaaagcacaagccagtttcttgggaaaattcaagttacagtggagtatttttttgaagaccatatgcttggaggtagaaacaaaccaacgaccaaaaaaaaaaaaaaaaaaaaaatctgctcagatactcagccagtagctcagagagatgctgagttaggcctgtcaggtctccttgggaaaggcttcatatttgcaactttgatgattctatgtccagcttcagagctgctttcccagaaattcacgcttaaacaaccaaccggtaaccaccacttccccacaccgccgcctggtaattatttgcattacaaaccggaggcgccctcatttgcatttgtgtacagattaactagttaaggcttgagaagctctgaataattcaaaagtattagacccacacagccttggagagaccttcagaaactaaggaggagttttatattaagggagacattttagtcagtaagacgatataacctacttactccgtaaggggaaatgaaggcccggagaagggaagggacttgaccgaggtcccacttctgtttcgaggcagaagccagactaattttcatgcctcctgactcccaatcagtttcacaaagggattcaatctgtttatatacgttacattcctggatacgaggtcttttgatgttcagagtaactgactagttagtattagaagaccctcgaggtttttttccacagaaaaacatctgaagatggattgggtgagggctggcaaaacgaaggcatgccgggccagctccttaacccaatgacccagtgatgctgcaaggctggaacggggtccaggagactgtgtgtaacaggtgccctaggtgacccttataatcagggaagtttggtgaacaaaaatcgaacccatgagtgaacataaattaaaaagttgatcaacctattaaaatgtgtatttcattgggtagcttttctcactgtagacagattttttccttcttcaatgaaaaggcttttaaattagtacaactgttactatttaaaaaaaaaataccctaagtactctgtttacttctggtgaaacaaaaccagtcattagaaatggtctgtgcttttattttcccagactggagtggcttttctgaaacacacacacacacacacacacacacacacacacacacacacgtacacacatccctcacttctcttaagccaagaagtttgctttccctagctgcagtgtagatggctcttgtttttgtttttttgttttaatcatttggcattcacatgtggctgttaatatgtgcttgtttttaattaaaacaagaagctttaaaaaaat

SEQ ID NO: 447131 - DNA, 4652 bp, Homo sapiens
gaagaactggaactgggctggccatagggggaagcggcgcgttaaatccgccccctctccataccctactttcaaggggtgggcggtagaggggaggttggggttggagcagcggcgagggggcccctcccttgcacctccccccaccggacttggtcgcgcccgaagtgtaacactttctctttgtcggaggagctcctctgtttcctgtgcagtagctcccgttgcggcggcacccgtggcagccctggcggacgcaggagcgatggcagcgaccgatatagctcgccaggtgggtgaaggttgccgaactgtccccctggctggacatgtggggtttgacagcttgcctgaccagctggtgaataagtccgtcagccagggcttctgcttcaacatcctgtgcgtgggagagacaggtttgggcaagtccaccctcatggacaccctgttcaacaccaaattcgaaggggagccagccacccacacacagccgggtgtccagctccagtctaatacctatgacctccaagagagcaacgtgaggctaaagctcacgatcgttagcacagttggctttggggaccagatcaacaaagaggacagctacaagcctatcgtggaattcatcgatgcacaattcgaggcctacctgcaggaagagctaaagatccgaagagtgctacacacctaccatgactcccgaatccatgtctgcttgtatttcattgcccccacgggtcattccctgaagtctctggacctagtgactatgaagaagctggacagtaaggtgaacatcatccccatcattgccaaagcagatgccatttcgaagagtgagctaacaaagttcaaaatcaaaatcaccagcgagcttgtcagcaacggagtccagatctatcagtttcctacagatgatgagtcggtggcagagatcaatggaaccatgaacgcccacctgccgtttgctgtcattggcagcacagaagaactgaagataggcaacaagatgatgagggcgcggcagtatccttggggcactgtgcaggttgaaaacgaggcccactgcgactttgtgaagctgcgggagatgctgattcgggtcaacatggaggatctgcgggagcagacccacacccggcactatgagctgtatcgccgctgtaagctggaggagatgggcttcaaggacaccgaccctgacagcaaacccttcagtttacaggagacatatgaggccaaaaggaacgagttcctaggggaactccagaaaaaagaagaggagatgagacagatgttcgtccagcgagtcaaagagaaagaagcggagctcaaagaggcagagaaagagctgcacgagaagtttgaccgtctgaagaaactgcaccaggacgagaagaagaaactggaggataagaagaaatccctggatgatgaagtgaatgctttcaagcaaagaaagacggcggctgagctgctccagtcccagggctcccaggctggaggctcacagactctgaagagagacaaagagaagaaaaatttgggcttcctgtagacacccttttcctgcgcaacagagctgggcctccctttctctaatttcccccttaacatgcctggggggcatacaatccaacccgcgccctctcctctcttcctgccaaggtttatagaaacctgagaatctgagggtgatgtctggccgctggtcaagaagccaacagtcatgtggctcgcagatgcatcctgcatcccagtccccctcccagcacccccagccatcccccctgtcttcccccacatctttgccagaggtgtgacatggtcagggggcccatctgctactctttcccaccagctcccctgttccagttctggttgctgttagtttccctgaggtatttgcaaccaccatggctgggtaaccaccgatcagcacagctgtccccttggtctcctgtatcccagtcactagtcctccctggtccaccccaccctcatcctcaggagccacagccatttcttagagggtttcaaaaggacagcctttggcgccttttccttctaacctttgagtccagccctttccagttttcattcactcgaagtaactgcactcaagctgtgctcaaaatcggcaacgcatttatttacaccaagcccttcccataaaacacaactgctgaagaaaatagcagacgtttcccctctctctaactctgggtatcccacagatgcaaaagggagaataaacctgaatattattaccagcctagagtcttgaatgatagccttaccgaattcttcttgtgaggtatttcagcatctcggggggtaatttccggaagggctccatactgtcccaataaggtgaggccagtagcaggaataataaatcccactttgtaggctggaaaactgagctgtcaaaagaatcaagtgtttgggggtttgctctgatgagtcttctagttcatttggtgaatgtcatgatgatttttaacatgcattttgcatgcatcccccaataagaagagatgagactcggccggagagaagaaaaggcccttaactttctttccaatttaaggagttgagagtttaaaaatattccagccctaagtttttatcatgggtcccatctgatagtggctttgggaacctctgtgaagtagagagccctcccttgtcagggttatgaggcacagtggcctttggtgtttggccagtgacagtgtgagagatggagttgacctggcaatgatctgtggctaacatgccgtctctctgcccttcctttgcagtaatccatggctgtgtactgaatagtattccccgctacagctggactggactccatttagccttttaagccgaggttcctattttaactgacagctttcctttggggtgccaggcagcgaggccccccacccctatcctgccatgtacttcaagctcacttcttctttttgagttccgcaacttgctcctgcctcccagccccactggcactgaccatgaccacctacttctattttttttttagagtttctttttttgatcacttactttcaaagcacacagtcaaacaaggttatgccaaatttccaggcctttttgaagtattgagaaggggaaggggatttctcacttcaattatagatcataataggaagcaaaaagaaaaaaatgaaaagcaaacatatgcacgcacttttcttgttgacaaagcaagaatgtaggtttgctgtgtaggtttggtgctctattgattggtgagtgaccagagcaagtatgaaggtgatgctgccaaagcacaagccagtttcttgggaaaattcaagttacagtggagtatttttttgaagaccatatgcttggaggtagaaacaaaccaacgaccaaaaaaaaaaaaaaaaaaaaaatctgctcagatactcagccagtagctcagagagatgctgagttaggcctgtcaggtctccttgggaaaggcttcatatttgcaactttgatgattctatgtccagcttcagagctgctttcccagaaattcacgcttaaacaaccaaccggtaaccaccacttccccacaccgccgcctggtaattatttgcattacaaaccggaggcgccctcatttgcatttgtgtacagattaactagttaaggcttgagaagctctgaataattcaaaagtattagacccacacagccttggagagaccttcagaaactaaggaggagttttatattaagggagacattttagtcagtaagacgatataacctacttactccgtaaggggaaatgaaggcccggagaagggaagggacttgaccgaggtcccacttctgtttcgaggcagaagccagactaattttcatgcctcctgactcccaatcagtttcacaaagggattcaatctgtttatatacgttacattcctggatacgaggtcttttgatgttcagagtaactgactagttagtattagaagaccctcgaggtttttttccacagaaaaacatctgaagatggattgggtgagggctggcaaaacgaaggcatgccgggccagctccttaacccaatgacccagtgatgctgcaaggctggaacggggtccaggagactgtgtgtaacaggtgccctaggtgacccttataatcagggaagtttggtgaacaaaaatcgaacccatgagtgaacataaattaaaaagttgatcaacctattaaaatgtgtatttcattgggtagcttttctcactgtagacagattttttccttcttcaatgaaaaggcttttaaattagtacaactgttactatttaaaaaaaaaataccctaagtactctgtttacttctggtgaaacaaaaccagtcattagaaatggtctgtgcttttattttcccagactggagtggcttttctgaaacacacacacacacacacacacacacacacacacacacacacgtacacacatccctcacttctcttaagccaagaagtttgctttccctagctgcagtgtagatggctcttgtttttgtttttttgttttaatcatttggcattcacatgtggctgttaatatgtgcttgtttttaattaaaacaagaagctttaaaaaaat

SEQ ID NO: 447132 - DNA, 4506 bp, Homo sapiens
gcctggtggcgaattcggcacgaggagctcccgttgcggcggcacccgtggcagccctggcggacgcaggagcgatggcagcgaccgatatagctcgccaggtgggtgaaggttgccgaactgtccccctggctggacatgtggggtttgacagcttgcctgaccagctggtgaataagtccgtcagccagggcttctgcttcaacatcctgtgcgtgggagagacaggtttgggcaagtccaccctcatggacaccctgttcaacaccaaattcgaaggggagccagccacccacacacagccgggtgtccagctccagtctaatacctatgacctccaagagagcaacgtgaggctaaagctcacgatcgttagcacagttggctttggggaccagatcaacaaagaggacagctacaagcctatcgtggaattcatcgatgcacaattcgaggcctacctgcaggaagagctaaagatccgaagagtgctacacacctaccatgactcccgaatccatgtctgcttgtatttcattgcccccacgggtcattccctgaagtctctggacctagtgactatgaagaagctggacagtaaggtgaacatcatccccatcattgccaaagcagatgccatttcgaagagtgagctaacaaagttcaaaatcaaaatcaccagcgagcttgtcagcaacggagtccagatctatcagtttcctacagatgatgagtcggtggcagagatcaatggaaccatgaacgcccacctgccgtttgctgtcattggcagcacagaagaactgaagataggcaacaagatgatgagggcgcggcagtatccttggggcactgtgcaggttgaaaacgaggcccactgcgactttgtgaagctgcgggagatgctgattcgggtcaacatggaggatctgcgggagcagacccacacccggcactatgagctgtatcgccgctgtaagctggaggagatgggcttcaaggacaccgaccctgacagcaaacccttcagtttacaggagacatatgaggccaaaaggaacgagttcctaggggaactccagaaaaaagaagaggagatgagacagatgttcgtccagcgagtcaaagagaaagaagcggagctcaaagaggcagagaaagagctgcacgagaagtttgaccgtctgaagaaactgcaccaggacgagaagaagaaactggaggataagaagaaatccctggatgatgaagtgaatgctttcaagcaaagaaagacggcggctgagctgctccagtcccagggctcccaggctggaggctcacagactctgaagagagacaaagagaagaaaaattaactctgctgtttgctgcatgctgcatgagacccagggtcctgtttgggcttcctgtagacacccttttcctgcgcaacagagctgggcctccctttctctaatttcccccttaacatgcctggggggcatacaatccaacccgcgccctctcctctcttcctgccaaggtttatagaaacctgagaatctgagggtgatgtctggccgctggtcaagaagccaacagtcatgtggctcgcagatgcatcctgcatcccagtccccctcccagcacccccagccatcccccctgtcttcccccacatctttgccagaggtgtgacatggtcagggggcccatctgctactctttcccaccagctcccctgttccagttctggttgctgttagtttccctgaggtatttgcaaccaccatggctgggtaaccaccgatcagcacagctgtccccttggtctcctgtatcccagtcactagtcctccctggtccaccccaccctcatcctcaggagccacagccatttcttagagggtttcaaaaggacagcctttggcgccttttccttctaacctttgagtccagccctttccagttttcattcactcgaagtaactgcactcaagctgtgctcaaaatcggcaacgcatttatttacaccaagcccttcccataaaacacaactgctgaagaaaatagcagacgtttcccctctctctaactctgggtatcccacagatgcaaaagggagaataaacctgaatattattaccagcctagagtcttgaatgatagccttaccgaattcttcttgtgaggtatttcagcatctcggggggtaatttccggaagggctccatactgtcccaataaggtgaggccagtagcaggaataataaatcccactttgtaggctggaaaactgagctgtcaaaagaatcaagtgtttgggggtttgctctgatgagtcttctagttcatttggtgaatgtcatgatgatttttaacatgcattttgcatgcatcccccaataagaagagatgagactcggccggagagaagaaaaggcccttaactttctttccaatttaaggagttgagagtttaaaaatattccagccctaagtttttatcatgggtcccatctgatagtggctttgggaacctctgtgaagtagagagccctcccttgtcagggttatgaggcacagtggcctttggtgtttggccagtgacagtgtgagagatggagttgacctggcaatgatctgtggctaacatgccgtctctctgcccttcctttgcagtaatccatggctgtgtactgaatagtattccccgctacagctggactggactccatttagccttttaagccgaggttcctattttaactgacagctttcctttggggtgccaggcagcgaggccccccacccctatcctgccatgtacttcaagctcacttcttctttttgagttccgcaacttgctcctgcctcccagccccactggcactgaccatgaccacctacttctattttttttttagagtttctttttttgatcacttactttcaaagcacacagtcaaacaaggttatgccaaatttccaggcctttttgaagtattgagaaggggaaggggatttctcacttcaattatagatcataataggaagcaaaaagaaaaaaatgaaaagcaaacatatgcacgcacttttcttgttgacaaagcaagaatgtaggtttgctgtgtaggtttggtgctctattgattggtgagtgaccagagcaagtatgaaggtgatgctgccaaagcacaagccagtttcttgggaaaattcaagttacagtggagtatttttttgaagaccatatgcttggaggtagaaacaaaccaacgaccaaaaaaaaaaaaaaaaaaaaaatctgctcagatactcagccagtagctcagagagatgctgagttaggcctgtcaggtctccttgggaaaggcttcatatttgcaactttgatgattctatgtccagcttcagagctgctttcccagaaattcacgcttaaacaaccaaccggtaaccaccacttccccacaccgccgcctggtaattatttgcattacaaaccggaggcgccctcatttgcatttgtgtacagattaactagttaaggcttgagaagctctgaataattcaaaagtattagacccacacagccttggagagaccttcagaaactaaggaggagttttatattaagggagacattttagtcagtaagacgatataacctacttactccgtaaggggaaatgaaggcccggagaagggaagggacttgaccgaggtcccacttctgtttcgaggcagaagccagactaattttcatgcctcctgactcccaatcagtttcacaaagggattcaatctgtttatatacgttacattcctggatacgaggtcttttgatgttcagagtaactgactagttagtattagaagaccctcgaggtttttttccacagaaaaacatctgaagatggattgggtgagggctggcaaaacgaaggcatgccgggccagctccttaacccaatgacccagtgatgctgcaaggctggaacggggtccaggagactgtgtgtaacaggtgccctaggtgacccttataatcagggaagtttggtgaacaaaaatcgaacccatgagtgaacataaattaaaaagttgatcaacctattaaaatgtgtatttcattgggtagcttttctcactgtagacagattttttccttcttcaatgaaaaggcttttaaattagtacaactgttactatttaaaaaaaaaataccctaagtactctgtttacttctggtgaaacaaaaccagtcattagaaatggtctgtgcttttattttcccagactggagtggcttttctgaaacacacacacacacacacacacacacacacacacacacacacgtacacacatccctcacttctcttaagccaagaagtttgctttccctagctgcagtgtagatggctcttgtttttgtttttttgttttaatcatttggcattcacatgtggctgttaatatgtgcttgtttttaattaaaacaagaagctttaaaaaaat

SEQ ID NO: 447133 - DNA, 2041 bp, Homo sapiens
gaagaactggaactgggctggccatagggggaagcggcgcgttaaatccgccccctctccataccctactttcaaggggtgggcggtagaggggaggttggggttggagcagcggcgagggggcccctcccttgcacctccccccaccggacttggtcgcgcccgaagtgtaacactttctctttgtcggaggagctcctctgtttcctgtgcagtagctcccgttgcggcggcacccgtggcagccctggcggacgcaggagcgatggcagcgaccgatatagctcgccaggtgggtgaaggttgccgaactgtccccctggctggacatgtggggtttgacagcttgcctgaccagctggtgaataagtccgtcagccagggcttctgcttcaacatcctgtgcgtgggagagacaggtttgggcaagtccaccctcatggacaccctgttcaacaccaaattcgaaggggagccagccacccacacacagccgggtgtccagctccagtctaatacctatgacctccaagagagcaacgtgaggctaaagctcacgatcgttagcacagttggctttggggaccagatcaacaaagaggacagctacaagcctatcgtggaattcatcgatgcacaattcgaggcctacctgcaggaagagctaaagatccgaagagtgctacacacctaccatgactcccgaatccatgtctgcttgtatttcattgcccccacgggtcattccctgaagtctctggacctagtgactatgaagaagctggacagtaaggtgaacatcatccccatcattgccaaagcagatgccatttcgaagagtgagctaacaaagttcaaaatcaaaatcaccagcgagcttgtcagcaacggagtccagatctatcagtttcctacagatgatgagtcggtggcagagatcaatggaaccatgaacgcccacctgccgtttgctgtcattggcagcacagaagaactgaagataggcaacaagatgatgagggcgcggcagtatccttggggcactgtgcaggttgaaaacgaggcccactgcgactttgtgaagctgcgggagatgctgattcgggtcaacatggaggatctgcgggagcagacccacacccggcactatgagctgtatcgccgctgtaagctggaggagatgggcttcaaggacaccgaccctgacagcaaacccttcagtttacaggagacatatgaggccaaaaggaacgagttcctaggggaactccagaaaaaagaagaggagatgagacagatgttcgtccagcgagtcaaagagaaagaagcggagctcaaagaggcagagaaagagctgcacgagaagtttgaccgtctgaagaaactgcaccaggacgagaagaagaaactggaggataagaagaaatccctggatgatgaagtgaatgctttcaagcaaagaaagacggcggctgagctgctccagtcccagggctcccaggctggaggctcacagactctgaagagagacaaagagaagaaaaagtaagtagcaggctgctctggggtggtgccttctctttcctcctgctcatcctcccagggcaggacgtggcacctgaaggggctgaggactggtgaccagaggtgagctgtgggctgtcagactggttgaggtacctataactggtcccagcatccctgtggcacctttggattccctgagcttggggagttgagagtagcagaggggtgtggtcccagaggcccagcccatctgtccagcttgctcaggaaagccctgcaaactcaaggtccataggaaaggaagggaaaagaggaaaagcaaaggagagtgagagagcagaagggaagaaaaaaattagaggtgcagcaatataagagaggaacaaggccgggcacggtggctcacacctataatcccagcactttgggaagccaaggcaggaggaacacttgaggtcaggagtccaagaccagcctggcctatatggcgaaaccccgtctctgcttaaaaaaa

SEQ ID NO: 447134 - DNA, 2386 bp, Homo sapiens
gaagaactggaactgggctggccatagggggaagcggcgcgttaaatccgccccctctccataccctactttcaaggggtgggcggtagaggggaggttggggttggagcagcggcgagggggcccctcccttgcacctccccccaccggacttggtcgcgcccgaagtgtaacactttctctttgtcggaggagctcctctgtttcctgtgcagtagctcccgttgcggcggcacccgtggcagccctggcggacgcaggagcgatggcagcgaccgatatagctcgccaggtgggtgaaggttgccgaactgtccccctggctggacatgtggggtttgacagcttgcctgaccagctggtgaataagtccgtcagccagggcttctgcttcaacatcctgtgcgtgggagagacaggtttgggcaagtccaccctcatggacaccctgttcaacaccaaattcgaaggggagccagccacccacacacagccgggtgtccagctccagtctaatacctatgacctccaagagagcaacgtgaggctaaagctcacgatcgttagcacagttggctttggggaccagatcaacaaagaggacagctacaagcctatcgtggaattcatcgatgcacaattcgaggcctacctgcaggaagagctaaagatccgaagagtgctacacacctaccatgactcccgaatccatgtctgcttgtatttcattgcccccacgggtcattccctgaagtctctggacctagtgactatgaagaagctggacagtaaggtgaacatcatccccatcattgccaaagcagatgccatttcgaagagtgagctaacaaagttcaaaatcaaaatcaccagcgagcttgtcagcaacggagtccagatctatcagtttcctacagatgatgagtcggtggcagagatcaatggaaccatgaacgcccacctgccgtttgctgtcattggcagcacagaagaactgaagataggcaacaagatgatgagggcgcggcagtatccttggggcactgtgcaggctgcacgagaagtttgaccgtctgaagaaactgcaccaggacgagaagaagaaactggaggataagaagaaatccctggatgatgaagtgaatgctttcaagcaaagaaagacggcggctgagctgctccagtcccagggctcccaggctggaggctcacagactctgaagagagacaaagagaagaaaaattaactctgctgtttgctgcatgctgcatgagacccagggtcctgtaatccatggctgtgtactgaatagtattccccgctacagctggactggactccatttagccttttaagccgagctttttttaatcttgtcttcagcagctgcactaagtctaaaggagaagactgccattatagaagagttagggttccatattgtctcaaatcagaaatcaaccaatttcctctcccctcaaactgcaagcacacacacatacaccacaccactcaacaagtgttcatgtgtccctgtgtccaggcaagaagctctcttcctgactcacatggtattttaaatggaagtgtcttgtcctaactaacaaggcaggaaaagaaccatcagagctggaaaatggacgaaatgtaacctcagagaaacaactacaggaccactcacccaagtgtaagtgactggggcaggacacctcagctgtgggtatgaaagtactgttctgttcacaaggttttgtttgagttttatgtttttcttttaaacatttctctggttcgatgggttgactgtctacagccactgttaaacatttctgaatatgcaagagaaagtcaagtgacatttgtatcttcttcagcattcgcagaccttctatagattccagcaaagggggaaaatgtatccactatctaacacttaggtagagaagggagggggtttaagcttagtgagggcaaaattactccattccaccttccgagaccagttagggttttgagagaggtttctgctcaacctgggatctggagggagagctttgatgttggtaaatctgccttgaattcattggtttaacttgcatcaaaataccatgtgagtgtgctcattctcatatatcccctaccaccatcaccaccattctgctgttcagtgtctcttgagagagcctctttgcatgttttccagaatctgtgtgtgtttttcctttcttctcctttgttctttttgctcaaaggtgtgaccagtcattgcccctctggggctttcattctccaggagaaacatcccagaaccagcactgtttagcctgatacctttctaatgtccatgtcaattttcaataaaattcaaagaaatgctaaaaaaaa

SEQ ID NO: 447135 - DNA, 2400 bp, Homo sapiens
gaagaactggaactgggctggccatagggggaagcggcgcgttaaatccgccccctctccataccctactttcaaggggtgggcggtagaggggaggttggggttggagcagcggcgagggggcccctcccttgcacctccccccaccggacttggtcgcgcccgaagtgtaacactttctctttgtcggaggagctcctctgtttcctgtgcagtagctcccgttgcggcggcacccgtggcagccctggcggacgcaggagcgatggcagcgaccgatatagctcgccaggtgggtgaaggttgccgaactgtccccctggctggacatgtggggtttgacagcttgcctgaccagctggtgaataagtccgtcagccagggcttctgcttcaacatcctgtgcgtgggagagacaggtttgggcaagtccaccctcatggacaccctgttcaacaccaaattcgaaggggagccagccacccacacacagccgggtgtccagctccagtctaatacctatgacctccaagagagcaacgtgaggctaaagctcacgatcgttagcacagttggctttggggaccagatcaacaaagaggacagctacaagcctatcgtggaattcatcgatgcacaattcgaggcctacctgcaggaagagctaaagatccgaagagtgctacacacctaccatgactcccgaatccatgtctgcttgtatttcattgcccccacgggtcattccctgaagtctctggacctagtgactatgaagaagctggacagtaaggtgaacatcatccccatcattgccaaagcagatgccatttcgaagagtgagctaacaaagttcaaaatcaaaatcaccagcgagcttgtcagcaacggagtccagatctatcagtttcctacagatgatgagtcggtggcagagatcaatggaaccatgaacgcccacctgccgtttgctgtcattggcagcacagaagaactgaagataggcaacaagatgatgagggcgcggcagtatccttggggcactgtgcaggtttacaggagacatatgaggccaaaaggaacgagttcctaggggaactccagaaaaaagaagaggagatgagacagatgttcgtccagcgagtcaaagagaaagaagcggagctcaaagaggcagagaaagagctgcacgagaagtttgaccgtctgaagaaactgcaccaggacgagaagaagaaactggaggataagaagaaatccctggatgatgaagtgaatgctttcaagcaaagaaagacggcggctgagctgctccagtcccagggctcccaggctggaggctcacagactctgaagagagacaaagagaagaaaaactttttttaatcttgtcttcagcagctgcactaagtctaaaggagaagactgccattatagaagagttagggttccatattgtctcaaatcagaaatcaaccaatttcctctcccctcaaactgcaagcacacacacatacaccacaccactcaacaagtgttcatgtgtccctgtgtccaggcaagaagctctcttcctgactcacatggtattttaaatggaagtgtcttgtcctaactaacaaggcaggaaaagaaccatcagagctggaaaatggacgaaatgtaacctcagagaaacaactacaggaccactcacccaagtgtaagtgactggggcaggacacctcagctgtgggtatgaaagtactgttctgttcacaaggttttgtttgagttttatgtttttcttttaaacatttctctggttcgatgggttgactgtctacagccactgttaaacatttctgaatatgcaagagaaagtcaagtgacatttgtatcttcttcagcattcgcagaccttctatagattccagcaaagggggaaaatgtatccactatctaacacttaggtagagaagggagggggtttaagcttagtgagggcaaaattactccattccaccttccgagaccagttagggttttgagagaggtttctgctcaacctgggatctggagggagagctttgatgttggtaaatctgccttgaattcattggtttaacttgcatcaaaataccatgtgagtgtgctcattctcatatatcccctaccaccatcaccaccattctgctgttcagtgtctcttgagagagcctctttgcatgttttccagaatctgtgtgtgtttttcctttcttctcctttgttctttttgctcaaaggtgtgaccagtcattgcccctctggggctttcattctccaggagaaacatcccagaaccagcactgtttagcctgatacctttctaatgtccatgtcaattttcaataaaattcaaagaaatgctaaaaaaaa

SEQ ID NO: 447136 - DNA, 760 bp, Homo sapiens
agctggtagtaggtcagtgatacatggtgcaaaacagcctgggataatattgccagctgccagaccagactagggtggctcaaggggttgccatagtttctaaatcttttgaaggaaaaactgatcgcacagaagagtggtatggaacccagtacaaacaagaagctataccggatgaagtcatcaagaaatggcaaaatgctgacctgaatgggaaatttaaacttcctacaaagaatgaatttattcctacgaattttgagattttaccgttagaaaaagaggcgacaccataccctgctcttattaaggatacagctatgagcaaactttggttcaaacaagatgataagttttttttgccgaaggcttgtctcaactttgaatttttcagctttgataaaattgttggcttttggctgggtgcgatagctcacacctgtaatcctaacattttgggaagccgaggcaggaagatcgcttgagcctaggagttcgagaccagcctggacaacacagtgagaccttgactcaactttaaaaaacaaaatgttgactttgttatcagtacattagttatatttactgtgctacaagtagagtgaaacttttaatttgctgccaaacaagccaagcaggcacctgcctcaggcctttagcagtagctatttcttcagcctgggaagttctccactccaccccttagatatccccagggctcactcccttgcctccttcaggtctgagtccagatgtcaca

SEQ ID NO: 447137 - DNA, 5324 bp, Homo sapiens
tggcgcagggccggctcgaagcgcaagcaggaagcgtttgcggtgatcccggcgactgcgctggctaatgcggtaccggctagcgtggcttctgcaccccgcactgcccagcaccttccgctcagtcctcggcgcccgcctgccgcctccggagcgcctgtgtggtttccaaaaaaagacttacagcaaaatgaataatccagccatcaagagaataggaaatcacattaccaagtctcctgaagacaagcgagaatatcgagggctagagctggccaatggtatcaaagtacttcttatcagtgatcccaccacggataagtcatcagcagcacttgatgtgcacataggttcattgtcggatcctccaaatattgctggcttaagtcatttttgtgaacatatgctttttttgggaacaaagaaataccctaaagaaaatgaatacagccagtttctcagtgagcatgcaggaagttcaaatgcctttactagtggagagcataccaattactattttgatgtttctcatgaacacctagaaggtgccctagacaggtttgcacagttttttctgtgccccttgttcgatgaaagttgcaaagacagagaggtgaatgcagttgattcagaacatgagaagaatgtgatgaatgatgcctggagactctttcaattggaaaaagctacagggaatcctaaacaccccttcagtaaatttgggacaggtaacaaatatactctggagactagaccaaaccaagaaggcattgatgtaagacaagagctactgaaattccattctgcttactattcatccaacttaatggctgtttgtgttttaggtcgagaatctttagatgacttgactaatctggtggtaaagttattttctgaagtagagaacaaaaatgttccattgccagaatttcctgaacaccctttccaagaagaacatcttaaacaactttacaaaatagtacccattaaagatattaggaatctctatgtgacatttcccatacctgaccttcagaaatactacaaatcaaatcctggtcattatcttggtcatctcattgggcatgaaggtcctggaagtctgttatcagaacttaagtcaaagggctgggttaatactcttgttggtgggcagaaggaaggagcccgaggttttatgttttttatcattaatgtggacttgaccgaggaaggattattacatgttgaagatataattttgcacatgtttcaatacattcagaagttacgtgcagaaggacctcaagaatgggttttccaagagtgcaaggacttgaatgctgttgcttttaggtttaaagacaaagagaggccacggggctatacatctaagattgcaggaatattgcattattatcccctagaagaggtgctcacagcggaatatttactggaagaatttagacctgacttaatagagatggttctcgataaactcagaccagaaaatgtccgggttgccatagtttctaaatcttttgaaggaaaaactgatcgcacagaagagtggtatggaacccagtacaaacaagaagctataccggatgaagtcatcaagaaatggcaaaatgctgacctgaatgggaaatttaaacttcctacaaagaatgaatttattcctacgaattttgagattttaccgttagaaaaagaggcgacaccataccctgctcttattaaggatacagctatgagcaaactttggttcaaacaagatgataagttttttttgccgaaggcttgtctcaactttgaatttttcagcccatttgcttatgtggaccccttgcactgtaacatggcctatttgtaccttgagctcctcaaagactcactcaacgagtatgcatatgcagcagagctagcaggcttgagctatgatctccaaaataccatctatgggatgtatctttcagtgaaaggttacaatgacaagcagccaattttactaaagaagattattgagaaaatggctacctttgagattgatgaaaaaagatttgaaattatcaaagaagcatatatgcgatctcttaacaatttccgggctgaacagcctcaccagcatgccatgtactacctccgcttgctgatgactgaagtggcctggactaaagatgagttaaaagaagctctggatgatgtaacccttcctcgccttaaggccttcatacctcagctcctgtcacggctgcacattgaagcccttctccatggaaacataacaaagcaggctgcattaggaattatgcagatggttgaagacaccctcattgaacatgctcataccaaacctctccttccaagtcagctggttcggtatagagaagttcagctccctgacagaggatggtttgtttatcagcagagaaatgaagttcacaataactgtggcatcgagatatactaccaaacagacatgcaaagcacctcagagaatatgtttctggagctcttctgtcagattatctcggaaccttgcttcaacaccctgcgcaccaaggagcagttgggctatatcgtcttcagcgggccacgtcgagctaatggcatacagggcttgagattcatcatccagtcagaaaagccacctcactacctagaaagcagagtggaagctttcttaattaccatggaaaagtccatagaggacatgacagaagaggccttccaaaaacacattcaggcattagcaattcgtcgactagacaaaccaaagaagctatctgctgagtgtgctaaatactggggagaaatcatctcccagcaatataattttgacagagataacactgaggttgcatatttaaagacacttaccaaggaagatatcatcaaattctacaaggaaatgttggcagtagatgctccaaggagacataaggtatccgtccatgttcttgccagggaaatggattcttgtcctgttgttggagagttcccatgtcaaaatgacataaatttgtcacaagcaccagccttgccacaacctgaagtgattcagaacatgaccgaattcaagcgtggtctgccactgtttccccttgtgaaaccacatattaacttcatggctgcaaaactctgaagattccccatgcatgggaaagtgcaagtggatgcattcctgagtcttccagagcctaagaaaatcatcttggccactttaatagtttctgattcactattagagaaacaaacaaaaaattgtcaaatgtcattatgtagaaatattataaatccaaagtaaattacaaaatcttatagatgtagaatattttttaaatacatgcctcttaaatattttaaaatttttcttttgattactgagagaaatttccccaatataacaatgcttaaaatgaatgatattcctatagaatcttccttccctattctgtaaaatagtcacttgtccgaagaaagttaaaagttagctcttttctaaaagcctcctagcttgacatagaaggcttcacaacatttagaaaggtaataactttttaaaaattgatcctcaaatttgctttctacttgatggtttcatgtaaatcagtggaaaacattacatttggcagatgataaagcaatgtcatcttttattagtgaaatgctggttatataaggcatggttttaatctttttataaaatttgaacatgttttttatgccaactcgtaaaatgctagaaaaccctacttatttacaatgctagaaatacagacttaccttacatcaattttgtcctaaaccgaatttctcaggattactgtggtttctttcattctgattgaattatattgacctacttcttcatagttggtttgcagtgttccatgagttttacttttcctcatcaacatattgctttaacacaacatatttatttaacacgtacaaatagggtcaacttcagatcctactgagtgtgtgacatgcttttccaacatcagctttttgtaaccacctgtataactttttattacagtgaaattgcagtcagtatgtgaaccaaaatatcttgcccctttatgaatttaaaaggcagccaatacaaagccacctttttggaaatataaaaagtaaagccttgcattcttatatagcaggtcttcataaaactctaaaatcccttgttgctaccagtctaatcttgccttaaatgttaagttattttttgaatatataaatataaacatataaacacagatgatgactggagtagacttttaaaaaaatatttttttcatgagatactattttaggtgaaattgttactgtagatttaacagctgttttgaaatatttactgttattaaaacttgcttcaagagaaattgtgaatatatttccatatacaagcactagtaacagtaagtggccctgtcatccactaactcaggcaaagtaaagaatggcatttttgaaggacattttacctccccatatgatttgattggctaggactttcttctgtaaagtcataccttttcacatcttaagtttttacatttgccattttccaaatctcaattttgggcaagaacgatatagtcacaactatggggctgctttcaaaagcggggctccatttctactgtcagatcaatgtggtgctgtaaccatctttttatccctaccttcaagaacctccttatatgaagcctgtctttatccatcagaaggtgtgtgaaatcatcacttccttctggttttatgtatttgtagactatgcagcttttcattaaactgcaagtatatacaagacagatctgaaattaggcctgagtgttccgatccaccactgtactagtaaataaaaatccacctaccttttatgtggaaaattatgtgctattgagtaacttttagctcttttttaaaaaatgggtgaaatttaagtgtcttttttatgagaatgacacatgaagagatctgagagcaatctcatgtagtcttccatgaacctgcaattgtttggtatgcgtcagcattttccaatttccaggttggatctagagctgctgttgatcactcaggcatactaatggattcatttagatgggtccaagctgcagtccatgagcaataacagactaccccagatactgcagtttacgcagtgcttagtaaatgagatttgtggaactaagttattagttacctgaggcttcttaagaaagtcttcttttttgaccagttgatgtgaaagagggagcatgtgacacagccagtatggtggagtgctagggttatcctgtttacaataaatcgcctgaatttca

SEQ ID NO: 447138 - DNA, 5216 bp, Homo sapiens
tgaattcatcatcagaggaggaagagttcccagtcattgtcttcacttctccagaagtttccaaaaaaagacttacagcaaaatgaataatccagccatcaagagaataggaaatcacattaccaagtctcctgaagacaagcgagaatatcgagggctagagctggccaatggtatcaaagtacttcttatcagtgatcccaccacggataagtcatcagcagcacttgatgtgcacataggttcattgtcggatcctccaaatattgctggcttaagtcatttttgtgaacatatgctttttttgggaacaaagaaataccctaaagaaaatgaatacagccagtttctcagtgagcatgcaggaagttcaaatgcctttactagtggagagcataccaattactattttgatgtttctcatgaacacctagaaggtgccctagacaggtttgcacagttttttctgtgccccttgttcgatgaaagttgcaaagacagagaggtgaatgcagttgattcagaacatgagaagaatgtgatgaatgatgcctggagactctttcaattggaaaaagctacagggaatcctaaacaccccttcagtaaatttgggacaggtaacaaatatactctggagactagaccaaaccaagaaggcattgatgtaagacaagagctactgaaattccattctgcttactattcatccaacttaatggctgtttgtgttttaggtcgagaatctttagatgacttgactaatctggtggtaaagttattttctgaagtagagaacaaaaatgttccattgccagaatttcctgaacaccctttccaagaagaacatcttaaacaactttacaaaatagtacccattaaagatattaggaatctctatgtgacatttcccatacctgaccttcagaaatactacaaatcaaatcctggtcattatcttggtcatctcattgggcatgaaggtcctggaagtctgttatcagaacttaagtcaaagggctgggttaatactcttgttggtgggcagaaggaaggagcccgaggttttatgttttttatcattaatgtggacttgaccgaggaaggattattacatgttgaagatataattttgcacatgtttcaatacattcagaagttacgtgcagaaggacctcaagaatgggttttccaagagtgcaaggacttgaatgctgttgcttttaggtttaaagacaaagagaggccacggggctatacatctaagattgcaggaatattgcattattatcccctagaagaggtgctcacagcggaatatttactggaagaatttagacctgacttaatagagatggttctcgataaactcagaccagaaaatgtccgggttgccatagtttctaaatcttttgaaggaaaaactgatcgcacagaagagtggtatggaacccagtacaaacaagaagctataccggatgaagtcatcaagaaatggcaaaatgctgacctgaatgggaaatttaaacttcctacaaagaatgaatttattcctacgaattttgagattttaccgttagaaaaagaggcgacaccataccctgctcttattaaggatacagctatgagcaaactttggttcaaacaagatgataagttttttttgccgaaggcttgtctcaactttgaatttttcagcccatttgcttatgtggaccccttgcactgtaacatggcctatttgtaccttgagctcctcaaagactcactcaacgagtatgcatatgcagcagagctagcaggcttgagctatgatctccaaaataccatctatgggatgtatctttcagtgaaaggttacaatgacaagcagccaattttactaaagaagattattgagaaaatggctacctttgagattgatgaaaaaagatttgaaattatcaaagaagcatatatgcgatctcttaacaatttccgggctgaacagcctcaccagcatgccatgtactacctccgcttgctgatgactgaagtggcctggactaaagatgagttaaaagaagctctggatgatgtaacccttcctcgccttaaggccttcatacctcagctcctgtcacggctgcacattgaagcccttctccatggaaacataacaaagcaggctgcattaggaattatgcagatggttgaagacaccctcattgaacatgctcataccaaacctctccttccaagtcagctggttcggtatagagaagttcagctccctgacagaggatggtttgtttatcagcagagaaatgaagttcacaataactgtggcatcgagatatactaccaaacagacatgcaaagcacctcagagaatatgtttctggagctcttctgtcagattatctcggaaccttgcttcaacaccctgcgcaccaaggagcagttgggctatatcgtcttcagcgggccacgtcgagctaatggcatacagggcttgagattcatcatccagtcagaaaagccacctcactacctagaaagcagagtggaagctttcttaattaccatggaaaagtccatagaggacatgacagaagaggccttccaaaaacacattcaggcattagcaattcgtcgactagacaaaccaaagaagctatctgctgagtgtgctaaatactggggagaaatcatctcccagcaatataattttgacagagataacactgaggttgcatatttaaagacacttaccaaggaagatatcatcaaattctacaaggaaatgttggcagtagatgctccaaggagacataaggtatccgtccatgttcttgccagggaaatggattcttgtcctgttgttggagagttcccatgtcaaaatgacataaatttgtcacaagcaccagccttgccacaacctgaagtgattcagaacatgaccgaattcaagcgtggtctgccactgtttccccttgtgaaaccacatattaacttcatggctgcaaaactctgaagattccccatgcatgggaaagtgcaagtggatgcattcctgagtcttccagagcctaagaaaatcatcttggccactttaatagtttctgattcactattagagaaacaaacaaaaaattgtcaaatgtcattatgtagaaatattataaatccaaagtaaattacaaaatcttatagatgtagaatattttttaaatacatgcctcttaaatattttaaaatttttcttttgattactgagagaaatttccccaatataacaatgcttaaaatgaatgatattcctatagaatcttccttccctattctgtaaaatagtcacttgtccgaagaaagttaaaagttagctcttttctaaaagcctcctagcttgacatagaaggcttcacaacatttagaaaggtaataactttttaaaaattgatcctcaaatttgctttctacttgatggtttcatgtaaatcagtggaaaacattacatttggcagatgataaagcaatgtcatcttttattagtgaaatgctggttatataaggcatggttttaatctttttataaaatttgaacatgttttttatgccaactcgtaaaatgctagaaaaccctacttatttacaatgctagaaatacagacttaccttacatcaattttgtcctaaaccgaatttctcaggattactgtggtttctttcattctgattgaattatattgacctacttcttcatagttggtttgcagtgttccatgagttttacttttcctcatcaacatattgctttaacacaacatatttatttaacacgtacaaatagggtcaacttcagatcctactgagtgtgtgacatgcttttccaacatcagctttttgtaaccacctgtataactttttattacagtgaaattgcagtcagtatgtgaaccaaaatatcttgcccctttatgaatttaaaaggcagccaatacaaagccacctttttggaaatataaaaagtaaagccttgcattcttatatagcaggtcttcataaaactctaaaatcccttgttgctaccagtctaatcttgccttaaatgttaagttattttttgaatatataaatataaacatataaacacagatgatgactggagtagacttttaaaaaaatatttttttcatgagatactattttaggtgaaattgttactgtagatttaacagctgttttgaaatatttactgttattaaaacttgcttcaagagaaattgtgaatatatttccatatacaagcactagtaacagtaagtggccctgtcatccactaactcaggcaaagtaaagaatggcatttttgaaggacattttacctccccatatgatttgattggctaggactttcttctgtaaagtcataccttttcacatcttaagtttttacatttgccattttccaaatctcaattttgggcaagaacgatatagtcacaactatggggctgctttcaaaagcggggctccatttctactgtcagatcaatgtggtgctgtaaccatctttttatccctaccttcaagaacctccttatatgaagcctgtctttatccatcagaaggtgtgtgaaatcatcacttccttctggttttatgtatttgtagactatgcagcttttcattaaactgcaagtatatacaagacagatctgaaattaggcctgagtgttccgatccaccactgtactagtaaataaaaatccacctaccttttatgtggaaaattatgtgctattgagtaacttttagctcttttttaaaaaatgggtgaaatttaagtgtcttttttatgagaatgacacatgaagagatctgagagcaatctcatgtagtcttccatgaacctgcaattgtttggtatgcgtcagcattttccaatttccaggttggatctagagctgctgttgatcactcaggcatactaatggattcatttagatgggtccaagctgcagtccatgagcaataacagactaccccagatactgcagtttacgcagtgcttagtaaatgagatttgtggaactaagttattagttacctgaggcttcttaagaaagtcttcttttttgaccagttgatgtgaaagagggagcatgtgacacagccagtatggtggagtgctagggttatcctgtttacaataaatcgcctgaatttca

SEQ ID NO: 447139 - DNA, 5469 bp, Homo sapiens
tggcgcagggccggctcgaagcgcaagcaggaagcgtttgcggtgatcccggcgactgcgctggctaatgcggtaccggctagcgtggcttctgcaccccgcactgcccagcaccttccgctcagtcctcggcgcccgcctgccgcctccggagcgcctgtgtggtttccaaaaaaagacttacagcaaaatgaataatccagccatcaagagaataggaaatcacattaccaagtctcctgaagacaagcgagaatatcgagggctagagctggccaatggtatcaaagtacttcttatcagtgatcccaccacggataagtcatcagcagcacttgatgtgcacataggttcattgtcggatcctccaaatattgctggcttaagtcatttttgtgaacatatgctttttttgggaacaaagaaataccctaaagaaaatgaatacagccagtttctcagtgagcatgcaggaagttcaaatgcctttactagtggagagcataccaattactattttgatgtttctcatgaacacctagaaggtgccctagacaggtttgcacagttttttctgtgccccttgttcgatgaaagttgcaaagacagagaggtgaatgcagttgattcagaacatgagaagaatgtgatgaatgatgcctggagactctttcaattggaaaaagctacagggaatcctaaacaccccttcagtaaatttgggacaggtaacaaatatactctggagactagaccaaaccaagaaggcattgatgtaagacaagagctactgaaattccattctgcttactattcatccaacttaatggctgtttgtgttttaggtcgagaatctttagatgacttgactaatctggtggtaaagttattttctgaagtagagaacaaaaatgttccattgccagaatttcctgaacaccctttccaagaagaacatcttaaacaactttacaaaatagtacccattaaagatattaggaatctctatgtgacatttcccatacctgaccttcagaaatactacaaatcaaatcctggtcattatcttggtcatctcattgggcatgaaggtcctggaagtctgttatcagaacttaagtcaaagggctgggttaatactcttgttggtgggcagaaggaaggagcccgaggttttatgttttttatcattaatgtggacttgaccgaggaaggattattacatgttgaagatataattttgcacatgtttcaatacattcagaagttacgtgcagaaggacctcaagaatgggttttccaagagtgcaaggacttgaatgctgttgcttttaggtttaaagacaaagagaggccacggggctatacatctaagattgcaggaatattgcattattatcccctagaagaggtgctcacagcggaatatttactggaagaatttagacctgacttaatagagatggttctcgataaactcagaccagaaaatgtccgggttgccatagtttctaaatcttttgaaggaaaaactgatcgcacagaagagtggtatggaacccagtacaaacaagaagctataccggatgaagtcatcaagaaatggcaaaatgctgacctgaatgggaaatttaaacttcctacaaagaatgaatttattcctacgaattttgagattttaccgttagaaaaagaggcgacaccataccctgctcttattaaggatacagctatgagcaaactttggttcaaacaagatgataagttttttttgccgaaggcttgtctcaactttgaatttttcagcccatttgcttatgtggaccccttgcactgtaacatggcctatttgtaccttgagctcctcaaagactcactcaacgagtatgcatatgcagcagagctagcaggcttgagctatgatctccaaaataccatctatgggatgtattcgctacatttatgctgatcctctccattgcaacatgacatacctgtttatcaggttattgaaggatgatttaaaagagtatacatatgcagcacgcctctcaggtttgagctatggcattgcatcaggaatgaatgcaatacttctttcagtgaaaggttacaatgacaagcagccaattttactaaagaagattattgagaaaatggctacctttgagattgatgaaaaaagatttgaaattatcaaagaagcatatatgcgatctcttaacaatttccgggctgaacagcctcaccagcatgccatgtactacctccgcttgctgatgactgaagtggcctggactaaagatgagttaaaagaagctctggatgatgtaacccttcctcgccttaaggccttcatacctcagctcctgtcacggctgcacattgaagcccttctccatggaaacataacaaagcaggctgcattaggaattatgcagatggttgaagacaccctcattgaacatgctcataccaaacctctccttccaagtcagctggttcggtatagagaagttcagctccctgacagaggatggtttgtttatcagcagagaaatgaagttcacaataactgtggcatcgagatatactaccaaacagacatgcaaagcacctcagagaatatgtttctggagctcttctgtcagattatctcggaaccttgcttcaacaccctgcgcaccaaggagcagttgggctatatcgtcttcagcgggccacgtcgagctaatggcatacagggcttgagattcatcatccagtcagaaaagccacctcactacctagaaagcagagtggaagctttcttaattaccatggaaaagtccatagaggacatgacagaagaggccttccaaaaacacattcaggcattagcaattcgtcgactagacaaaccaaagaagctatctgctgagtgtgctaaatactggggagaaatcatctcccagcaatataattttgacagagataacactgaggttgcatatttaaagacacttaccaaggaagatatcatcaaattctacaaggaaatgttggcagtagatgctccaaggagacataaggtatccgtccatgttcttgccagggaaatggattcttgtcctgttgttggagagttcccatgtcaaaatgacataaatttgtcacaagcaccagccttgccacaacctgaagtgattcagaacatgaccgaattcaagcgtggtctgccactgtttccccttgtgaaaccacatattaacttcatggctgcaaaactctgaagattccccatgcatgggaaagtgcaagtggatgcattcctgagtcttccagagcctaagaaaatcatcttggccactttaatagtttctgattcactattagagaaacaaacaaaaaattgtcaaatgtcattatgtagaaatattataaatccaaagtaaattacaaaatcttatagatgtagaatattttttaaatacatgcctcttaaatattttaaaatttttcttttgattactgagagaaatttccccaatataacaatgcttaaaatgaatgatattcctatagaatcttccttccctattctgtaaaatagtcacttgtccgaagaaagttaaaagttagctcttttctaaaagcctcctagcttgacatagaaggcttcacaacatttagaaaggtaataactttttaaaaattgatcctcaaatttgctttctacttgatggtttcatgtaaatcagtggaaaacattacatttggcagatgataaagcaatgtcatcttttattagtgaaatgctggttatataaggcatggttttaatctttttataaaatttgaacatgttttttatgccaactcgtaaaatgctagaaaaccctacttatttacaatgctagaaatacagacttaccttacatcaattttgtcctaaaccgaatttctcaggattactgtggtttctttcattctgattgaattatattgacctacttcttcatagttggtttgcagtgttccatgagttttacttttcctcatcaacatattgctttaacacaacatatttatttaacacgtacaaatagggtcaacttcagatcctactgagtgtgtgacatgcttttccaacatcagctttttgtaaccacctgtataactttttattacagtgaaattgcagtcagtatgtgaaccaaaatatcttgcccctttatgaatttaaaaggcagccaatacaaagccacctttttggaaatataaaaagtaaagccttgcattcttatatagcaggtcttcataaaactctaaaatcccttgttgctaccagtctaatcttgccttaaatgttaagttattttttgaatatataaatataaacatataaacacagatgatgactggagtagacttttaaaaaaatatttttttcatgagatactattttaggtgaaattgttactgtagatttaacagctgttttgaaatatttactgttattaaaacttgcttcaagagaaattgtgaatatatttccatatacaagcactagtaacagtaagtggccctgtcatccactaactcaggcaaagtaaagaatggcatttttgaaggacattttacctccccatatgatttgattggctaggactttcttctgtaaagtcataccttttcacatcttaagtttttacatttgccattttccaaatctcaattttgggcaagaacgatatagtcacaactatggggctgctttcaaaagcggggctccatttctactgtcagatcaatgtggtgctgtaaccatctttttatccctaccttcaagaacctccttatatgaagcctgtctttatccatcagaaggtgtgtgaaatcatcacttccttctggttttatgtatttgtagactatgcagcttttcattaaactgcaagtatatacaagacagatctgaaattaggcctgagtgttccgatccaccactgtactagtaaataaaaatccacctaccttttatgtggaaaattatgtgctattgagtaacttttagctcttttttaaaaaatgggtgaaatttaagtgtcttttttatgagaatgacacatgaagagatctgagagcaatctcatgtagtcttccatgaacctgcaattgtttggtatgcgtcagcattttccaatttccaggttggatctagagctgctgttgatcactcaggcatactaatggattcatttagatgggtccaagctgcagtccatgagcaataacagactaccccagatactgcagtttacgcagtgcttagtaaatgagatttgtggaactaagttattagttacctgaggcttcttaagaaagtcttcttttttgaccagttgatgtgaaagagggagcatgtgacacagccagtatggtggagtgctagggttatcctgtttacaataaatcgcctgaatttca

SEQ ID NO: 447140 - DNA, 3912 bp, Homo sapiens
agctggtagtaggtcagtgatacatggtgcaaaacagcctgggataatattgccagctgccagaccagactagggtggctcaaggggttgccatagtttctaaatcttttgaaggaaaaactgatcgcacagaagagtggtatggaacccagtacaaacaagaagctataccggatgaagtcatcaagaaatggcaaaatgctgacctgaatgggaaatttaaacttcctacaaagaatgaatttattcctacgaattttgagattttaccgttagaaaaagaggcgacaccataccctgctcttattaaggatacagctatgagcaaactttggttcaaacaagatgataagttttttttgccgaaggcttgtctcaactttgaatttttcagcccatttgcttatgtggaccccttgcactgtaacatggcctatttgtaccttgagctcctcaaagactcactcaacgagtatgcatatgcagcagagctagcaggcttgagctatgatctccaaaataccatctatgggatgtatctttcagtgaaaggttacaatgacaagcagccaattttactaaagaagattattgagaaaatggctacctttgagattgatgaaaaaagatttgaaattatcaaagaagcatatatgcgatctcttaacaatttccgggctgaacagcctcaccagcatgccatgtactacctccgcttgctgatgactgaagtggcctggactaaagatgagttaaaagaagctctggatgatgtaacccttcctcgccttaaggccttcatacctcagctcctgtcacggctgcacattgaagcccttctccatggaaacataacaaagcaggctgcattaggaattatgcagatggttgaagacaccctcattgaacatgctcataccaaacctctccttccaagtcagctggttcggtatagagaagttcagctccctgacagaggatggtttgtttatcagcagagaaatgaagttcacaataactgtggcatcgagatatactaccaaacagacatgcaaagcacctcagagaatatgtttctggagctcttctgtcagattatctcggaaccttgcttcaacaccctgcgcaccaaggagcagttgggctatatcgtcttcagcgggccacgtcgagctaatggcatacagggcttgagattcatcatccagtcagaaaagccacctcactacctagaaagcagagtggaagctttcttaattaccatggaaaagtccatagaggacatgacagaagaggccttccaaaaacacattcaggcattagcaattcgtcgactagacaaaccaaagaagctatctgctgagtgtgctaaatactggggagaaatcatctcccagcaatataattttgacagagataacactgaggttgcatatttaaagacacttaccaaggaagatatcatcaaattctacaaggaaatgttggcagtagatgctccaaggagacataaggtatccgtccatgttcttgccagggaaatggattcttgtcctgttgttggagagttcccatgtcaaaatgacataaatttgtcacaagcaccagccttgccacaacctgaagtgattcagaacatgaccgaattcaagcgtggtctgccactgtttccccttgtgaaaccacatattaacttcatggctgcaaaactctgaagattccccatgcatgggaaagtgcaagtggatgcattcctgagtcttccagagcctaagaaaatcatcttggccactttaatagtttctgattcactattagagaaacaaacaaaaaattgtcaaatgtcattatgtagaaatattataaatccaaagtaaattacaaaatcttatagatgtagaatattttttaaatacatgcctcttaaatattttaaaatttttcttttgattactgagagaaatttccccaatataacaatgcttaaaatgaatgatattcctatagaatcttccttccctattctgtaaaatagtcacttgtccgaagaaagttaaaagttagctcttttctaaaagcctcctagcttgacatagaaggcttcacaacatttagaaaggtaataactttttaaaaattgatcctcaaatttgctttctacttgatggtttcatgtaaatcagtggaaaacattacatttggcagatgataaagcaatgtcatcttttattagtgaaatgctggttatataaggcatggttttaatctttttataaaatttgaacatgttttttatgccaactcgtaaaatgctagaaaaccctacttatttacaatgctagaaatacagacttaccttacatcaattttgtcctaaaccgaatttctcaggattactgtggtttctttcattctgattgaattatattgacctacttcttcatagttggtttgcagtgttccatgagttttacttttcctcatcaacatattgctttaacacaacatatttatttaacacgtacaaatagggtcaacttcagatcctactgagtgtgtgacatgcttttccaacatcagctttttgtaaccacctgtataactttttattacagtgaaattgcagtcagtatgtgaaccaaaatatcttgcccctttatgaatttaaaaggcagccaatacaaagccacctttttggaaatataaaaagtaaagccttgcattcttatatagcaggtcttcataaaactctaaaatcccttgttgctaccagtctaatcttgccttaaatgttaagttattttttgaatatataaatataaacatataaacacagatgatgactggagtagacttttaaaaaaatatttttttcatgagatactattttaggtgaaattgttactgtagatttaacagctgttttgaaatatttactgttattaaaacttgcttcaagagaaattgtgaatatatttccatatacaagcactagtaacagtaagtggccctgtcatccactaactcaggcaaagtaaagaatggcatttttgaaggacattttacctccccatatgatttgattggctaggactttcttctgtaaagtcataccttttcacatcttaagtttttacatttgccattttccaaatctcaattttgggcaagaacgatatagtcacaactatggggctgctttcaaaagcggggctccatttctactgtcagatcaatgtggtgctgtaaccatctttttatccctaccttcaagaacctccttatatgaagcctgtctttatccatcagaaggtgtgtgaaatcatcacttccttctggttttatgtatttgtagactatgcagcttttcattaaactgcaagtatatacaagacagatctgaaattaggcctgagtgttccgatccaccactgtactagtaaataaaaatccacctaccttttatgtggaaaattatgtgctattgagtaacttttagctcttttttaaaaaatgggtgaaatttaagtgtcttttttatgagaatgacacatgaagagatctgagagcaatctcatgtagtcttccatgaacctgcaattgtttggtatgcgtcagcattttccaatttccaggttggatctagagctgctgttgatcactcaggcatactaatggattcatttagatgggtccaagctgcagtccatgagcaataacagactaccccagatactgcagtttacgcagtgcttagtaaatgagatttgtggaactaagttattagttacctgaggcttcttaagaaagtcttcttttttgaccagttgatgtgaaagagggagcatgtgacacagccagtatggtggagtgctagggttatcctgtttacaataaatcgcctgaatttca

SEQ ID NO: 447141 - DNA, 4036 bp, Homo sapiens
agctggtagtaggtcagtgatacatggtgcaaaacagcctgggataatattgccagctgccagaccagactagggtggctcaaggggttgccatagtttctaaatcttttgaaggaaaaactgatcgcacagaagagtggtatggaacccagtacaaacaagaagctataccggatgaagtcatcaagaaatggcaaaatgctgacctgaatgggaaatttaaacttcctacaaagaatgaatttattcctacgaattttgagattttaccgttagaaaaagaggcgacaccataccctgctcttattaaggatacagctatgagcaaactttggttcaaacaagatgataagttttttttgccgaaggcttgtctcaactttgaatttttcagctttgataaaattgttggcttttggctgggtgcgatagctcacacctgtaatcctaacattttgggaagccgaggcaggaagatcgcttgagcctaggagttcgagaccagcctggacaacacacccatttgcttatgtggaccccttgcactgtaacatggcctatttgtaccttgagctcctcaaagactcactcaacgagtatgcatatgcagcagagctagcaggcttgagctatgatctccaaaataccatctatgggatgtatctttcagtgaaaggttacaatgacaagcagccaattttactaaagaagattattgagaaaatggctacctttgagattgatgaaaaaagatttgaaattatcaaagaagcatatatgcgatctcttaacaatttccgggctgaacagcctcaccagcatgccatgtactacctccgcttgctgatgactgaagtggcctggactaaagatgagttaaaagaagctctggatgatgtaacccttcctcgccttaaggccttcatacctcagctcctgtcacggctgcacattgaagcccttctccatggaaacataacaaagcaggctgcattaggaattatgcagatggttgaagacaccctcattgaacatgctcataccaaacctctccttccaagtcagctggttcggtatagagaagttcagctccctgacagaggatggtttgtttatcagcagagaaatgaagttcacaataactgtggcatcgagatatactaccaaacagacatgcaaagcacctcagagaatatgtttctggagctcttctgtcagattatctcggaaccttgcttcaacaccctgcgcaccaaggagcagttgggctatatcgtcttcagcgggccacgtcgagctaatggcatacagggcttgagattcatcatccagtcagaaaagccacctcactacctagaaagcagagtggaagctttcttaattaccatggaaaagtccatagaggacatgacagaagaggccttccaaaaacacattcaggcattagcaattcgtcgactagacaaaccaaagaagctatctgctgagtgtgctaaatactggggagaaatcatctcccagcaatataattttgacagagataacactgaggttgcatatttaaagacacttaccaaggaagatatcatcaaattctacaaggaaatgttggcagtagatgctccaaggagacataaggtatccgtccatgttcttgccagggaaatggattcttgtcctgttgttggagagttcccatgtcaaaatgacataaatttgtcacaagcaccagccttgccacaacctgaagtgattcagaacatgaccgaattcaagcgtggtctgccactgtttccccttgtgaaaccacatattaacttcatggctgcaaaactctgaagattccccatgcatgggaaagtgcaagtggatgcattcctgagtcttccagagcctaagaaaatcatcttggccactttaatagtttctgattcactattagagaaacaaacaaaaaattgtcaaatgtcattatgtagaaatattataaatccaaagtaaattacaaaatcttatagatgtagaatattttttaaatacatgcctcttaaatattttaaaatttttcttttgattactgagagaaatttccccaatataacaatgcttaaaatgaatgatattcctatagaatcttccttccctattctgtaaaatagtcacttgtccgaagaaagttaaaagttagctcttttctaaaagcctcctagcttgacatagaaggcttcacaacatttagaaaggtaataactttttaaaaattgatcctcaaatttgctttctacttgatggtttcatgtaaatcagtggaaaacattacatttggcagatgataaagcaatgtcatcttttattagtgaaatgctggttatataaggcatggttttaatctttttataaaatttgaacatgttttttatgccaactcgtaaaatgctagaaaaccctacttatttacaatgctagaaatacagacttaccttacatcaattttgtcctaaaccgaatttctcaggattactgtggtttctttcattctgattgaattatattgacctacttcttcatagttggtttgcagtgttccatgagttttacttttcctcatcaacatattgctttaacacaacatatttatttaacacgtacaaatagggtcaacttcagatcctactgagtgtgtgacatgcttttccaacatcagctttttgtaaccacctgtataactttttattacagtgaaattgcagtcagtatgtgaaccaaaatatcttgcccctttatgaatttaaaaggcagccaatacaaagccacctttttggaaatataaaaagtaaagccttgcattcttatatagcaggtcttcataaaactctaaaatcccttgttgctaccagtctaatcttgccttaaatgttaagttattttttgaatatataaatataaacatataaacacagatgatgactggagtagacttttaaaaaaatatttttttcatgagatactattttaggtgaaattgttactgtagatttaacagctgttttgaaatatttactgttattaaaacttgcttcaagagaaattgtgaatatatttccatatacaagcactagtaacagtaagtggccctgtcatccactaactcaggcaaagtaaagaatggcatttttgaaggacattttacctccccatatgatttgattggctaggactttcttctgtaaagtcataccttttcacatcttaagtttttacatttgccattttccaaatctcaattttgggcaagaacgatatagtcacaactatggggctgctttcaaaagcggggctccatttctactgtcagatcaatgtggtgctgtaaccatctttttatccctaccttcaagaacctccttatatgaagcctgtctttatccatcagaaggtgtgtgaaatcatcacttccttctggttttatgtatttgtagactatgcagcttttcattaaactgcaagtatatacaagacagatctgaaattaggcctgagtgttccgatccaccactgtactagtaaataaaaatccacctaccttttatgtggaaaattatgtgctattgagtaacttttagctcttttttaaaaaatgggtgaaatttaagtgtcttttttatgagaatgacacatgaagagatctgagagcaatctcatgtagtcttccatgaacctgcaattgtttggtatgcgtcagcattttccaatttccaggttggatctagagctgctgttgatcactcaggcatactaatggattcatttagatgggtccaagctgcagtccatgagcaataacagactaccccagatactgcagtttacgcagtgcttagtaaatgagatttgtggaactaagttattagttacctgaggcttcttaagaaagtcttcttttttgaccagttgatgtgaaagagggagcatgtgacacagccagtatggtggagtgctagggttatcctgtttacaataaatcgcctgaatttca

SEQ ID NO: 447142 - DNA, 3323 bp, Homo sapiens
tgactagagtgtacgcccaagtagagattgatcaaaaaagtatgaaattatcaaagaagcatatatgcgatctcttaacaatttccgggctgaacagcctcaccagcatgccatgtactacctccgcttgctgatgactgaagtggcctggactaaagatgagttaaaagaagctctggatgatgtaacccttcctcgccttaaggccttcatacctcagctcctgtcacggctgcacattgaagcccttctccatggaaacataacaaagcaggctgcattaggaattatgcagatggttgaagacaccctcattgaacatgctcataccaaacctctccttccaagtcagctggttcggtatagagaagttcagctccctgacagaggatggtttgtttatcagcagagaaatgaagttcacaataactgtggcatcgagatatactaccaaacagacatgcaaagcacctcagagaatatgtttctggagctcttctgtcagattatctcggaaccttgcttcaacaccctgcgcaccaaggagcagttgggctatatcgtcttcagcgggccacgtcgagctaatggcatacagggcttgagattcatcatccagtcagaaaagccacctcactacctagaaagcagagtggaagctttcttaattaccatggaaaagtccatagaggacatgacagaagaggccttccaaaaacacattcaggcattagcaattcgtcgactagacaaaccaaagaagctatctgctgagtgtgctaaatactggggagaaatcatctcccagcaatataattttgacagagataacactgaggttgcatatttaaagacacttaccaaggaagatatcatcaaattctacaaggaaatgttggcagtagatgctccaaggagacataaggtatccgtccatgttcttgccagggaaatggattcttgtcctgttgttggagagttcccatgtcaaaatgacataaatttgtcacaagcaccagccttgccacaacctgaagtgattcagaacatgaccgaattcaagcgtggtctgccactgtttccccttgtgaaaccacatattaacttcatggctgcaaaactctgaagattccccatgcatgggaaagtgcaagtggatgcattcctgagtcttccagagcctaagaaaatcatcttggccactttaatagtttctgattcactattagagaaacaaacaaaaaattgtcaaatgtcattatgtagaaatattataaatccaaagtaaattacaaaatcttatagatgtagaatattttttaaatacatgcctcttaaatattttaaaatttttcttttgattactgagagaaatttccccaatataacaatgcttaaaatgaatgatattcctatagaatcttccttccctattctgtaaaatagtcacttgtccgaagaaagttaaaagttagctcttttctaaaagcctcctagcttgacatagaaggcttcacaacatttagaaaggtaataactttttaaaaattgatcctcaaatttgctttctacttgatggtttcatgtaaatcagtggaaaacattacatttggcagatgataaagcaatgtcatcttttattagtgaaatgctggttatataaggcatggttttaatctttttataaaatttgaacatgttttttatgccaactcgtaaaatgctagaaaaccctacttatttacaatgctagaaatacagacttaccttacatcaattttgtcctaaaccgaatttctcaggattactgtggtttctttcattctgattgaattatattgacctacttcttcatagttggtttgcagtgttccatgagttttacttttcctcatcaacatattgctttaacacaacatatttatttaacacgtacaaatagggtcaacttcagatcctactgagtgtgtgacatgcttttccaacatcagctttttgtaaccacctgtataactttttattacagtgaaattgcagtcagtatgtgaaccaaaatatcttgcccctttatgaatttaaaaggcagccaatacaaagccacctttttggaaatataaaaagtaaagccttgcattcttatatagcaggtcttcataaaactctaaaatcccttgttgctaccagtctaatcttgccttaaatgttaagttattttttgaatatataaatataaacatataaacacagatgatgactggagtagacttttaaaaaaatatttttttcatgagatactattttaggtgaaattgttactgtagatttaacagctgttttgaaatatttactgttattaaaacttgcttcaagagaaattgtgaatatatttccatatacaagcactagtaacagtaagtggccctgtcatccactaactcaggcaaagtaaagaatggcatttttgaaggacattttacctccccatatgatttgattggctaggactttcttctgtaaagtcataccttttcacatcttaagtttttacatttgccattttccaaatctcaattttgggcaagaacgatatagtcacaactatggggctgctttcaaaagcggggctccatttctactgtcagatcaatgtggtgctgtaaccatctttttatccctaccttcaagaacctccttatatgaagcctgtctttatccatcagaaggtgtgtgaaatcatcacttccttctggttttatgtatttgtagactatgcagcttttcattaaactgcaagtatatacaagacagatctgaaattaggcctgagtgttccgatccaccactgtactagtaaataaaaatccacctaccttttatgtggaaaattatgtgctattgagtaacttttagctcttttttaaaaaatgggtgaaatttaagtgtcttttttatgagaatgacacatgaagagatctgagagcaatctcatgtagtcttccatgaacctgcaattgtttggtatgcgtcagcattttccaatttccaggttggatctagagctgctgttgatcactcaggcatactaatggattcatttagatgggtccaagctgcagtccatgagcaataacagactaccccagatactgcagtttacgcagtgcttagtaaatgagatttgtggaactaagttattagttacctgaggcttcttaagaaagtcttcttttttgaccagttgatgtgaaagagggagcatgtgacacagccagtatggtggagtgctagggttatcctgtttacaataaatcgcctgaatttca

SEQ ID NO: 447143 - DNA, 2974 bp, Homo sapiens
tacaggcacgagacactgtgcccggccagaagaaacttgttcattgggaactaaaagtgatgaactaaaagtttcaggtcaccaggtgttggagcttctactttagttcttccctgaacatctagtcactcagcctctacccttgtctgcctttgcctcctgtttgaacagttgtgttattttgcaatggatcatttctggccacatctgttcccagcactgaatactggagagagacttcttagtctctcccatgttacctgcgtattttaatcatctagaaggattgacattagcttgcaagaggaggaaactggcagtgtaactaggctttttgtgggtgggcacaccagcctctgctactctgctgaagccttgatgcgaagcctctaagtccttggtgagccagcccttgtttgcccagaggaaaaccaaaaggactaaggacacttaccataggtttgtacagaccaattcacgaccctccagacatactgatccagaagaaaggtcagcagatcaagatacatgggttattaggtagagcggcctcaagccaaaacaaaaaaacagtatattaagtagaactgaggtatgctcccagtgtccgccaaaaaaagttgatgtccttattctgatgtttaggttaaatacactaaaaggaaacttttttctttgcagcctgaagtgattcagaacatgaccgaattcaagcgtggtctgccactgtttccccttgtgaaaccacatattaacttcatggctgcaaaactctgaagattccccatgcatgggaaagtgcaagtggatgcattcctgagtcttccagagcctaagaaaatcatcttggccactttaatagtttctgattcactattagagaaacaaacaaaaaattgtcaaatgtcattatgtagaaatattataaatccaaagtaaattacaaaatcttatagatgtagaatattttttaaatacatgcctcttaaatattttaaaatttttcttttgattactgagagaaatttccccaatataacaatgcttaaaatgaatgatattcctatagaatcttccttccctattctgtaaaatagtcacttgtccgaagaaagttaaaagttagctcttttctaaaagcctcctagcttgacatagaaggcttcacaacatttagaaaggtaataactttttaaaaattgatcctcaaatttgctttctacttgatggtttcatgtaaatcagtggaaaacattacatttggcagatgataaagcaatgtcatcttttattagtgaaatgctggttatataaggcatggttttaatctttttataaaatttgaacatgttttttatgccaactcgtaaaatgctagaaaaccctacttatttacaatgctagaaatacagacttaccttacatcaattttgtcctaaaccgaatttctcaggattactgtggtttctttcattctgattgaattatattgacctacttcttcatagttggtttgcagtgttccatgagttttacttttcctcatcaacatattgctttaacacaacatatttatttaacacgtacaaatagggtcaacttcagatcctactgagtgtgtgacatgcttttccaacatcagctttttgtaaccacctgtataactttttattacagtgaaattgcagtcagtatgtgaaccaaaatatcttgcccctttatgaatttaaaaggcagccaatacaaagccacctttttggaaatataaaaagtaaagccttgcattcttatatagcaggtcttcataaaactctaaaatcccttgttgctaccagtctaatcttgccttaaatgttaagttattttttgaatatataaatataaacatataaacacagatgatgactggagtagacttttaaaaaaatatttttttcatgagatactattttaggtgaaattgttactgtagatttaacagctgttttgaaatatttactgttattaaaacttgcttcaagagaaattgtgaatatatttccatatacaagcactagtaacagtaagtggccctgtcatccactaactcaggcaaagtaaagaatggcatttttgaaggacattttacctccccatatgatttgattggctaggactttcttctgtaaagtcataccttttcacatcttaagtttttacatttgccattttccaaatctcaattttgggcaagaacgatatagtcacaactatggggctgctttcaaaagcggggctccatttctactgtcagatcaatgtggtgctgtaaccatctttttatccctaccttcaagaacctccttatatgaagcctgtctttatccatcagaaggtgtgtgaaatcatcacttccttctggttttatgtatttgtagactatgcagcttttcattaaactgcaagtatatacaagacagatctgaaattaggcctgagtgttccgatccaccactgtactagtaaataaaaatccacctaccttttatgtggaaaattatgtgctattgagtaacttttagctcttttttaaaaaatgggtgaaatttaagtgtcttttttatgagaatgacacatgaagagatctgagagcaatctcatgtagtcttccatgaacctgcaattgtttggtatgcgtcagcattttccaatttccaggttggatctagagctgctgttgatcactcaggcatactaatggattcatttagatgggtccaagctgcagtccatgagcaataacagactaccccagatactgcagtttacgcagtgcttagtaaatgagatttgtggaactaagttattagttacctgaggcttcttaagaaagtcttcttttttgaccagttgatgtgaaagagggagcatgtgacacagccagtatggtggagtgctagggttatcctgtttacaataaatcgcctgaatttca

SEQ ID NO: 447144 - DNA, 2345 bp, Homo sapiens
tatacataatttatatacatattcgttatatataaaccactttagcctgttgcctgaagtgattcagaacatgaccgaattcaagcgtggtctgccactgtttccccttgtgaaaccacatattaacttcatggctgcaaaactctgaagattccccatgcatgggaaagtgcaagtggatgcattcctgagtcttccagagcctaagaaaatcatcttggccactttaatagtttctgattcactattagagaaacaaacaaaaaattgtcaaatgtcattatgtagaaatattataaatccaaagtaaattacaaaatcttatagatgtagaatattttttaaatacatgcctcttaaatattttaaaatttttcttttgattactgagagaaatttccccaatataacaatgcttaaaatgaatgatattcctatagaatcttccttccctattctgtaaaatagtcacttgtccgaagaaagttaaaagttagctcttttctaaaagcctcctagcttgacatagaaggcttcacaacatttagaaaggtaataactttttaaaaattgatcctcaaatttgctttctacttgatggtttcatgtaaatcagtggaaaacattacatttggcagatgataaagcaatgtcatcttttattagtgaaatgctggttatataaggcatggttttaatctttttataaaatttgaacatgttttttatgccaactcgtaaaatgctagaaaaccctacttatttacaatgctagaaatacagacttaccttacatcaattttgtcctaaaccgaatttctcaggattactgtggtttctttcattctgattgaattatattgacctacttcttcatagttggtttgcagtgttccatgagttttacttttcctcatcaacatattgctttaacacaacatatttatttaacacgtacaaatagggtcaacttcagatcctactgagtgtgtgacatgcttttccaacatcagctttttgtaaccacctgtataactttttattacagtgaaattgcagtcagtatgtgaaccaaaatatcttgcccctttatgaatttaaaaggcagccaatacaaagccacctttttggaaatataaaaagtaaagccttgcattcttatatagcaggtcttcataaaactctaaaatcccttgttgctaccagtctaatcttgccttaaatgttaagttattttttgaatatataaatataaacatataaacacagatgatgactggagtagacttttaaaaaaatatttttttcatgagatactattttaggtgaaattgttactgtagatttaacagctgttttgaaatatttactgttattaaaacttgcttcaagagaaattgtgaatatatttccatatacaagcactagtaacagtaagtggccctgtcatccactaactcaggcaaagtaaagaatggcatttttgaaggacattttacctccccatatgatttgattggctaggactttcttctgtaaagtcataccttttcacatcttaagtttttacatttgccattttccaaatctcaattttgggcaagaacgatatagtcacaactatggggctgctttcaaaagcggggctccatttctactgtcagatcaatgtggtgctgtaaccatctttttatccctaccttcaagaacctccttatatgaagcctgtctttatccatcagaaggtgtgtgaaatcatcacttccttctggttttatgtatttgtagactatgcagcttttcattaaactgcaagtatatacaagacagatctgaaattaggcctgagtgttccgatccaccactgtactagtaaataaaaatccacctaccttttatgtggaaaattatgtgctattgagtaacttttagctcttttttaaaaaatgggtgaaatttaagtgtcttttttatgagaatgacacatgaagagatctgagagcaatctcatgtagtcttccatgaacctgcaattgtttggtatgcgtcagcattttccaatttccaggttggatctagagctgctgttgatcactcaggcatactaatggattcatttagatgggtccaagctgcagtccatgagcaataacagactaccccagatactgcagtttacgcagtgcttagtaaatgagatttgtggaactaagttattagttacctgaggcttcttaagaaagtcttcttttttgaccagttgatgtgaaagagggagcatgtgacacagccagtatggtggagtgctagggttatcctgtttacaataaatcgcctgaatttca

SEQ ID NO: 447145 - DNA, 2357 bp, Homo sapiens
cttcgacggcacacgttactctgttctcggcggtgtaatcatgcaatcgtttgtacgtcagcctcctgaagtgattcagaacatgaccgaattcaagcgtggtctgccactgtttccccttgtgaaaccacatattaacttcatggctgcaaaactctgaagattccccatgcatgggaaagtgcaagtggatgcattcctgagtcttccagagcctaagaaaatcatcttggccactttaatagtttctgattcactattagagaaacaaacaaaaaattgtcaaatgtcattatgtagaaatattataaatccaaagtaaattacaaaatcttatagatgtagaatattttttaaatacatgcctcttaaatattttaaaatttttcttttgattactgagagaaatttccccaatataacaatgcttaaaatgaatgatattcctatagaatcttccttccctattctgtaaaatagtcacttgtccgaagaaagttaaaagttagctcttttctaaaagcctcctagcttgacatagaaggcttcacaacatttagaaaggtaataactttttaaaaattgatcctcaaatttgctttctacttgatggtttcatgtaaatcagtggaaaacattacatttggcagatgataaagcaatgtcatcttttattagtgaaatgctggttatataaggcatggttttaatctttttataaaatttgaacatgttttttatgccaactcgtaaaatgctagaaaaccctacttatttacaatgctagaaatacagacttaccttacatcaattttgtcctaaaccgaatttctcaggattactgtggtttctttcattctgattgaattatattgacctacttcttcatagttggtttgcagtgttccatgagttttacttttcctcatcaacatattgctttaacacaacatatttatttaacacgtacaaatagggtcaacttcagatcctactgagtgtgtgacatgcttttccaacatcagctttttgtaaccacctgtataactttttattacagtgaaattgcagtcagtatgtgaaccaaaatatcttgcccctttatgaatttaaaaggcagccaatacaaagccacctttttggaaatataaaaagtaaagccttgcattcttatatagcaggtcttcataaaactctaaaatcccttgttgctaccagtctaatcttgccttaaatgttaagttattttttgaatatataaatataaacatataaacacagatgatgactggagtagacttttaaaaaaatatttttttcatgagatactattttaggtgaaattgttactgtagatttaacagctgttttgaaatatttactgttattaaaacttgcttcaagagaaattgtgaatatatttccatatacaagcactagtaacagtaagtggccctgtcatccactaactcaggcaaagtaaagaatggcatttttgaaggacattttacctccccatatgatttgattggctaggactttcttctgtaaagtcataccttttcacatcttaagtttttacatttgccattttccaaatctcaattttgggcaagaacgatatagtcacaactatggggctgctttcaaaagcggggctccatttctactgtcagatcaatgtggtgctgtaaccatctttttatccctaccttcaagaacctccttatatgaagcctgtctttatccatcagaaggtgtgtgaaatcatcacttccttctggttttatgtatttgtagactatgcagcttttcattaaactgcaagtatatacaagacagatctgaaattaggcctgagtgttccgatccaccactgtactagtaaataaaaatccacctaccttttatgtggaaaattatgtgctattgagtaacttttagctcttttttaaaaaatgggtgaaatttaagtgtcttttttatgagaatgacacatgaagagatctgagagcaatctcatgtagtcttccatgaacctgcaattgtttggtatgcgtcagcattttccaatttccaggttggatctagagctgctgttgatcactcaggcatactaatggattcatttagatgggtccaagctgcagtccatgagcaataacagactaccccagatactgcagtttacgcagtgcttagtaaatgagatttgtggaactaagttattagttacctgaggcttcttaagaaagtcttcttttttgaccagttgatgtgaaagagggagcatgtgacacagccagtatggtggagtgctagggttatcctgtttacaataaatcgcctgaatttca

SEQ ID NO: 447146 - DNA, 415 bp, Homo sapiens
caaaagtgcactcttctatatctacatttaagtgtcttttttatgagaatgacacatgaagagatctgagagcaatctcatgtagtcttccatgaacctgcaattgtttggtatgcgtcagcattttccaatttccaggttggatctagagctgctgttgatcactcaggcatactaatggattcatttagatgggtccaagctgcagtccatgagcaataacagactaccccagatactgcagtttacgcagtgcttagtaaatgagatttgtggaactaagttattagttacctgaggcttcttaagaaagtcttcttttttgaccagttgatgtgaaagagggagcatgtgacacagccagtatggtggagtgctagggttatcctgtttacaataaatcgcctgaatttca

SEQ ID NO: 447147 - DNA, 400 bp, Homo sapiens
gaggcctgcagtgagccaaaatcacgctactgcatacaagcctcggtgacaaactgagaccctgtctcaaaaaaacaaaaacaaaaccagcaaaaaaaactctattctagttctgcatacaggccaacacatggtctaacccaccctatctcaaatccctatccatgtgctctttcagatacaaatatggctccatgaaaacaattttgttagcatttctcagaaagaatgaggggtaagagggaggaaaggaatgactgcaccctgtagagtggctataaaaggtttccttcagcatttagaaaaatctgatgatgtattatatgggtttacttgacgttattgtttgtccttaaatataaagtcacaaatcaacaattaaaaatctctttcttttcag

SEQ ID NO: 447148 - DNA, 784 bp, Homo sapiens
ttcaccacatggacctctctgtagagttgcttgacatggcagcaggcttcccccaaagtgagtgatccaggagggaaagtgagtgatcaggatgcaagccgcggtgtcttttataatgcagtctcagaggtataccattaattctgtcatattttgttagtaaggcagaccaaccctggtgtagtgtgggaggggaccacccaaggctgtgaatctcagcaggcaaggattgttgtgggccaccctggaagctggctgccatacgcttgcaagggacttctgcctctgccttcctcctagtgtccagaaagacgaagacaggacagttggtattggcttctctgatctgtctcttccttcactgtacccccatctccctaatacaggggaaatagaaggcagatttcactctgctacaggagtctgcagtctttgtctccagcttcctacctgctgactcttgagtatgcttcaaggcccatgggacagcaactccagaacaaaactctaactattgcttctgtcctcctcctcttgaagagtgatttgattgaacatttttgctgaatgcgcctctatttccctaaccaaattgtttctccatcacaggatacagctatgagcaaactttggttcaaacaagatgataagttttttttgccgaaggcttgtctcaactttgaatttttcaggtatgtaagatgaatctagcttataaagcttataaaaatcaacaattacgtttccaggagttgtctgttcttcttaaacatccatgtctaga

SEQ ID NO: 447149 - DNA, 1107 bp, Homo sapiens
agctggtagtaggtcagtgatacatggtgcaaaacagcctgggataatattgccagctgccagaccagactagggtggctcaaggggttgccatagtttctaaatcttttgaaggaaaaactgatcgcacagaagagtggtatggaacccagtacaaacaagaagctataccggatgaagtcatcaagaaatggcaaaatgctgacctgaatgggaaatttaaacttcctacaaagaatgaatttattcctacgaattttgagattttaccgttagaaaaagaggcgacaccataccctgctcttattaaggatacagctatgagcaaactttggttcaaacaagatgataagttttttttgccgaaggcttgtctcaactttgaatttttcagcccatttgcttatgtggaccccttgcactgtaacatggcctatttgtaccttgagctcctcaaagactcactcaacgagtatgcatatgcagcagagctagcaggcttgagctatgatctccaaaataccatctatgggatgtatctttcagtgaaaggttacaatgacaagcagccaattttactaaagaagattattgagaaaatggctacctttgagattgatgaaaaaagatttgaaattatcaaagaagcatatatgcgatctcttaacaatttccgggctgaacagcctcaccagcatgccatgtactacctccgcttgctgatgactgaagtggcctggactaaagatgagttaaaagaagctctggatggtgagactttcgacttaaagcttaatgctttcttcatttttttcctaaattcattttggtttattctgatattgactgtttatacttttaaataacttgtagttctattaaagctggctgtgtatatgttttataaaaacagtggtgggcaggatggctatagttaacagtaacatatacttttaaataggtagaaggaagatattgaacattcccaacccaaacaaatgataaataaacttgagatgatggatatgcttagtaccctgatgtgatcactatacattatatgtatatataataacattatatactctatgaatatctacaattatt

SEQ ID NO: 447150 - DNA, 5909 bp, Homo sapiens
tggcgcagggccggctcgaagcgcaagcaggaagcgtttgcggtgatcccggcgactgcgctggctaatgcggtaccggctagcgtggcttctgcaccccgcactgcccagcaccttccgctcagtcctcggcgcccgcctgccgcctccggagcgcctgtgtggtttccaaaaaaagacttacagcaaaatgaataatccagccatcaagagaataggaaatcacattaccaagtctcctgaagacaagcgagaatatcgagggctagagctggccaatggtatcaaagtacttcttatcagtgatcccaccacggataagtcatcagcagcacttgatgtgcacataggttcattgtcggatcctccaaatattgctggcttaagtcatttttgtgaacatatgctttttttgggaacaaagaaataccctaaagaaaatgaatacagccagtttctcagtgagcatgcaggaagttcaaatgcctttactagtggagagcataccaattactattttgatgtttctcatgaacacctagaaggtgccctagacaggtttgcacagttttttctgtgccccttgttcgatgaaagttgcaaagacagagaggtgaatgcagttgattcagaacatgagaagaatgtgatgaatgatgcctggagactctttcaattggaaaaagctacagggaatcctaaacaccccttcagtaaatttgggacaggtaacaaatatactctggagactagaccaaaccaagaaggcattgatgtaagacaagagctactgaaattccattctgcttactattcatccaacttaatggctgtttgtgttttaggtcgagaatctttagatgacttgactaatctggtggtaaagttattttctgaagtagagaacaaaaatgttccattgccagaatttcctgaacaccctttccaagaagaacatcttaaacaactttacaaaatagtacccattaaagatattaggaatctctatgtgacatttcccatacctgaccttcagaaatactacaaatcaaatcctggtcattatcttggtcatctcattgggcatgaaggtcctggaagtctgttatcagaacttaagtcaaagggctgggttaatactcttgttggtgggcagaaggaaggagcccgaggttttatgttttttatcattaatgtggacttgaccgaggaaggattattacatgttgaagatataattttgcacatgtttcaatacattcagaagttacgtgcagaaggacctcaagaatgggttttccaagagtgcaaggacttgaatgctgttgcttttaggtttaaagacaaagagaggccacggggctatacatctaagattgcaggaatattgcattattatcccctagaagaggtgctcacagcggaatatttactggaagaatttagacctgacttaatagagatggttctcgataaactcagaccagaaaatgtccgggttgccatagtttctaaatcttttgaaggaaaaactgatcgcacagaagagtggtatggaacccagtacaaacaagaagctataccggatgaagtcatcaagaaatggcaaaatgctgacctgaatgggaaatttaaacttcctacaaagaatgaatttattcctacgaattttgagattttaccgttagaaaaagaggcgacaccataccctgctcttattaaggatacagctatgagcaaactttggttcaaacaagatgataagttttttttgccgaaggcttgtctcaactttgaatttttcagcccatttgcttatgtggaccccttgcactgtaacatggcctatttgtaccttgagctcctcaaagactcactcaacgagtatgcatatgcagcagagctagcaggcttgagctatgatctccaaaataccatctatgggatgtatctttcagtgaaaggttacaatgacaagcagccaattttactaaagaagattattgagaaaatggctacctttgagattgatgaaaaaagatttgaaattatcaaagaagcatatatgcgatctcttaacaatttccgggctgaacagcctcaccagcatgccatgtactacctccgcttgctgatgactgaagtggcctggactaaagatgagttaaaagaagctctggatgatgtaacccttcctcgccttaaggccttcatacctcagctcctgtcacggctgcacattgaagcccttctccatggaaacataacaaagcaggctgcattaggaattatgcagatggttgaagacaccctcattgaacatgctcataccaaacctctccttccaagtcagctggttcggtatagagaagttcagctccctgacagaggatggtttgtttatcagcagagaaatgaagttcacaataactgtggcatcgagatatactaccaaacagacatgcaaagcacctcagagaatatgtttctggagctcttctgtcagattatctcggaaccttgcttcaacaccctgcgcaccaaggagcagttgggctatatcgtcttcagcgggccacgtcgagctaatggcatacagggcttgagattcatcatccagtcagaaaagccacctcactacctagaaagcagagtggaagctttcttaattaccatggaaaagtccatagaggacatgacagaagaggccttccaaaaacacattcaggcattagcaattcgtcgactagacaaaccaaagaagctatctgctgagtgtgctaaatactggggagaaatcatctcccagcaatataattttgacagagataacactgaggttgcatatttaaagacacttaccaaggaagatatcatcaaattctacaaggaaatgttggcagtagatgctccaaggagacataaggtatccgtccatgttcttgccagggaaatggattcttgtcctgttgttggagagttcccatgtcaaaatgacataaatttgtcacaagcaccagccttgccacaacctgaagtgattcagaacatgaccgaattcaagcgtggtctgccactgtttccccttgtgaaaccacatattaacttcatggctgcaaaactctgaagattccccatgcatgggaaagtgcaagtggatgcattcctgagtcttccagagcctaagaaaatcatcttggccactttaatagtttctgattcactattagagaaacaaacaaaaaattgtcaaatgtcattatgtagaaatattataaatccaaagtaaattacaaaatcttatagatgtagaatattttttaaatacatgcctcttaaatattttaaaatttttcttttgattactgagagaaatttccccaatataacaatgcttaaaatgaatgatattcctatagaatcttccttccctattctgtaaaatagtcacttgtccgaagaaagttaaaagttagctcttttctaaaagcctcctagcttgacatagaaggcttcacaacatttagaaaggtaataactttttaaaaattgatcctcaaatttgctttctacttgatggtttcatgtaaatcagtggaaaacattacatttggcagatgataaagcaatgtcatcttttattagtgaaatgctggttatataaggcatggttttaatctttttataaaatttgaacatgttttttatgccaactcgtaaaatgctagaaaaccctacttatttacaatgctagaaatacagacttaccttacatcaattttgtcctaaaccgaatttctcaggattactgtggtttctttcattctgattgaattatattgacctacttcttcatagttggtttgcagtgttccatgagttttacttttcctcatcaacatattgctttaacacaacatatttatttaacacgtacaaatagggtcaacttcagatcctactgagtgtgtgacatgcttttccaacatcagctttttgtaaccacctgtataactttttattacagtgaaattgcagtcagtatgtgaaccaaaatatcttgcccctttatgaatttaaaaggcagccaatacaaagccacctttttggaaatataaaaagtaaagccttgcattcttatatagcaggtcttcataaaactctaaaatcccttgttgctaccagtctaatcttgccttaaatgttaagttattttttgaatatataaatataaacatataaacacagatgatgactggagtagacttttaaaaaaatatttttttcatgagatactattttaggtgaaattgttactgtagatttaacagctgttttgaaatatttactgttattaaaacttgcttcaagagaaattgtgaatatatttccatatacaagcactagtaacagtaagtggccctgtcatccactaactcaggcaaagtaaagaatggcatttttgaaggacattttacctccccatatgatttgattggctaggactttcttctgtaaagtcataccttttcacatcttaagtttttacatttgccattttccaaatctcaattttgggcaagaacgatatagtcacaactatggggctgctttcaaaagcggggctccatttctactgtcagatcaatgtggtgctgtaaccatctttttatccctaccttcaagaacctccttatatgaagcctgtctttatccatcagaaggtgtgtgaaatcatcacttccttctggttttatgtatttgtagactatgcagcttttcattaaactgcaagtatatacaagacagatctgaaattaggcctgagtgttccgatccaccactgtactagtaaataaaaatccacctaccttttatgtggaaaattatgtgctattgagtaacttttagctcttttttaaaaaatgggtgaaatttaagtgtcttttttatgagaatgacacatgaagagatctgagagcaatctcatgtagtcttccatgaacctgcaattgtttggtatgcgtcagcattttccaatttccaggttggatctagagctgctgttgatcactcaggcatactaatggattcatttagatgggtccaagctgcagtccatgagcaataacagactaccccagatactgcagtttacgcagtgcttagtaaatgagatttgtggaactaagttattagttacctgaggcttcttaagaaagtcttcttttttgaccagttgatgtgaaagagggagcatgtgacacagccagtatggtggagtgctagggttatcctgtttacaataaatcgcctgaatttcacctctggagtctgcatttgtattatttttccagttttagtgaaatagtacagtggccagtcctcagcctacctctcaacatcccagtttgaccagatttcttgctttcattgttcataatgcagaaagcagtgaattatattaacattttaaaagtgtttctgggtaacaatgatttttgtcaaatagaagactcaatttcacaaccttaagaatagatcacttttgtaaaacaagaatctcagtatttgatgttggactccttgctgtgagtattgtcactgactccaaacccagaaagatttgttcctgcccttacagggatgaaaataaaaaggatagaaaaaatatttctctcctctacaatgagtccttacatcttcttgccacatctccagctgcagtttaggcagatatcttgttcaatctctgtcttcttgatccctgtcaaaataatttttctactcatatagtggccagttggctcaggcaggcatttcaagaggaatctgcttgttcctcacttttccagcataggacagtggtccagcccgcacagtcagcattgttctcagggacgatgtgg

SEQ ID NO: 447151 - DNA, 5720 bp, Homo sapiens
tggcgcagggccggctcgaagcgcaagcaggaagcgtttgcggtgatcccggcgactgcgctggctaatgcggtaccggctagcgtggcttctgcaccccgcactgcccagcaccttccgctcagtcctcggcgcccgcctgccgcctccggagcgcctgtgtgggaactaccaggttgtttttcaaagcagcggcactattttgcatttccaccagcagtgtgtgaaaattccaatttctctatatccttgacaacacttgctatatgtacttttgttataagccatcctggtgggtatgaagtggtgtctcattggaattttgactttcattttcctgatgaccattgtaagagttttaaaatatattctctaggccgggcgtgttggctcatgcctgtaatcccagcactttgggaggatgaggcaggtggatcacctgcagtcaggagttcaggaccagcctgaccaacaagctcctgcatgtggcatctgaaagctatctgtgaagaggttcaagcaattcttctgcctcagcctcccgagtagctgggattacagtttccaaaaaaagacttacagcaaaatgaataatccagccatcaagagaataggaaatcacattaccaagtctcctgaagacaagcgagaatatcgagggctagagctggccaatggtatcaaagtacttcttatcagtgatcccaccacggataagtcatcagcagcacttgatgtgcacataggttcattgtcggatcctccaaatattgctggcttaagtcatttttgtgaacatatgctttttttgggaacaaagaaataccctaaagaaaatgaatacagccagtttctcagtgagcatgcaggaagttcaaatgcctttactagtggagagcataccaattactattttgatgtttctcatgaacacctagaaggtgccctagacaggtttgcacagttttttctgtgccccttgttcgatgaaagttgcaaagacagagaggtgaatgcagttgattcagaacatgagaagaatgtgatgaatgatgcctggagactctttcaattggaaaaagctacagggaatcctaaacaccccttcagtaaatttgggacaggtaacaaatatactctggagactagaccaaaccaagaaggcattgatgtaagacaagagctactgaaattccattctgcttactattcatccaacttaatggctgtttgtgttttaggtcgagaatctttagatgacttgactaatctggtggtaaagttattttctgaagtagagaacaaaaatgttccattgccagaatttcctgaacaccctttccaagaagaacatcttaaacaactttacaaaatagtacccattaaagatattaggaatctctatgtgacatttcccatacctgaccttcagaaatactacaaatcaaatcctggtcattatcttggtcatctcattgggcatgaaggtcctggaagtctgttatcagaacttaagtcaaagggctgggttaatactcttgttggtgggcagaaggaaggagcccgaggttttatgttttttatcattaatgtggacttgaccgaggaaggattattacatgttgaagatataattttgcacatgtttcaatacattcagaagttacgtgcagaaggacctcaagaatgggttttccaagagtgcaaggacttgaatgctgttgcttttaggtttaaagacaaagagaggccacggggctatacatctaagattgcaggaatattgcattattatcccctagaagaggtgctcacagcggaatatttactggaagaatttagacctgacttaatagagatggttctcgataaactcagaccagaaaatgtccgggttgccatagtttctaaatcttttgaaggaaaaactgatcgcacagaagagtggtatggaacccagtacaaacaagaagctataccggatgaagtcatcaagaaatggcaaaatgctgacctgaatgggaaatttaaacttcctacaaagaatgaatttattcctacgaattttgagattttaccgttagaaaaagaggcgacaccataccctgctcttattaaggatacagctatgagcaaactttggttcaaacaagatgataagttttttttgccgaaggcttgtctcaactttgaatttttcagcccatttgcttatgtggaccccttgcactgtaacatggcctatttgtaccttgagctcctcaaagactcactcaacgagtatgcatatgcagcagagctagcaggcttgagctatgatctccaaaataccatctatgggatgtatctttcagtgaaaggttacaatgacaagcagccaattttactaaagaagattattgagaaaatggctacctttgagattgatgaaaaaagatttgaaattatcaaagaagcatatatgcgatctcttaacaatttccgggctgaacagcctcaccagcatgccatgtactacctccgcttgctgatgactgaagtggcctggactaaagatgagttaaaagaagctctggatgatgtaacccttcctcgccttaaggccttcatacctcagctcctgtcacggctgcacattgaagcccttctccatggaaacataacaaagcaggctgcattaggaattatgcagatggttgaagacaccctcattgaacatgctcataccaaacctctccttccaagtcagctggttcggtatagagaagttcagctccctgacagaggatggtttgtttatcagcagagaaatgaagttcacaataactgtggcatcgagatatactaccaaacagacatgcaaagcacctcagagaatatgtttctggagctcttctgtcagattatctcggaaccttgcttcaacaccctgcgcaccaaggagcagttgggctatatcgtcttcagcgggccacgtcgagctaatggcatacagggcttgagattcatcatccagtcagaaaagccacctcactacctagaaagcagagtggaagctttcttaattaccatggaaaagtccatagaggacatgacagaagaggccttccaaaaacacattcaggcattagcaattcgtcgactagacaaaccaaagaagctatctgctgagtgtgctaaatactggggagaaatcatctcccagcaatataattttgacagagataacactgaggttgcatatttaaagacacttaccaaggaagatatcatcaaattctacaaggaaatgttggcagtagatgctccaaggagacataaggtatccgtccatgttcttgccagggaaatggattcttgtcctgttgttggagagttcccatgtcaaaatgacataaatttgtcacaagcaccagccttgccacaacctgaagtgattcagaacatgaccgaattcaagcgtggtctgccactgtttccccttgtgaaaccacatattaacttcatggctgcaaaactctgaagattccccatgcatgggaaagtgcaagtggatgcattcctgagtcttccagagcctaagaaaatcatcttggccactttaatagtttctgattcactattagagaaacaaacaaaaaattgtcaaatgtcattatgtagaaatattataaatccaaagtaaattacaaaatcttatagatgtagaatattttttaaatacatgcctcttaaatattttaaaatttttcttttgattactgagagaaatttccccaatataacaatgcttaaaatgaatgatattcctatagaatcttccttccctattctgtaaaatagtcacttgtccgaagaaagttaaaagttagctcttttctaaaagcctcctagcttgacatagaaggcttcacaacatttagaaaggtaataactttttaaaaattgatcctcaaatttgctttctacttgatggtttcatgtaaatcagtggaaaacattacatttggcagatgataaagcaatgtcatcttttattagtgaaatgctggttatataaggcatggttttaatctttttataaaatttgaacatgttttttatgccaactcgtaaaatgctagaaaaccctacttatttacaatgctagaaatacagacttaccttacatcaattttgtcctaaaccgaatttctcaggattactgtggtttctttcattctgattgaattatattgacctacttcttcatagttggtttgcagtgttccatgagttttacttttcctcatcaacatattgctttaacacaacatatttatttaacacgtacaaatagggtcaacttcagatcctactgagtgtgtgacatgcttttccaacatcagctttttgtaaccacctgtataactttttattacagtgaaattgcagtcagtatgtgaaccaaaatatcttgcccctttatgaatttaaaaggcagccaatacaaagccacctttttggaaatataaaaagtaaagccttgcattcttatatagcaggtcttcataaaactctaaaatcccttgttgctaccagtctaatcttgccttaaatgttaagttattttttgaatatataaatataaacatataaacacagatgatgactggagtagacttttaaaaaaatatttttttcatgagatactattttaggtgaaattgttactgtagatttaacagctgttttgaaatatttactgttattaaaacttgcttcaagagaaattgtgaatatatttccatatacaagcactagtaacagtaagtggccctgtcatccactaactcaggcaaagtaaagaatggcatttttgaaggacattttacctccccatatgatttgattggctaggactttcttctgtaaagtcataccttttcacatcttaagtttttacatttgccattttccaaatctcaattttgggcaagaacgatatagtcacaactatggggctgctttcaaaagcggggctccatttctactgtcagatcaatgtggtgctgtaaccatctttttatccctaccttcaagaacctccttatatgaagcctgtctttatccatcagaaggtgtgtgaaatcatcacttccttctggttttatgtatttgtagactatgcagcttttcattaaactgcaagtatatacaagacagatctgaaattaggcctgagtgttccgatccaccactgtactagtaaataaaaatccacctaccttttatgtggaaaattatgtgctattgagtaacttttagctcttttttaaaaaatgggtgaaatttaagtgtcttttttatgagaatgacacatgaagagatctgagagcaatctcatgtagtcttccatgaacctgcaattgtttggtatgcgtcagcattttccaatttccaggttggatctagagctgctgttgatcactcaggcatactaatggattcatttagatgggtccaagctgcagtccatgagcaataacagactaccccagatactgcagtttacgcagtgcttagtaaatgagatttgtggaactaagttattagttacctgaggcttcttaagaaagtcttcttttttgaccagttgatgtgaaagagggagcatgtgacacagccagtatggtggagtgctagggttatcctgtttacaataaatcgcctgaatttca

SEQ ID NO: 447152 - DNA, 4132 bp, Homo sapiens
atttttccctagttttggctgctgttatatgatagaaattatcaattattttactgacagttctctagctttactgttttggggaaaactcagggataagctaacattttcacaggtctcaatttttctaagttcatgtaattaccacagacacatttcccagtcctttattcctgtccaccaaggatgtgactttattggagagagagggaagacatgcaaatgctgtatctgttctgtcggccgtgctcctcccattagcctaagcacagccatgcattttggcccgttcccactgctcacataccctgcatttctaacttgtcagttctgccacaccatctggggtaggcagttccttctccttcttcactactaccagtgcgcacgcacacacgcacgcatgcacacacacacacacacactcacacacacttcaggcttctttttcagacatcttcttttttttcctcataagaaatagcctcaagaattcaaccatatcctcaggaaatcatattaaccggtgttcaatatcttgatccatctcaaaaggccatatcacattgagaagtaataaaatcagctattttactgtcaacattttcttccagcccatttgcttatgtggaccccttgcactgtaacatggcctatttgtaccttgagctcctcaaagactcactcaacgagtatgcatatgcagcagagctagcaggcttgagctatgatctccaaaataccatctatgggatgtatctttcagtgaaaggttacaatgacaagcagccaattttactaaagaagattattgagaaaatggctacctttgagattgatgaaaaaagatttgaaattatcaaagaagcatatatgcgatctcttaacaatttccgggctgaacagcctcaccagcatgccatgtactacctccgcttgctgatgactgaagtggcctggactaaagatgagttaaaagaagctctggatgatgtaacccttcctcgccttaaggccttcatacctcagctcctgtcacggctgcacattgaagcccttctccatggaaacataacaaagcaggctgcattaggaattatgcagatggttgaagacaccctcattgaacatgctcataccaaacctctccttccaagtcagctggttcggtatagagaagttcagctccctgacagaggatggtttgtttatcagcagagaaatgaagttcacaataactgtggcatcgagatatactaccaaacagacatgcaaagcacctcagagaatatgtttctggagctcttctgtcagattatctcggaaccttgcttcaacaccctgcgcaccaaggagcagttgggctatatcgtcttcagcgggccacgtcgagctaatggcatacagggcttgagattcatcatccagtcagaaaagccacctcactacctagaaagcagagtggaagctttcttaattaccatggaaaagtccatagaggacatgacagaagaggccttccaaaaacacattcaggcattagcaattcgtcgactagacaaaccaaagaagctatctgctgagtgtgctaaatactggggagaaatcatctcccagcaatataattttgacagagataacactgaggttgcatatttaaagacacttaccaaggaagatatcatcaaattctacaaggaaatgttggcagtagatgctccaaggagacataaggtatccgtccatgttcttgccagggaaatggattcttgtcctgttgttggagagttcccatgtcaaaatgacataaatttgtcacaagcaccagccttgccacaacctgaagtgattcagaacatgaccgaattcaagcgtggtctgccactgtttccccttgtgaaaccacatattaacttcatggctgcaaaactctgaagattccccatgcatgggaaagtgcaagtggatgcattcctgagtcttccagagcctaagaaaatcatcttggccactttaatagtttctgattcactattagagaaacaaacaaaaaattgtcaaatgtcattatgtagaaatattataaatccaaagtaaattacaaaatcttatagatgtagaatattttttaaatacatgcctcttaaatattttaaaatttttcttttgattactgagagaaatttccccaatataacaatgcttaaaatgaatgatattcctatagaatcttccttccctattctgtaaaatagtcacttgtccgaagaaagttaaaagttagctcttttctaaaagcctcctagcttgacatagaaggcttcacaacatttagaaaggtaataactttttaaaaattgatcctcaaatttgctttctacttgatggtttcatgtaaatcagtggaaaacattacatttggcagatgataaagcaatgtcatcttttattagtgaaatgctggttatataaggcatggttttaatctttttataaaatttgaacatgttttttatgccaactcgtaaaatgctagaaaaccctacttatttacaatgctagaaatacagacttaccttacatcaattttgtcctaaaccgaatttctcaggattactgtggtttctttcattctgattgaattatattgacctacttcttcatagttggtttgcagtgttccatgagttttacttttcctcatcaacatattgctttaacacaacatatttatttaacacgtacaaatagggtcaacttcagatcctactgagtgtgtgacatgcttttccaacatcagctttttgtaaccacctgtataactttttattacagtgaaattgcagtcagtatgtgaaccaaaatatcttgcccctttatgaatttaaaaggcagccaatacaaagccacctttttggaaatataaaaagtaaagccttgcattcttatatagcaggtcttcataaaactctaaaatcccttgttgctaccagtctaatcttgccttaaatgttaagttattttttgaatatataaatataaacatataaacacagatgatgactggagtagacttttaaaaaaatatttttttcatgagatactattttaggtgaaattgttactgtagatttaacagctgttttgaaatatttactgttattaaaacttgcttcaagagaaattgtgaatatatttccatatacaagcactagtaacagtaagtggccctgtcatccactaactcaggcaaagtaaagaatggcatttttgaaggacattttacctccccatatgatttgattggctaggactttcttctgtaaagtcataccttttcacatcttaagtttttacatttgccattttccaaatctcaattttgggcaagaacgatatagtcacaactatggggctgctttcaaaagcggggctccatttctactgtcagatcaatgtggtgctgtaaccatctttttatccctaccttcaagaacctccttatatgaagcctgtctttatccatcagaaggtgtgtgaaatcatcacttccttctggttttatgtatttgtagactatgcagcttttcattaaactgcaagtatatacaagacagatctgaaattaggcctgagtgttccgatccaccactgtactagtaaataaaaatccacctaccttttatgtggaaaattatgtgctattgagtaacttttagctcttttttaaaaaatgggtgaaatttaagtgtcttttttatgagaatgacacatgaagagatctgagagcaatctcatgtagtcttccatgaacctgcaattgtttggtatgcgtcagcattttccaatttccaggttggatctagagctgctgttgatcactcaggcatactaatggattcatttagatgggtccaagctgcagtccatgagcaataacagactaccccagatactgcagtttacgcagtgcttagtaaatgagatttgtggaactaagttattagttacctgaggcttcttaagaaagtcttcttttttgaccagttgatgtgaaagagggagcatgtgacacagccagtatggtggagtgctagggttatcctgtttacaataaatcgcctgaatttca

SEQ ID NO: 447153 - DNA, 4277 bp, Homo sapiens
atttttccctagttttggctgctgttatatgatagaaattatcaattattttactgacagttctctagctttactgttttggggaaaactcagggataagctaacattttcacaggtctcaatttttctaagttcatgtaattaccacagacacatttcccagtcctttattcctgtccaccaaggatgtgactttattggagagagagggaagacatgcaaatgctgtatctgttctgtcggccgtgctcctcccattagcctaagcacagccatgcattttggcccgttcccactgctcacataccctgcatttctaacttgtcagttctgccacaccatctggggtaggcagttccttctccttcttcactactaccagtgcgcacgcacacacgcacgcatgcacacacacacacacacactcacacacacttcaggcttctttttcagacatcttcttttttttcctcataagaaatagcctcaagaattcaaccatatcctcaggaaatcatattaaccggtgttcaatatcttgatccatctcaaaaggccatatcacattgagaagtaataaaatcagctattttactgtcaacattttcttccagcccatttgcttatgtggaccccttgcactgtaacatggcctatttgtaccttgagctcctcaaagactcactcaacgagtatgcatatgcagcagagctagcaggcttgagctatgatctccaaaataccatctatgggatgtattcgctacatttatgctgatcctctccattgcaacatgacatacctgtttatcaggttattgaaggatgatttaaaagagtatacatatgcagcacgcctctcaggtttgagctatggcattgcatcaggaatgaatgcaatacttctttcagtgaaaggttacaatgacaagcagccaattttactaaagaagattattgagaaaatggctacctttgagattgatgaaaaaagatttgaaattatcaaagaagcatatatgcgatctcttaacaatttccgggctgaacagcctcaccagcatgccatgtactacctccgcttgctgatgactgaagtggcctggactaaagatgagttaaaagaagctctggatgatgtaacccttcctcgccttaaggccttcatacctcagctcctgtcacggctgcacattgaagcccttctccatggaaacataacaaagcaggctgcattaggaattatgcagatggttgaagacaccctcattgaacatgctcataccaaacctctccttccaagtcagctggttcggtatagagaagttcagctccctgacagaggatggtttgtttatcagcagagaaatgaagttcacaataactgtggcatcgagatatactaccaaacagacatgcaaagcacctcagagaatatgtttctggagctcttctgtcagattatctcggaaccttgcttcaacaccctgcgcaccaaggagcagttgggctatatcgtcttcagcgggccacgtcgagctaatggcatacagggcttgagattcatcatccagtcagaaaagccacctcactacctagaaagcagagtggaagctttcttaattaccatggaaaagtccatagaggacatgacagaagaggccttccaaaaacacattcaggcattagcaattcgtcgactagacaaaccaaagaagctatctgctgagtgtgctaaatactggggagaaatcatctcccagcaatataattttgacagagataacactgaggttgcatatttaaagacacttaccaaggaagatatcatcaaattctacaaggaaatgttggcagtagatgctccaaggagacataaggtatccgtccatgttcttgccagggaaatggattcttgtcctgttgttggagagttcccatgtcaaaatgacataaatttgtcacaagcaccagccttgccacaacctgaagtgattcagaacatgaccgaattcaagcgtggtctgccactgtttccccttgtgaaaccacatattaacttcatggctgcaaaactctgaagattccccatgcatgggaaagtgcaagtggatgcattcctgagtcttccagagcctaagaaaatcatcttggccactttaatagtttctgattcactattagagaaacaaacaaaaaattgtcaaatgtcattatgtagaaatattataaatccaaagtaaattacaaaatcttatagatgtagaatattttttaaatacatgcctcttaaatattttaaaatttttcttttgattactgagagaaatttccccaatataacaatgcttaaaatgaatgatattcctatagaatcttccttccctattctgtaaaatagtcacttgtccgaagaaagttaaaagttagctcttttctaaaagcctcctagcttgacatagaaggcttcacaacatttagaaaggtaataactttttaaaaattgatcctcaaatttgctttctacttgatggtttcatgtaaatcagtggaaaacattacatttggcagatgataaagcaatgtcatcttttattagtgaaatgctggttatataaggcatggttttaatctttttataaaatttgaacatgttttttatgccaactcgtaaaatgctagaaaaccctacttatttacaatgctagaaatacagacttaccttacatcaattttgtcctaaaccgaatttctcaggattactgtggtttctttcattctgattgaattatattgacctacttcttcatagttggtttgcagtgttccatgagttttacttttcctcatcaacatattgctttaacacaacatatttatttaacacgtacaaatagggtcaacttcagatcctactgagtgtgtgacatgcttttccaacatcagctttttgtaaccacctgtataactttttattacagtgaaattgcagtcagtatgtgaaccaaaatatcttgcccctttatgaatttaaaaggcagccaatacaaagccacctttttggaaatataaaaagtaaagccttgcattcttatatagcaggtcttcataaaactctaaaatcccttgttgctaccagtctaatcttgccttaaatgttaagttattttttgaatatataaatataaacatataaacacagatgatgactggagtagacttttaaaaaaatatttttttcatgagatactattttaggtgaaattgttactgtagatttaacagctgttttgaaatatttactgttattaaaacttgcttcaagagaaattgtgaatatatttccatatacaagcactagtaacagtaagtggccctgtcatccactaactcaggcaaagtaaagaatggcatttttgaaggacattttacctccccatatgatttgattggctaggactttcttctgtaaagtcataccttttcacatcttaagtttttacatttgccattttccaaatctcaattttgggcaagaacgatatagtcacaactatggggctgctttcaaaagcggggctccatttctactgtcagatcaatgtggtgctgtaaccatctttttatccctaccttcaagaacctccttatatgaagcctgtctttatccatcagaaggtgtgtgaaatcatcacttccttctggttttatgtatttgtagactatgcagcttttcattaaactgcaagtatatacaagacagatctgaaattaggcctgagtgttccgatccaccactgtactagtaaataaaaatccacctaccttttatgtggaaaattatgtgctattgagtaacttttagctcttttttaaaaaatgggtgaaatttaagtgtcttttttatgagaatgacacatgaagagatctgagagcaatctcatgtagtcttccatgaacctgcaattgtttggtatgcgtcagcattttccaatttccaggttggatctagagctgctgttgatcactcaggcatactaatggattcatttagatgggtccaagctgcagtccatgagcaataacagactaccccagatactgcagtttacgcagtgcttagtaaatgagatttgtggaactaagttattagttacctgaggcttcttaagaaagtcttcttttttgaccagttgatgtgaaagagggagcatgtgacacagccagtatggtggagtgctagggttatcctgtttacaataaatcgcctgaatttca

SEQ ID NO: 447154 - DNA, 2519 bp, Homo sapiens
tggcgcagggccggctcgaagcgcaagcaggaagcgtttgcggtgatcccggcgactgcgctggctaatgcggtaccggctagcgtggcttctgcaccccgcactgcccagcaccttccgctcagtcctcggcgcccgcctgccgcctccggagcgcctgtgtggtttccaaaaaaagacttacagcaaaatgaataatccagccatcaagagaataggaaatcacattaccaagtctcctgaagacaagcgagaatatcgagggctagagctggccaatggtatcaaagtacttcttatcagtgatcccaccacggataagtcatcagcagcacttgatgtgcacataggttcattgtcggatcctccaaatattgctggcttaagtcatttttgtgaacatatgctttttttgggaacaaagaaataccctaaagaaaatgaatacagccagtttctcagtgagcatgcaggaagttcaaatgcctttactagtggagagcataccaattactattttgatgtttctcatgaacacctagaaggtgccctagacaggtttgcacagttttttctgtgccccttgttcgatgaaagttgcaaagacagagaggtgaatgcagttgattcagaacatgagaagaatgtgatgaatgatgcctggagactctttcaattggaaaaagctacagggaatcctaaacaccccttcagtaaatttgggacaggtaacaaatatactctggagactagaccaaaccaagaaggcattgatgtaagacaagagctactgaaattccattctgcttactattcatccaacttaatggctgtttgtgttttaggtcgagaatctttagatgacttgactaatctggtggtaaagttattttctgaagtagagaacaaaaatgttccattgccagaatttcctgaacaccctttccaagaagaacatcttaaacaactttacaaaatagtacccattaaagatattaggaatctctatgtgacatttcccatacctgaccttcagaaatactacaaatcaaatcctggtcattatcttggtcatctcattgggcatgaaggtcctggaagtctgttatcagaacttaagtcaaagggctgggttaatactcttgttggtgggcagaaggaaggagcccgaggttttatgttttttatcattaatgtggacttgaccgaggaaggattattacatgttgaagatataattttgcacatgtttcaatacattcagaagttacgtgcagaaggacctcaagaatgggttttccaagagtgcaaggacttgaatgctgttgcttttaggtttaaagacaaagagaggccacggggctatacatctaagattgcaggaatattgcattattatcccctagaagaggtgctcacagcggaatatttactggaagaatttagacctgacttaatagagatggttctcgataaactcagaccagaaaatgtccgggttgccatagtttctaaatcttttgaaggaaaaactgatcgcacagaagagtggtatggaacccagtacaaacaagaagctataccggatgaagtcatcaagaaatggcaaaatgctgacctgaatgggaaatttaaacttcctacaaagaatgaatttattcctacgaattttgagattttaccgttagaaaaagaggcgacaccataccctgctcttattaaggatacagctatgagcaaactttggttcaaacaagatgataagttttttttgccgaaggcttgtctcaactttgaatttttcagcccatttgcttatgtggaccccttgcactgtaacatggcctatttgtaccttgagctcctcaaagactcactcaacgagtatgcatatgcagcagagctagcaggcttgagctatgatctccaaaataccatctatgggatgtatctttcagtgaaaggttacaatgacaagcagccaattttactaaagaagattattgagaaaatggctacctttgagattgatgaaaaaagatttgaaattatcaaagaagcatatatgcgatctcttaacaatttccgggctgaacagcctcaccagcatgccatgtactacctccgcttgctgatgactgaagtggcctggactaaagatgagttaaaagaagctctggatggtgagactttcgacttaaagcttaatgctttcttcatttttttcctaaattcattttggtttattctgatattgactgtttatacttttaaataacttgtagttctattaaagctggctgtgtatatgttttataaaaacagtggtgggcaggatggctatagttaacagtaacatatacttttaaataggtagaaggaagatattgaacattcccaacccaaacaaatgataaataaacttgagatgatggatatgcttagtaccctgatgtgatcactatacattatatgtatatataataacattatatactctatgaatatctacaattatt

SEQ ID NO: 447155 - DNA, 3087 bp, Homo sapiens
acaaaaaagcttttacgaggtatcagcacttttctttcattagggggaaggcgtgaggaaagtaccaaacagcagcggagttttaaactttaaatagacaggtctgagtgcctgaacttgccttttcattttacttcatcctccaaggagttcaatcacttggcgtgacttcactacttttaagcaaaagagtggtgcccaggcaacatgggtgactggagcgccttaggcaaactccttgacaaggttcaagcctactcaactgctggagggaaggtgtggctgtcagtacttttcattttccgaatcctgctgctggggacagcggttgagtcagcctggggagatgagcagtctgcctttcgttgtaacactcagcaacctggttgtgaaaatgtctgctatgacaagtctttcccaatctctcatgtgcgcttctgggtcctgcagatcatatttgtgtctgtacccacactcttgtacctggctcatgtgttctatgtgatgcgaaaggaagagaaactgaacaagaaagaggaagaactcaaggttgcccaaactgatggtgtcaatgtggacatgcacttgaagcagattgagataaagaagttcaagtacggtattgaagagcatggtaaggtgaaaatgcgaggggggttgctgcgaacctacatcatcagtatcctcttcaagtctatctttgaggtggccttcttgctgatccagtggtacatctatggattcagcttgagtgctgtttacacttgcaaaagagatccctgcccacatcaggtggactgtttcctctctcgccccacggagaaaaccatcttcatcatcttcatgctggtggtgtccttggtgtccctggccttgaatatcattgaactcttctatgttttcttcaagggcgttaaggatcgggttaagggaaagagcgacccttaccatgcgaccagtggtgcgctgagccctgccaaagactgtgggtctcaaaaatatgcttatttcaatggctgctcctcaccaaccgctcccctctcgcctatgtctcctcctgggtacaagctggttactggcgacagaaacaattcttcttgccgcaattacaacaagcaagcaagtgagcaaaactgggctaattacagtgcagaacaaaatcgaatggggcaggcgggaagcaccatctctaactcccatgcacagccttttgatttccccgatgataaccagaattctaaaaaactagctgctggacatgaattacagccactagccattgtggaccagcgaccttcaagcagagccagcagtcgtgccagcagcagacctcggcctgatgacctggagatctagatacaggcttgaaagcatcaagattccactcaattgtggagaagaaaaaaggtgctgtagaaagtgcaccaggtgttaattttgatccggtggaggtggtactcaacagccttattcatgaggcttagaaaacacaaagacattagaatacctaggttcactgggggtgtatggggtagatgggtggagagggaggggataagagaggtgcatgttggtatttaaagtagtggattcaaagaacttagattataaataagagttccattaggtgatacatagataagggctttttctccccgcaaacacccctaagaatggttctgtgtatgtgaatgagcgggtggtaattgtggctaaatatttttgttttaccaagaaactgaaataattctggccaggaataaatacttcctgaacatcttaggtcttttcaacaagaaaaagacagaggattgtccttaagtccctgctaaaacattccattgttaaaatttgcactttgaaggtaagctttctaggcctgaccctccaggtgtcaatggacttgtgctactatatttttttattcttggtatcagtttaaaattcagacaaggcccacagaataagattttccatgcatttgcaaatacgtatattctttttccatccacttgcacaatatcattaccatcactttttcatcattcctcagctactactcacattcatttaatggtttctgtaaacatttttaagacagttgggatgtcacttaacattttttttttgagctaaagtcagggaatcaagccatgcttaatatttaacaatcacttatatgtgtgtcgaagagtttgttttgtttgtcatgtattggtacaagcagatacagtataaactcacaaacacagatttgaaaataatgcacatatggtgttcaaatttgaacctttctcatggatttttgtggtgtgggccaatatggtgtttacattatataattcctgctgtggcaagtaaagcacactttttttttctcctaaaatgtttttccctgtgtatcctattatggatactggttttgttaattatgattctttattttctctcctttttttaggatatagcagtaatgctattactgaaatgaatttcctttttctgaaatgtaatcattgatgcttgaatgatagaattttagtactgtaaacaggctttagtcattaatgtgagagacttagaaaaaatgcttagagtggactattaaatgtgcctaaatgaattttgcagtaactggtattcttgggttttcctacttaatacacagtaattcagaacttgtattctattatgagtttagcagtcttttggagtgaccagcaactttgatgtttgcactaagattttatttggaatgcaagagaggttgaaagaggattcagtagtacacatacaactaatttatttgaactatatgttgaagacatctaccagtttctccaaatgccttttttaaaactcatcacagaagattggtgaaaatgctgagtatgacacttttcttcttgcatgcatgtcagctacataaacagttttgtacaatgaaaattactaatttgtttgacattccatgttaaactacggtcatgttcagcttcattgcatgtaatgtagacctagtccatcagatcatgtgttctggagagtgttctttattcaataaagttttaatttagtataaacata

SEQ ID NO: 447156 - DNA, 3571 bp, Homo sapiens
acaaaaaagcttttacgaggtatcagcacttttctttcattagggggaaggcgtgaggaaagtaccaaacagcagcggagttttaaactttaaatagacaggtctgagtgcctgaacttgccttttcattttacttcatcctccaaggagttcaatcacttggcgtgacttcactacttttaagcaaaagagtggtgcccaggcaacatgggtgactggagcgccttaggcaaactccttgacaaggttcaagcctactcaactgctggagggaaggtgtggctgtcagtacttttcattttccgaatcctgctgctggggacagcggttgagtcagcctggggagatgagcagtctgcctttcgttgtaacactcagcaacctggttgtgaaaatgtctgctatgacaagtctttcccaatctctcatgtgcgcttctgggtcctgcagatcatatttgtgtctgtacccacactcttgtacctggctcatgtgttctatgtgatgcgaaaggaagagaaactgaacaagaaagaggaagaactcaaggttgcccaaactgatggtgtcaatgtggacatgcacttgaagcagattgagataaagaagttcaagtacggtattgaagagcatggtaaggtgaaaatgcgaggggggttgctgcgaacctacatcatcagtatcctcttcaagtctatctttgaggtggccttcttgctgatccagtggtacatctatggattcagcttgagtgctgtttacacttgcaaaagagatccctgcccacatcaggtggactgtttcctctctcgccccacggagaaaaccatcttcatcatcttcatgctggtggtgtccttggtgtccctggccttgaatatcattgaactcttctatgttttcttcaagggcgttaaggatcgggttaagggaaagagcgacccttaccatgcgaccagtggtgcgctgagccctgccaaagactgtgggtctcaaaaatatgcttatttcaatggctgctcctcaccaaccgctcccctctcgcctatgtctcctcctgggtacaagctggttactggcgacagaaacaattcttcttgccgcaattacaacaagcaagcaagtgagcaaaactgggctaattacagtgcagaacaaaatcgaatggggcaggcgggaagcaccatctctaactcccatgcacagccttttgatttccccgatgataaccagaattctaaaaaactagctgctggacatgaattacagccactagccattgtggaccagcgaccttcaagcagagccagcagtcgtgccagcagcagacctcggcctgatgacctggagatctagatacaggcttgaaagcatcaagattccactcaattgtggagaagaaaaaaggtgctgtagaaagtgcaccaggtgttaattttgatccggtggaggtggtactcaacagccttattcatgaggcttagaaaacacaaagacattagaatacctaggttcactgggggtgtatggggtagatgggtggagagggaggggataagagaggtgcatgttggtatttaaagtagtggattcaaagaacttagattataaataagagttccattaggtgatacatagataagggctttttctccccgcaaacacccctaagaatggttctgtgtatgtgaatgagcgggtggtaattgtggctaaatatttttgttttaccaagaaactgaaataattctggccaggaataaatacttcctgaacatcttaggtcttttcaacaagaaaaagacagaggattgtccttaagtccctgctaaaacattccattgttaaaatttgcactttgaaggtaagctttctaggcctgaccctccaggtgtcaatggacttgtgctactatatttttttattcttggtatcagtttaaaattcagacaaggcccacagaataagattttccatgcatttgcaaatacgtatattctttttccatccacttgcacaatatcattaccatcactttttcatcattcctcagctactactcacattcatttaatggtttctgtaaacatttttaagacagttgggatgtcacttaacattttttttttgagctaaagtcagggaatcaagccatgcttaatatttaacaatcacttatatgtgtgtcgaagagtttgttttgtttgtcatgtattggtacaagcagatacagtataaactcacaaacacagatttgaaaataatgcacatatggtgttcaaatttgaacctttctcatggatttttgtggtgtgggccaatatggtgtttacattatataattcctgctgtggcaagtaaagcacactttttttttctcctaaaatgtttttccctgtgtatcctattatggatactggttttgttaattatgattctttattttctctcctttttttaggatatagcagtaatgctattactgaaatgaatttcctttttctgaaatgtaatcattgatgcttgaatgatagaattttagtactgtaaacaggctttagtcattaatgtgagagacttagaaaaaatgcttagagtggactattaaatgtgcctaaatgaattttgcagtaactggtattcttgggttttcctacttaatacacagtaattcagaacttgtattctattatgagtttagcagtcttttggagtgaccagcaactttgatgtttgcactaagattttatttggaatgcaagagaggttgaaagaggattcagtagtacacatacaactaatttatttgaactatatgttgaagacatctaccagtttctccaaatgccttttttaaaactcatcacagaagattggtgaaaatgctgagtatgacacttttcttcttgcatgcatgtcagctacataaacagttttgtacaatgaaaattactaatttgtttgacattccatgttaaactacggtcatgttcagcttcattgcatgtaatgtagacctagtccatcagatcatgtgttctggagagtgttctttattcaataaagttttaatttagtataaacataaaaaaaaaaaaaaaaaaaaaaaaaaaaaaaaaaaaaagggggggcgccgtccaaaaatgatactcccccgggggggcccactacgtgacgcgtttacaccacgcttttctcgtggtaaaaagggggccccaaaaagaggagccggtattaaaaacgcaaggcacggggccgccggcttataacaaacggctcgggcaggggaacaccggcctacccgtggggcactccctggggggaagggacccccctaaacttcgcggggggggggggacccatacgtggggcacaaaccataccccctcacgaggagaattttaaaggcaccccaagcgggcgaaacttaatacacattttccaaggcgtggtccaacgcgggtggtcacccccaacgcggcaataatgccgcgccggcatagaaaagtcggcctaagcggggcatgtacttgggcaccatatttttaccgggaccagggaataaacacga

SEQ ID NO: 447157 - DNA, 3118 bp, Homo sapiens
acaaaaaagcttttacgaggtatcagcacttttctttcattagggggaaggcgtgaggaaagtaccaaacagcagcggagttttaaactttaaatagacaggtctgagtgcctgaacttgccttttcattttacttcatcctccaaggagttcaatcacttggcgtgacttcactacttttaagcaaaagagtggtgcccaggcaacatgggtgactggagcgccttaggcaaactccttgacaaggttcaagcctactcaactgctggagggaaggtgtggctgtcagtacttttcattttccgaatcctgctgctggggacagcggttgagtcagcctggggagatgagcagtctgcctttcgttgtaacactcagcaacctggttgtgaaaatgtctgctatgacaagtctttcccaatctctcatgtgcgcttctgggtcctgcagatcatatttgtgtctgtacccacactcttgtacctggctcatgtgttctatgtgatgcgaaaggaagagaaactgaacaagaaagaggaagaactcaaggttgcccaaactgatggtgtcaatgtggacatgcacttgaagcagattgagataaagaagttcaagtacggtattgaagagcatggtaaggtgaaaatgcgaggggggttgctgcgaacctacatcatcagtatcctcttcaagtctatctttgaggtggccttcttgctgatccagtggtacatctatggattcagcttgagtgctgtttacacttgcaaaagagatccctgcccacatcaggtggactgtttcctctctcgccccacggagaaaaccatcttcatcatcttcatgctggtggtgtccttggtgtccctggccttgaatatcattgaactcttctatgttttcttcaagggcgttaaggatcgggttaagggaaagagcgacccttaccatgcgaccagtggtgcgctgagccctgccaaagactgtgggtctcaaaaatatgcttatttcaatggctgctcctcaccaaccgctcccctctcgcctatgtctcctcctgggtacaagctggttactggcgacagaaacaattcttcttgccgcaattacaacaagcaagcaagtgagcaaaactgggctaattacagtgcagaacaaaatcgaatggggcaggcgggaagcaccatctctaactcccatgcacagccttttgatttccccgatgataaccagaattctaaaaaactagctgctggacatgaattacagccactagccattgtggaccagcgaccttcaagcagagccagcagtcgtgccagcagcagacctcggcctgatgacctggagatctagatacaggcttgaaagcatcaagattccactcaattgtggagaagaaaaaaggtgctgtagaaagtgcaccaggtgttaattttgatccggtggaggtggtactcaacagccttattcatgaggcttagaaaacacaaagacattagaatacctaggttcactgggggtgtatggggtagatgggtggagagggaggggataagagaggtgcatgttggtatttaaagtagtggattcaaagaacttagattataaataagagttccattaggtgatacatagataagggctttttctccccgcaaacacccctaagaatggttctgtgtatgtgaatgagcgggtggtaattgtggctaaatatttttgttttaccaagaaactgaaataattctggccaggaataaatacttcctgaacatcttaggtcttttcaacaagaaaaagacagaggattgtccttaagtccctgctaaaacattccattgttaaaatttgcactttgaaggtaagctttctaggcctgaccctccaggtgtcaatggacttgtgctactatatttttttattcttggtatcagtttaaaattcagacaaggcccacagaataagattttccatgcatttgcaaatacgtatattctttttccatccacttgcacaatatcattaccatcactttttcatcattcctcagctactactcacattcatttaatggtttctgtaaacatttttaagacagttgggatgtcacttaacattttttttttgagctaaagtcagggaatcaagccatgcttaatatttaacaatcacttatatgtgtgtcgaagagtttgttttgtttgtcatgtattggtacaagcagatacagtataaactcacaaacacagatttgaaaataatgcacatatggtgttcaaatttgaacctttctcatggatttttgtggtgtgggccaatatggtgtttacattatataattcctgctgtggcaagtaaagcacactttttttttctcctaaaatgtttttccctgtgtatcctattatggatactggttttgttaattatgattctttattttctctcctttttttaggatatagcagtaatgctattactgaaatgaatttcctttttctgaaatgtaatcattgatgcttgaatgatagaattttagtactgtaaacaggctttagtcattaatgtgagagacttagaaaaaatgcttagagtggactattaaatgtgcctaaatgaattttgcagtaactggtattcttgggttttcctacttaatacacagtaattcagaacttgtattctattatgagtttagcagtcttttggagtgaccagcaactttgatgtttgcactaagattttatttggaatgcaagagaggttgaaagaggattcagtagtacacatacaactaatttatttgaactatatgttgaagacatctaccagtttctccaaatgccttttttaaaactcatcacagaagattggtgaaaatgctgagtatgacacttttcttcttgcatgcatgtcagctacataaacagttttgtacaatgaaaattactaatttgtttgacattccatgttaaactacggtcatgttcagcttcattgcatgtaatgtagacctagtccatcagatcatgtgttctggagagtgttctttattcaataaagttttaatttagtataaacataaaaaaaaaaaagaactagtctcgaggggggg

SEQ ID NO: 447158 - DNA, 3102 bp, Homo sapiens
acaaaaaagcttttacgaggtatcagcacttttctttcattagggggaaggcgtgaggaaagtaccaaacagcagcggagttttaaactttaaatagacaggtctgagtgcctgaacttgccttttcattttacttcatcctccaaggagttcaatcacttggcgtgacttcactacttttaagcaaaagagtggtgcccaggcaacatgggtgactggagcgccttaggcaaactccttgacaaggttcaagcctactcaactgctggagggaaggtgtggctgtcagtacttttcattttccgaatcctgctgctggggacagcggttgagtcagcctggggagatgagcagtctgcctttcgttgtaacactcagcaacctggttgtgaaaatgtctgctatgacaagtctttcccaatctctcatgtgcgcttctgggtcctgcagatcatatttgtgtctgtacccacactcttgtacctggctcatgtgttctatgtgatgcgaaaggaagagaaactgaacaagaaagaggaagaactcaaggttgcccaaactgatggtgtcaatgtggacatgcacttgaagcagattgagataaagaagttcaagtacggtattgaagagcatggtaaggtgaaaatgcgaggggggttgctgcgaacctacatcatcagtatcctcttcaagtctatctttgaggtggccttcttgctgatccagtggtacatctatggattcagcttgagtgctgtttacacttgcaaaagagatccctgcccacatcaggtggactgtttcctctctcgccccacggagaaaaccatcttcatcatcttcatgctggtggtgtccttggtgtccctggccttgaatatcattgaactcttctatgttttcttcaagggcgttaaggatcgggttaagggaaagagcgacccttaccatgcgaccagtggtgcgctgagccctgccaaagactgtgggtctcaaaaatatgcttatttcaatggctgctcctcaccaaccgctcccctctcgcctatgtctcctcctgggtacaagctggttactggcgacagaaacaattcttcttgccgcaattacaacaagcaagcaagtgagcaaaactgggctaattacagtgcagaacaaaatcgaatggggcaggcgggaagcaccatctctaactcccatgcacagccttttgatttccccgatgataaccagaattctaaaaaactagctgctggacatgaattacagccactagccattgtggaccagcgaccttcaagcagagccagcagtcgtgccagcagcagacctcggcctgatgacctggagatctagatacaggcttgaaagcatcaagattccactcaattgtggagaagaaaaaaggtgctgtagaaagtgcaccaggtgttaattttgatccggtggaggtggtactcaacagccttattcatgaggcttagaaaacacaaagacattagaatacctaggttcactgggggtgtatggggtagatgggtggagagggaggggataagagaggtgcatgttggtatttaaagtagtggattcaaagaacttagattataaataagagttccattaggtgatacatagataagggctttttctccccgcaaacacccctaagaatggttctgtgtatgtgaatgagcgggtggtaattgtggctaaatatttttgttttaccaagaaactgaaataattctggccaggaataaatacttcctgaacatcttaggtcttttcaacaagaaaaagacagaggattgtccttaagtccctgctaaaacattccattgttaaaatttgcactttgaaggtaagctttctaggcctgaccctccaggtgtcaatggacttgtgctactatatttttttattcttggtatcagtttaaaattcagacaaggcccacagaataagattttccatgcatttgcaaatacgtatattctttttccatccacttgcacaatatcattaccatcactttttcatcattcctcagctactactcacattcatttaatggtttctgtaaacatttttaagacagttgggatgtcacttaacattttttttttgagctaaagtcagggaatcaagccatgcttaatatttaacaatcacttatatgtgtgtcgaagagtttgttttgtttgtcatgtattggtacaagcagatacagtataaactcacaaacacagatttgaaaataatgcacatatggtgttcaaatttgaacctttctcatggatttttgtggtgtgggccaatatggtgtttacattatataattcctgctgtggcaagtaaagcacactttttttttctcctaaaatgtttttccctgtgtatcctattatggatactggttttgttaattatgattctttattttctctcctttttttaggatatagcagtaatgctattactgaaatgaatttcctttttctgaaatgtaatcattgatgcttgaatgatagaattttagtactgtaaacaggctttagtcattaatgtgagagacttagaaaaaatgcttagagtggactattaaatgtgcctaaatgaattttgcagtaactggtattcttgggttttcctacttaatacacagtaattcagaacttgtattctattatgagtttagcagtcttttggagtgaccagcaactttgatgtttgcactaagattttatttggaatgcaagagaggttgaaagaggattcagtagtacacatacaactaatttatttgaactatatgttgaagacatctaccagtttctccaaatgccttttttaaaactcatcacagaagattggtgaaaatgctgagtatgacacttttcttcttgcatgcatgtcagctacataaacagttttgtacaatgaaatactattgttgcatccagtaactacggctgtcagctctgtgtgtgtgaacacacccacgactggtgggagggtttcaccagtggttttcaaaaaaaaaatggggcgccggaaaaaatgggcggaaagattacgaggcacgcgcattattacagg

SEQ ID NO: 447159 - DNA, 1317 bp, Homo sapiens
cgaggattacgaaaccatagaatgcagaaaaagacagaggattgtccttaagtccctgctaaaacattccattgttaaaatttgcactttgaaggtaagctttctaggcctgaccctccaggtgtcaatggacttgtgctactatatttttttattcttggtatcagtttaaaattcagacaaggcccacagaataagattttccatgcatttgcaaatacgtatattctttttccatccacttgcacaatatcattaccatcactttttcatcattcctcagctactactcacattcatttaatggtttctgtaaacatttttaagacagttgggatgtcacttaacattttttttttgagctaaagtcagggaatcaagccatgcttaatatttaacaatcacttatatgtgtgtcgaagagtttgttttgtttgtcatgtattggtacaagcagatacagtataaactcacaaacacagatttgaaaataatgcacatatggtgttcaaatttgaacctttctcatggatttttgtggtgtgggccaatatggtgtttacattatataattcctgctgtggcaagtaaagcacactttttttttctcctaaaatgtttttccctgtgtatcctattatggatactggttttgttaattatgattctttattttctctcctttttttaggatatagcagtaatgctattactgaaatgaatttcctttttctgaaatgtaatcattgatgcttgaatgatagaattttagtactgtaaacaggctttagtcattaatgtgagagacttagaaaaaatgcttagagtggactattaaatgtgcctaaatgaattttgcagtaactggtattcttgggttttcctacttaatacacagtaattcagaacttgtattctattatgagtttagcagtcttttggagtgaccagcaactttgatgtttgcactaagattttatttggaatgcaagagaggttgaaagaggattcagtagtacacatacaactaatttatttgaactatatgttgaagacatctaccagtttctccaaatgccttttttaaaactcatcacagaagattggtgaaaatgctgagtatgacacttttcttcttgcatgcatgtcagctacataaacagttttgtacaatgaaaattactaatttgtttgacattccatgttaaactacggtcatgttcagcttcattgcatgtaatgtagacctagtccatcagatcatgtgttctggagagtgttctttattcaataaagttttaatttagtataaacata

SEQ ID NO: 447160 - DNA, 365 bp, Homo sapiens
ggtagatgtcttcaacatatagttcaaataaattagtgtatgtgtactactgaatcctctttcaacctctctgcattccaaataaaatcttagtgcaaacatcaaagtgctggtttctccaaatgccttttttaaaactcatcacagaagattggtgaaaatgctgagtatgacacttttcttcttgcatgcatgtcagctacataaacagttttgtacaatgaaaattactaatttgtttgacattccatgttaaactacggtcatgttcagcttcattgcatgtaatgtagacctagtccatcagatcatgtgttctggagagtgttctttattcaataaagttttaatttagtataaacata

SEQ ID NO: 447161 - DNA, 3033 bp, Homo sapiens
acaaaaaagcttttacgaggtatcagcacttttctttcattagggggaaggcgtgaggaaagtaccaaacagcagcggagttttaaactttaaatagacaggtctgagtgcctgaacttgccttttcattttacttcatcctccaaggagttcaatcacttggcgtgacttcactacttttaagcaaaagagtggtgcccaggcaacatgggtgactggagcgccttaggcaaactccttgacaaggttcaagcctactcaactgctggagggaaggtgtggctgtcagtacttttcattttccgaatcctgctgctggggacagcggttgagtcagcctggggagatgagcagtctgcctttcgttgtaacactcagcaacctggttgtgaaaatgtctgctatgacaagtctttcccaatctctcatgtgcgcttctgggtcctgcagatcatatttgtgtctgtacccacactcttgtacctggctcatgtgttctatgtgatgcgaaaggaagagaaactgaacaagaaagaggaagaactcaaggttgcccaaactgatggtgtcaatgtggacatgcacttgaagcagattgagataaagaagttcaagtacggtattgaagagcatggtaaggtgaaaatgcgaggggggttgctgcgaacctacatcatcagtatcctcttcaagtctatctttgaggtggccttcttgctgatccagtggtacatctatggattcagcttgagtgctgtttacacttgcaaaagagatccctgcccacatcaggtggactgtttcctctctcgccccacggagaaaaccatcttcatcatcttcatgctggtggtgtccttggtgtccctggccttgaatatcattgaactcttctatgttttcttcaagggcgttaaggatcgggttaagggaaagagcgacccttaccatgcgaccagtggtgcgctgagccctgccaaagactgtgggtctcaaaaatatgcttatttcaatggctgctcctcaccaaccgctcccctctcgcctatgtctcctcctgggtacaagctggttactggcgacagaaacaattcttcttgccgcaattacaacaagcaagcaagtgagcaaaactgggctaattacagtgcagaacaaaatcgaatggggcaggcgggaagcaccatctctaactcccatgcacagccttttgatttccccgatgataaccagaattctaaaaaactagctgctggacatgaattacagccactagccattgtggaccagcgaccttcaagcagagccagcagtcgtgccagcagcagacctcggcctgatgacctggagatctagatacaggcttgaaagcatcaagattccactcaattgtggagaagaaaaaaggtgctgtagaaagtgcaccaggtgttaattttgatccggtggaggtggtactcaacagccttattcatgaggcttagaaaacacaaagacattagaatacctaggttcactgggggtgtatggggtagatgggtggagagggaggggataagagaggtgcatgttggtatttaaagtagtggattcaaagaacttagattataaataagagttccattaggtgatacatagataagggctttttctccccgcaaacacccctaagaatggttctgtgtatgtgaatgagcgggtggtaattgtggctaaatatttttgttttaccaagaaactgaaataattctggccaggaataaatacttcctgaacatcttaggtcttttcaacaagaaaaagacagaggattgtccttaagtccctgctaaaacattccattgttaaaatttgcactttgaaggtaagctttctaggcctgaccctccaggtgtcaatggacttgtgctactatatttttttattcttggtatcagttatattctttttccatccacttgcacaatatcattaccatcactttttcatcattcctcagctactactcacattcatttaatggtttctgtaaacatttttaagacagttgggatgtcacttaacattttttttttgagctaaagtcagggaatcaagccatgcttaatatttaacaatcacttatatgtgtgtcgaagagtttgttttgtttgtcatgtattggtacaagcagatacagtataaactcacaaacacagatttgaaaataatgcacatatggtgttcaaatttgaacctttctcatggatttttgtggtgtgggccaatatggtgtttacattatataattcctgctgtggcaagtaaagcacactttttttttctcctaaaatgtttttccctgtgtatcctattatggatactggttttgttaattatgattctttattttctctcctttttttaggatatagcagtaatgctattactgaaatgaatttcctttttctgaaatgtaatcattgatgcttgaatgatagaattttagtactgtaaacaggctttagtcattaatgtgagagacttagaaaaaatgcttagagtggactattaaatgtgcctaaatgaattttgcagtaactggtattcttgggttttcctacttaatacacagtaattcagaacttgtattctattatgagtttagcagtcttttggagtgaccagcaactttgatgtttgcactaagattttatttggaatgcaagagaggttgaaagaggattcagtagtacacatacaactaatttatttgaactatatgttgaagacatctaccagtttctccaaatgccttttttaaaactcatcacagaagattggtgaaaatgctgagtatgacacttttcttcttgcatgcatgtcagctacataaacagttttgtacaatgaaaattactaatttgtttgacattccatgttaaactacggtcatgttcagcttcattgcatgtaatgtagacctagtccatcagatcatgtgttctggagagtgttctttattcaataaagttttaatttagtataaacata

SEQ ID NO: 447162 - DNA, 3253 bp, Homo sapiens
  misc_feature (3244)..(3244): n is a, c, g, or t
acaaaaaagcttttacgaggtatcagcacttttctttcattagggggaaggcgtgaggaaagtaccaaacagcagcggagttttaaactttaaatagacaggtctgagtgcctgaacttgccttttcattttacttcatcctccaaggagttcaatcacttggcgtgacttcactacttttaagcaaaagagtggtgcccaggcaacatgggtgactggagcgccttaggcaaactccttgacaaggttcaagcctactcaactgctggagggaaggtgtggctgtcagtacttttcattttccgaatcctgctgctggggacagcggttgagtcagcctggggagatgagcagtctgcctttcgttgtaacactcagcaacctggttgtgaaaatgtctgctatgacaagtctttcccaatctctcatgtgcgcttctgggtcctgcagatcatatttgtgtctgtacccacactcttgtacctggctcatgtgttctatgtgatgcgaaaggaagagaaactgaacaagaaagaggaagaactcaaggttgcccaaactgatggtgtcaatgtggacatgcacttgaagcagattgagataaagaagttcaagtacggtattgaagagcatggtaaggtgaaaatgcgaggggggttgctgcgaacctacatcatcagtatcctcttcaagtctatctttgaggtggccttcttgctgatccagtggtacatctatggattcagcttgagtgctgtttacacttgcaaaagagatccctgcccacatcaggtggactgtttcctctctcgccccacggagaaaaccatcttcatcatcttcatgctggtggtgtccttggtgtccctggccttgaatatcattgaactcttctatgttttcttcaagggcgttaaggatcgggttaagggaaagagcgacccttaccatgcgaccagtggtgcgctgagccctgccaaagactgtgggtctcaaaaatatgcttatttcaatggctgctcctcaccaaccgctcccctctcgcctatgtctcctcctgggtacaagctggttactggcgacagaaacaattcttcttgccgcaattacaacaagcaagcaagtgagcaaaactgggctaattacagtgcagaacaaaatcgaatggggcaggcgggaagcaccatctctaactcccatgcacagccttttgatttccccgatgataaccagaattctaaaaaactagctgctggacatgaattacagccactagccattgtggaccagcgaccttcaagcagagccagcagtcgtgccagcagcagacctcggcctgatgacctggagatctagatacaggcttgaaagcatcaagattccactcaattgtggagaagaaaaaaggtgctgtagaaagtgcaccaggtgttaattttgatccggtggaggtggtactcaacagccttattcatgaggcttagaaaacacaaagacattagaatacctaggttcactgggggtgtatggggtagatgggtggagagggaggggataagagaggtgcatgttggtatttaaagtagtggattcaaagaacttagattataaataagagttccattaggtgatacatagataagggctttttctccccgcaaacacccctaagaatggttctgtgtatgtgaatgagcgggtggtaattgtggctaaatatttttgttttaccaagaaactgaaataattctggccaggaataaatacttcctgaacatcttaggtcttttcaacaagaaaaagacagaggattgtccttaagtccctgctaaaacattccattgttaaaatttgcactttgaaggtaagctttctaggcctgaccctccaggtgtcaatggacttgtgctactatatttttttattcttggtatcagtttaaaattcagacaaggcccacagaataagattttccatgcatttgcaaatacgtatattctttttccatccacttgcacaatatcattaccatcactttttcatcattcctcagctactactcacattcatttaatggtttctgtaaacatttttaagacagttgggatgtcacttaacattttttttttgagctaaagtcagggaatcaagccatgcttaatatttaacaatcacttatatgtgtgtcgaagagtttgttttgtttgtcatgtattggtacaagcagatacagtataaactcacaaacacagatttgaaaataatgcacatatggtgttcaaatttgaacctttctcatggatttttgtggtgtgggccaatatggtgtttacattatataattcctgctgtggcaagtaaagcacactttttttttctcctaaaatgtttttccctgtgtatcctattatggatactggttttgttaattatgattctttattttctctcctttttttaggatatagcagtaatgctattactgaaatgaatttcctttttctgaaatgtaatcattgatgcttgaatgatagaattttagtactgtaaacaggctttagtcattaatgtgagagacttagaaaaaatgcttagagtggactattaaatgtgcctaaatgaattttgcagtaactggtattcttgggttttcctacttaatacacagtaattcagaacttgtattctattatgagtttagcagtcttttggagtgaccagcaactttgatgtttgcactaagattttatttggaatgcaagagaggttgaaagaggattcagtagtacacatacaactaatttatttgaactatatgttgaagacatctaccagtttctccaaatgccttttttaaaactcatcacagaagattggtgaaaatgctgagtatgacacttttcttcttgcatgcatgtcagctacataaacagttttgtacaatgaaaattactaatttgtttgacattccatgttaaactacggtcatgttcagcttcattgcatgtaatgtagacctagtccatcagatcatgtgttctggagagtgttctttattcaataaagttttaatttagtataaacataaaaaaaaaaaaaaaaaaaaaactcggaaatacccagtaaaatgttgaagaaggatggaggatttcttcatatctgacgtttctgaaaccctttgtgtctgctgttgtgtgaagattgacatttaccatgattttccttagttactgcagaacatagngaaaaataa

SEQ ID NO: 447163 - DNA, 3033 bp, Homo sapiens
acaaaaaagcttttacgaggtatcagcacttttctttcattagggggaaggcgtgaggaaagtaccaaacagcagcggagttttaaactttaaatagacaggtctgagtgcctgaacttgccttttcattttacttcatcctccaaggagttcaatcacttggcgtgacttcactacttttaagcaaaagagtggtgcccaggcaacatgggtgactggagcgccttaggcaaactccttgacaaggttcaagcctactcaactgctggagggaaggtgtggctgtcagtacttttcattttccgaatcctgctgctggggacagcggttgagtcagcctggggagatgagcagtctgcctttcgttgtaacactcagcaacctggttgtgaaaatgtctgctatgacaagtctttcccaatctctcatgtgcgcttctgggtcctgcagatcatatttgtgtctgtacccacactcttgtacctggctcatgtgttctatgtgatgcgaaaggaagagaaactgaacaagaaagaggaagaactcaaggttgcccaaactgatggtgtcaatgtggacatgcacttgaagcagattgagataaagaagttcaagtacggtattgaagagcatggtaaggtgaaaatgcgaggggggttgctgcgaacctacatcatcagtatcctcttcaagtctatctttgaggtggccttcttgctgatccagtggtacatctatggattcagcttgagtgctgtttacacttgcaaaagagatccctgcccacatcaggtggactgtttcctctctcgccccacggagaaaaccatcttcatcatcttcatgctggtggtgtccttggtgtccctggccttgaatatcattgaactcttctatgttttcttcaagggcgttaaggatcgggttaagggaaagagcgacccttaccatgcgaccagtggtgcgctgagccctgccaaagactgtgggtctcaaaaatatgcttatttcaatggctgctcctcaccaaccgctcccctctcgcctatgtctcctcctgggtacaagctggttactggcgacagaaacaattcttcttgccgcaattacaacaagcaagcaagtgagcaaaactgggctaattacagtgcagaacaaaatcgaatggggcaggcgggaagcaccatctctaactcccatgcacagccttttgatttccccgatgataaccagaattctaaaaaactagctgctggacatgaattacagccactagccattgtggaccagcgaccttcaagcagagccagcagtcgtgccagcagcagacctcggcctgatgacctggagatctagatacaggcttgaaagcatcaagattccactcaattgtggagaagaaaaaaggtgctgtagaaagtgcaccaggtgttaattttgatccggtggaggtggtactcaacagccttattcatgaggcttagaaaacacaaagacattagaatacctaggttcactgggggtgtatggggtagatgggtggagagggaggggataagagaggtgcatgttggtatttaaagtagtggattcaaagaacttagattataaataagagttccattaggtgatacatagataagggctttttctccccgcaaacacccctaagaatggttctgtgtatgtgaatgagcgggtggtaattgtggctaaatatttttgttttaccaagaaactgaaataattctggccaggaataaatacttcctgaacatcttaggtcttttcaacaagaaaaagacagaggattgtccttaagtccctgctaaaacattccattgttaaaatttgcactttgaaggtaagctttctaggcctgaccctccaggtgtcaatggacttgtgctactatatttttttattcttggtatcagtttaaaattcagacaaggcccacagaataagattttccatgcatttgcaaatacgtatattctttttccatccacttgcacaatatcattaccatcactttttcatcattcctcagctactactcacattcatttaatggtttctgtaaacatttttaagacagttgggatgtcacttaacattttttttttgagctaaagtcagggaatcaagccatgcttaatatttaacaatcacttatatgtgtgtcgaagagtttgttttgtttgtcatgtattggtacaagcagatacagtataaactcacaaacacagatttgaaaataatgcacatatggtgttcaaatttgaacctttctcatggatttttgtggtgtgggccaatatggtgtttacattatataattcctgctgtggcaagtaaagcacactttttttttctcattctttattttctctcctttttttaggatatagcagtaatgctattactgaaatgaatttcctttttctgaaatgtaatcattgatgcttgaatgatagaattttagtactgtaaacaggctttagtcattaatgtgagagacttagaaaaaatgcttagagtggactattaaatgtgcctaaatgaattttgcagtaactggtattcttgggttttcctacttaatacacagtaattcagaacttgtattctattatgagtttagcagtcttttggagtgaccagcaactttgatgtttgcactaagattttatttggaatgcaagagaggttgaaagaggattcagtagtacacatacaactaatttatttgaactatatgttgaagacatctaccagtttctccaaatgccttttttaaaactcatcacagaagattggtgaaaatgctgagtatgacacttttcttcttgcatgcatgtcagctacataaacagttttgtacaatgaaaattactaatttgtttgacattccatgttaaactacggtcatgttcagcttcattgcatgtaatgtagacctagtccatcagatcatgtgttctggagagtgttctttattcaataaagttttaatttagtataaacata

SEQ ID NO: 447164 - DNA, 2721 bp, Homo sapiens
ttccggtgcgccgggcgcggacgcgggcacgcacacacgcaagcacgcctccacttaactcgcgccgccgcggcagctcgagtccaccagcagcgccgtccgcttgaccgagatgctgcgggcctgtcagttatcgggtgtgaccgccgccgcccagagttgtctctgtgggaagtttgtcctccgtccattgcgaccatgccgcagatactctacttcaggcagctctgggttgactactggcaaaattgctggagctggccttttgtttgttggtggaggtattggtggcactatcctatatgccaaatgggattcccatttccgggaaagtgtagagaaaaccataccttactcagacaaactcttcgagatggttcttggtcctgcagcttataatgttccattgccaaagaaatcgattcagtcgggtccactaaaaatctctagtgtatcagaagtaatgaaagaatctaaacagcctgcctcacaactccaaaaacaaaagggagatactccagcttcagcaacagcacctacagaagcggctcaaattatttctgcagcaggtgataccctgtcggtcccagcccctgcagttcagcctgaggaatctttaaaaactgatcaccctgaaattggtgaaggaaaacccacacctgcactttcagaagaagcatcctcatcttctataagggagcgaccacctgaagaagttgcagctcgccttgcacaacaggaaaaacaagaacaagttaaaattgagtctctagccaagagcttagaagatgctctgaggcaaactgcaagtgtcactctgcaggctattgcagctcagaatgctgcggtccaggctgtcaatgcacactccaacatattgaaagccgccatggacaattctgagattgcaggcgagaagaaatctgctcagtggcgcacagtggagggtgcattgaaggaacgcagaaaggcagtagatgaagctgccgatgcccttctcaaagccaaagaagagttagagaagatgaaaagtgtgattgaaaatgcaaagaaaaaagaggttgctggggccaagcctcatataactgctgcagagggtaaacttcacaacatgatagttgatctggataatgtggtcaaaaaggtccaagcagctcagtctgaggctaaggttgtatctcagtatcatgagctggtggtccaagctcgggatgactttaaacgagagctggacagtattactccagaagtccttcctgggtggaaaggaatgagtgtttcagacttagctgacaagctctctactgatgatctgaactccctcattgctcatgcacatcgtcgtattgatcagctgaacagagagctggcagaacagaaggccaccgaaaagcagcacatcacgttagccttggagaaacaaaagctggaagaaaagcgggcatttgactctgcagtagcaaaagcattagaacatcacagaagtgaaatacaggctgaacaggacagaaagatagaagaagtcagagatgccatggaaaatgaaatgagaacccagcttcgccgacaggcagctgcccacactgatcacttgcgagatgtccttagggtacaagaacaggaattgaagtctgaatttgagcagaacctgtctgagaaactctctgaacaagaattacaatttcgtcgtctcagtcaagagcaagttgacaactttactctggatataaatactgcctatgccagactcagaggaatcgaacaggctgttcagagccatgcagttgctgaagaggaagccagaaaagcccaccaactctggctttcagtggaggcattaaagtacagcatgaagacctcatctgcagaaacacctactatcccgctgggtagtgcagttgaggccatcaaagccaactgttctgataatgaattcacccaagctttaaccgcagctatccctccagagtccctgacccgtggggtgtacagtgaagagacccttagagcccgtttctatgctgttcaaaaactggcccgaagggtagcaatgattgatgaaaccagaaatagcttgtaccagtacttcctctcctacctacagtccctgctcctattcccacctcagcaactgaagccgcccccagagctctgccctgaggatataaacacatttaaattactgtcatatgcttcctattgcattgagcatggtgatctggagctagcagcaaagtttgtcaatcagctgaagggggaatccagacgagtggcacaggactggctgaaggaagcccgaatgaccctagaaacgaaacagatagtggaaatcctgacagcatatgccagcgccgtaggaataggaaccactcaggtgcagccagagtgaggtttaggaagattttcataaagtcatatttcatgtcaaaggaaatcagcagtgatagatgaagggttcgcagcgagagtcccggacttgtctagaaatgagcaggtttacaagtactgttctaaatgttaacacctgttgcatttatattctttccatttgctatcatgtcagtgaacgccaggagtgctttctttgcaacttgtgtaacattttctgttttttcaggttttactgatgaggcttgtgaggccaatcaaaataatgtttgtgatctctactactgttgattttgccctcggagcaaactgaataaagcaacaagatgaaaa

SEQ ID NO: 447165 - DNA, 924 bp, Homo sapiens
  misc_feature (879)..(879): n is a, c, g, or t
  misc_feature (914)..(914): n is a, c, g, or t
  misc_feature (918)..(918): n is a, c, g, or t
ttccggtgcgccgggcgcggacgcgggcacgcacacacgcaagcacgcctccacttaactcgcgccgccgcggcagctcgagtccaccagcagcgccgtccgcttgaccgagatgctgcgggcctgtcagttatcgggtgtgaccgccgccgcccagagttgtctctgtgggaagtttgtcctccgtccattgcgaccatgccgcagatactctacttcaggcagctctgggttgactactggcaaaattgctggagctggccttttgtttgttggtggaggtattggtggcactatcctatatgccaaatgggattcccatttccgggaaagtgtagagaaaaccataccttactcagacaaactcttcgagatggttcttggtcctgcagcttataatgttccattgccaaagaaatcgattcagtcgggtccactaaaaatctctagtgtatcagaagtaatgaaagaatctaaacagcctgcctcacaactccaaaaacaaaagggagatactccagcttcagcaacagcaggtgataccctgtcggtcccagcccctgcagttcagcctgaggaatctttaaaaactgatcaccctgaaattggtgaaggaaaacccacacctgcactttcagaagaagcatcctcatcttctataagggagcgaccacctgaagaagttgcagctcgccttgcacaacaggaaaaacaagaacaagttaaaattgagtctctagccaagagcttagaagatgctctgaggcaaactgcaagtgtcactctgcaggctattgcagctcagaatgctgcggtccaggctgtcaatgcacactccaacatattgaaagccgccatggacaattctgagaattgcanggcgaaaaaaaaaaatctggctccattgggcgccncaantgggaa

SEQ ID NO: 447166 - DNA, 491 bp, Homo sapiens
caaaatgtaaacaaatgaaggaatactacttctgtttcttggaatgtttatggtattttttgttcaatttaatcacataccctgtgtatttgctcaggtccaagcagctcagtctgaggctaaggttgtatctcagtatcatgagctggtggtccaagctcgggatgactttaaacgagagctggacagtattactccagaagtccttcctgggtggaaaggaatgagtgagtacaactgaagtaatgttttttttttgatgttttaaccactaatcaatgaatctaaacttgcttcatctccattgtagtccacatccctctggcatgcatgcatatctctttttgttacagcgttttattttaaccacagtcattacagatgacacagctgcaacactactcttgtagttttagctgtggtgaacatgagttccagctagtgtttaattccataatccgtgattggttctgttctgatatttgctactc

SEQ ID NO: 447167 - DNA, 403 bp, Homo sapiens
ctgttaacatctgttaaaaatatacaacccctttgacccaacaattcctcttctgaaaactatcccatagatattacactacggtgcttttcatttaaatggacagggatggatgttcattgctttgtttgtagcagcaaagcaaaacaaaacaggaaacaatttgaatgactatagaggagaagttgaccaaattatgggaaatcgttatatgaggatattatgcaactaaacagaatttcttgacctgaaagagaatgtccatgatatagtgttaaataaaaaaagagcaagttacaaggtaatttgtataatataaccctattttggtttgtttaaggaagttccatctccaaataaataaataaaacattgctcatggtaaaaatgacctctgacatgt

SEQ ID NO: 447168 - DNA, 2688 bp, Homo sapiens
ttccggtgcgccgggcgcggacgcgggcacgcacacacgcaagcacgcctccacttaactcgcgccgccgcggcagctcgagtccaccagcagcgccgtccgcttgaccgagatgctgcgggcctgtcagttatcgggtgtgaccgccgccgcccagagttgtctctgtgggaagtttgtcctccgtccattgcgaccatgccgcagatactctacttcaggcagctctgggttgactactggcaaaattgctggagctggccttttgtttgttggtggaggtattggtggcactatcctatatgccaaatgggattcccatttccgggaaagtgtagagaaaaccataccttactcagacaaactcttcgagatggttcttggtcctgcagcttataatgttccattgccaaagaaatcgattcagtcgggtccactaaaaatctctagtgtatcagaagtaatgaaagaatctaaacagcctgcctcacaactccaaaaacaaaagggagatactccagcttcagcaacagcaggtgataccctgtcggtcccagcccctgcagttcagcctgaggaatctttaaaaactgatcaccctgaaattggtgaaggaaaacccacacctgcactttcagaagaagcatcctcatcttctataagggagcgaccacctgaagaagttgcagctcgccttgcacaacaggaaaaacaagaacaagttaaaattgagtctctagccaagagcttagaagatgctctgaggcaaactgcaagtgtcactctgcaggctattgcagctcagaatgctgcggtccaggctgtcaatgcacactccaacatattgaaagccgccatggacaattctgagattgcaggcgagaagaaatctgctcagtggcgcacagtggagggtgcattgaaggaacgcagaaaggcagtagatgaagctgccgatgcccttctcaaagccaaagaagagttagagaagatgaaaagtgtgattgaaaatgcaaagaaaaaagaggttgctggggccaagcctcatataactgctgcagagggtaaacttcacaacatgatagttgatctggataatgtggtcaaaaaggtccaagcagctcagtctgaggctaaggttgtatctcagtatcatgagctggtggtccaagctcgggatgactttaaacgagagctggacagtattactccagaagtccttcctgggtggaaaggaatgagtgtttcagacttagctgacaagctctctactgatgatctgaactccctcattgctcatgcacatcgtcgtattgatcagctgaacagagagctggcagaacagaaggccaccgaaaagcagcacatcacgttagccttggagaaacaaaagctggaagaaaagcgggcatttgactctgcagtagcaaaagcattagaacatcacagaagtgaaatacaggctgaacaggacagaaagatagaagaagtcagagatgccatggaaaatgaaatgagaacccagcttcgccgacaggcagctgcccacactgatcacttgcgagatgtccttagggtacaagaacaggaattgaagtctgaatttgagcagaacctgtctgagaaactctctgaacaagaattacaatttcgtcgtctcagtcaagagcaagttgacaactttactctggatataaatactgcctatgccagactcagaggaatcgaacaggctgttcagagccatgcagttgctgaagaggaagccagaaaagcccaccaactctggctttcagtggaggcattaaagtacagcatgaagacctcatctgcagaaacacctactatcccgctgggtagtgcagttgaggccatcaaagccaactgttctgataatgaattcacccaagctttaaccgcagctatccctccagagtccctgacccgtggggtgtacagtgaagagacccttagagcccgtttctatgctgttcaaaaactggcccgaagggtagcaatgattgatgaaaccagaaatagcttgtaccagtacttcctctcctacctacagtccctgctcctattcccacctcagcaactgaagccgcccccagagctctgccctgaggatataaacacatttaaattactgtcatatgcttcctattgcattgagcatggtgatctggagctagcagcaaagtttgtcaatcagctgaagggggaatccagacgagtggcacaggactggctgaaggaagcccgaatgaccctagaaacgaaacagatagtggaaatcctgacagcatatgccagcgccgtaggaataggaaccactcaggtgcagccagagtgaggtttaggaagattttcataaagtcatatttcatgtcaaaggaaatcagcagtgatagatgaagggttcgcagcgagagtcccggacttgtctagaaatgagcaggtttacaagtactgttctaaatgttaacacctgttgcatttatattctttccatttgctatcatgtcagtgaacgccaggagtgctttctttgcaacttgtgtaacattttctgttttttcaggttttactgatgaggcttgtgaggccaatcaaaataatgtttgtgatctctactactgttgattttgccctcggagcaaactgaataaagcaacaagatgaaaa

SEQ ID NO: 447169 - DNA, 2903 bp, Homo sapiens
ttcagtgctgaaggtcgacgggcgagaactacagttcccgtcaggacgagcggagcggcggcttgttgcatccttaataaggagccctcaccaacaggctctggaaggccattaggcttctgctcacagtctcttcaaggttcttcagcttctgccgcccccaacaccagtcccaaagtcatgacctcgtgtttatgttttgttgcagtagcacccctcttctagagttgtctctgtgggaagtttgtcctccgtccattgcgaccatgccgcagatactctacttcaggcagctctgggttgactactggcaaaattgctggagctggccttttgtttgttggtggaggtattggtggcactatcctatatgccaaatgggattcccatttccgggaaagtgtagagaaaaccataccttactcagacaaactcttcgagatggttcttggtcctgcagcttataatgttccattgccaaagaaatcggaaacattgtttatgtgtatatacgagagcttttgctcaggagtagaaggatagattccaggctattagcagtggctacctaagagagtggaaagggaaaggagcagtgaagagattcagtcgggtccactaaaaatctctagtgtatcagaagtaatgaaagaatctaaacagcctgcctcacaactccaaaaacaaaagggagatactccagcttcagcaacagcacctacagaagcggctcaaattatttctgcagcaggtgataccctgtcggtcccagcccctgcagttcagcctgaggaatctttaaaaactgatcaccctgaaattggtgaaggaaaacccacacctgcactttcagaagaagcatcctcatcttctataagggagcgaccacctgaagaagttgcagctcgccttgcacaacaggaaaaacaagaacaagttaaaattgagtctctagccaagagcttagaagatgctctgaggcaaactgcaagtgtcactctgcaggctattgcagctcagaatgctgcggtccaggctgtcaatgcacactccaacatattgaaagccgccatggacaattctgagattgcaggcgagaagaaatctgctcagtggcgcacagtggagggtgcattgaaggaacgcagaaaggcagtagatgaagctgccgatgcccttctcaaagccaaagaagagttagagaagatgaaaagtgtgattgaaaatgcaaagaaaaaagaggttgctggggccaagcctcatataactgctgcagagggtaaacttcacaacatgatagttgatctggataatgtggtcaaaaaggtccaagcagctcagtctgaggctaaggttgtatctcagtatcatgagctggtggtccaagctcgggatgactttaaacgagagctggacagtattactccagaagtccttcctgggtggaaaggaatgagtgtttcagacttagctgacaagctctctactgatgatctgaactccctcattgctcatgcacatcgtcgtattgatcagctgaacagagagctggcagaacagaaggccaccgaaaagcagcacatcacgttagccttggagaaacaaaagctggaagaaaagcgggcatttgactctgcagtagcaaaagcattagaacatcacagaagtgaaatacaggctgaacaggacagaaagatagaagaagtcagagatgccatggaaaatgaaatgagaacccagcttcgccgacaggcagctgcccacactgatcacttgcgagatgtccttagggtacaagaacaggaattgaagtctgaatttgagcagaacctgtctgagaaactctctgaacaagaattacaatttcgtcgtctcagtcaagagcaagttgacaactttactctggatataaatactgcctatgccagactcagaggaatcgaacaggctgttcagagccatgcagttgctgaagaggaagccagaaaagcccaccaactctggctttcagtggaggcattaaagtacagcatgaagacctcatctgcagaaacacctactatcccgctgggtagtgcagttgaggccatcaaagccaactgttctgataatgaattcacccaagctttaaccgcagctatccctccagagtccctgacccgtggggtgtacagtgaagagacccttagagcccgtttctatgctgttcaaaaactggcccgaagggtagcaatgattgatgaaaccagaaatagcttgtaccagtacttcctctcctacctacagtccctgctcctattcccacctcagcaactgaagccgcccccagagctctgccctgaggatataaacacatttaaattactgtcatatgcttcctattgcattgagcatggtgatctggagctagcagcaaagtttgtcaatcagctgaagggggaatccagacgagtggcacaggactggctgaaggaagcccgaatgaccctagaaacgaaacagatagtggaaatcctgacagcatatgccagcgccgtaggaataggaaccactcaggtgcagccagagtgaggtttaggaagattttcataaagtcatatttcatgtcaaaggaaatcagcagtgatagatgaagggttcgcagcgagagtcccggacttgtctagaaatgagcaggtttacaagtactgttctaaatgttaacacctgttgcatttatattctttccatttgctatcatgtcagtgaacgccaggagtgctttctttgcaacttgtgtaacattttctgttttttcaggttttactgatgaggcttgtgaggccaatcaaaataatgtttgtgatctctactactgttgattttgccctcggagcaaactgaataaagcaacaagatgaaaa

SEQ ID NO: 447170 - DNA, 2625 bp, Homo sapiens
ttccggtgcgccgggcgcggacgcgggcacgcacacacgcaagcacgcctccacttaactcgcgccgccgcggcagctcgagtccaccagcagcgccgtccgcttgaccgagatgctgcgggcctgtcagttatcgggtgtgaccgccgccgcccagagttgtctctgtgggaagtttgtcctccgtccattgcgaccatgccgcagatactctacttcaggcagctctgggttgactactggcaaaattgctggagctggccttttgtttgttggtggaggtattggtggcactatcctatatgccaaatgggattcccatttccgggaaagtgtagagaaaaccataccttactcagacaaactcttcgagatggttcttggtcctgcagcttataatgttccattgccaaagaaatcgattcagtcgggtccactaaaaatctctagtgtatcagaagtaatgaaagaatctaaacagcctgcctcacaactccaaaaacaaaagggagatactccagcttcagcaacagcacctacagaagcggctcaaattatttctgcagcaggtgataccctgtcggtcccagcccctgcagttcagcctgaggaatctttaaaaactgatcaccctgaaattggtgaaggaaaacccacacctgcactttcagctctagccaagagcttagaagatgctctgaggcaaactgcaagtgtcactctgcaggctattgcagctcagaatgctgcggtccaggctgtcaatgcacactccaacatattgaaagccgccatggacaattctgagattgcaggcgagaagaaatctgctcagtggcgcacagtggagggtgcattgaaggaacgcagaaaggcagtagatgaagctgccgatgcccttctcaaagccaaagaagagttagagaagatgaaaagtgtgattgaaaatgcaaagaaaaaagaggttgctggggccaagcctcatataactgctgcagagggtaaacttcacaacatgatagttgatctggataatgtggtcaaaaaggtccaagcagctcagtctgaggctaaggttgtatctcagtatcatgagctggtggtccaagctcgggatgactttaaacgagagctggacagtattactccagaagtccttcctgggtggaaaggaatgagtgtttcagacttagctgacaagctctctactgatgatctgaactccctcattgctcatgcacatcgtcgtattgatcagctgaacagagagctggcagaacagaaggccaccgaaaagcagcacatcacgttagccttggagaaacaaaagctggaagaaaagcgggcatttgactctgcagtagcaaaagcattagaacatcacagaagtgaaatacaggctgaacaggacagaaagatagaagaagtcagagatgccatggaaaatgaaatgagaacccagcttcgccgacaggcagctgcccacactgatcacttgcgagatgtccttagggtacaagaacaggaattgaagtctgaatttgagcagaacctgtctgagaaactctctgaacaagaattacaatttcgtcgtctcagtcaagagcaagttgacaactttactctggatataaatactgcctatgccagactcagaggaatcgaacaggctgttcagagccatgcagttgctgaagaggaagccagaaaagcccaccaactctggctttcagtggaggcattaaagtacagcatgaagacctcatctgcagaaacacctactatcccgctgggtagtgcagttgaggccatcaaagccaactgttctgataatgaattcacccaagctttaaccgcagctatccctccagagtccctgacccgtggggtgtacagtgaagagacccttagagcccgtttctatgctgttcaaaaactggcccgaagggtagcaatgattgatgaaaccagaaatagcttgtaccagtacttcctctcctacctacagtccctgctcctattcccacctcagcaactgaagccgcccccagagctctgccctgaggatataaacacatttaaattactgtcatatgcttcctattgcattgagcatggtgatctggagctagcagcaaagtttgtcaatcagctgaagggggaatccagacgagtggcacaggactggctgaaggaagcccgaatgaccctagaaacgaaacagatagtggaaatcctgacagcatatgccagcgccgtaggaataggaaccactcaggtgcagccagagtgaggtttaggaagattttcataaagtcatatttcatgtcaaaggaaatcagcagtgatagatgaagggttcgcagcgagagtcccggacttgtctagaaatgagcaggtttacaagtactgttctaaatgttaacacctgttgcatttatattctttccatttgctatcatgtcagtgaacgccaggagtgctttctttgcaacttgtgtaacattttctgttttttcaggttttactgatgaggcttgtgaggccaatcaaaataatgtttgtgatctctactactgttgattttgccctcggagcaaactgaataaagcaacaagatgaaaa

SEQ ID NO: 447171 - DNA, 2634 bp, Homo sapiens
ttccggtgcgccgggcgcggacgcgggcacgcacacacgcaagcacgcctccacttaactcgcgccgccgcggcagctcgagtccaccagcagcgccgtccgcttgaccgagatgctgcgggcctgtcagttatcgggtgtgaccgccgccgcccagagttgtctctgtgggaagtttgtcctccgtccattgcgaccatgccgcagatactctacttcaggcagctctgggttgactactggcaaaattgctggagctggccttttgtttgttggtggaggtattggtggcactatcctatatgccaaatgggattcccatttccgggaaagtgtagagaaaaccataccttactcagacaaactcttcgagatggttcttggtcctgcagcttataatgttccattgccaaagaaatcgattcagtcgggtccactaaaaatctctagtgtatcagaagtaatgaaagaatctaaacagcctgcctcacaactccaaaaacaaaagggagatactccagcttcagcaacagcaggtgataccctgtcggtcccagcccctgcagttcagcctgaggaatctttaaaaactgatcaccctgaaattggtgaaggaaaacccacacctgcactttcagaagaagcatcctcatcttctataagggagcgaccacctgaagaagttgcagctcgccttgcacaacaggaaaaacaagaacaagttaaaattgagtctctagccaagagcttagaagatgctctgaggcaaactgcaagtgtcactctgcaggctattgcagctcagaatgctgcggtccaggctgtcaatgcacactccaacatattgaaagccgccatggacaattctgagattgcaggcgagaagaaatctgctcagtggcgcacagtggagggtgcattgaaggaacgcagaaaggcagtagatgaagctgccgatgcccttctcaaagccaaagaagagttagagaagatgaaaagtgtgattgaaaatgcaaagaaaaaagaggttgctggggccaagcctcatataactgctgcagagggtaaacttcacaacatgatagttgatctggataatgtggtcaaaaaggtccaagcagctcagtctgaggctaaggttgtatctcagtatcatgagctggtggtccaagctcgggatgactttaaacgagagctggacagtattactccagaagtccttcctgggtggaaaggaatgagtgtttcagacttagctgacaagctctctactgatgatctgaactccctcattgctcatgcacatcgtcgtattgatcagctgaacagagagctggcagaacagaaggccaccgaaaagcagcacatcacgttagccttggagaaacaaaagctggaagaaaagcgggcatttgactctgcagtagcaaaagcattagaacatcacagaagtgaaatacaggctgaacaggacagaaagatagaagaagtcagagatgccatggaaaatgaaatgagaacccagcttcgccgacaggcagctgcccacactgatcacttgcgagatgtccttagggtacaagaacaggaattgaagtctgaatttgagcagaacctgtctgagaaactctctgaacaagaattacaatttcgtcgtctcagtcaagagcaagttgacaactttactctggatataaatactgcctatgccagactcagaggaatcgaacaggctgttcagagccatgcagttgctgaagaggaagccagaaaagcccaccaactctggctttcagtggaggcattaaagtacagcatgaagacctcatctgcagaaacacctactatcccgctgggtagtgcagttgaggccatcaaagccaactgttctgataatgaattcacccaagctttaaccgcagctatccctccagagtccctgacccgtggggtgtacagtgaagagacccttagagcccgtttctatgctgttcagtacttcctctcctacctacagtccctgctcctattcccacctcagcaactgaagccgcccccagagctctgccctgaggatataaacacatttaaattactgtcatatgcttcctattgcattgagcatggtgatctggagctagcagcaaagtttgtcaatcagctgaagggggaatccagacgagtggcacaggactggctgaaggaagcccgaatgaccctagaaacgaaacagatagtggaaatcctgacagcatatgccagcgccgtaggaataggaaccactcaggtgcagccagagtgaggtttaggaagattttcataaagtcatatttcatgtcaaaggaaatcagcagtgatagatgaagggttcgcagcgagagtcccggacttgtctagaaatgagcaggtttacaagtactgttctaaatgttaacacctgttgcatttatattctttccatttgctatcatgtcagtgaacgccaggagtgctttctttgcaacttgtgtaacattttctgttttttcaggttttactgatgaggcttgtgaggccaatcaaaataatgtttgtgatctctactactgttgattttgccctcggagcaaactgaataaagcaacaagatgaaaa

SEQ ID NO: 447172 - DNA, 1893 bp, Homo sapiens
atcgggcacgagaatcgacggcccctggcgggtgttaaacatcggccgaggattgaaagcgcatggacattctgagattgcaggcgagaagaaatctgctcagtggcgcacagtggagggtgcattgaaggaacgcagaaaggcagtagatgaagctgccgatgcccttctcaaagccaaagaagagttagagaagatgaaaagtgtgattgaaaatgcaaagaaaaaagaggttgctggggccaagcctcatataactgctgcagagggtaaacttcacaacatgatagttgatctggataatgtggtcaaaaaggtccaagcagctcagtctgaggctaaggttgtatctcagtatcatgagctggtggtccaagctcgggatgactttaaacgagagctggacagtattactccagaagtccttcctgggtggaaaggaatgagtgtttcagacttagctgacaagctctctactgatgatctgaactccctcattgctcatgcacatcgtcgtattgatcagctgaacagagagctggcagaacagaaggccaccgaaaagcagcacatcacgttagccttggagaaacaaaagctggaagaaaagcgggcatttgactctgcagtagcaaaagcattagaacatcacagaagtgaaatacaggctgaacaggacagaaagatagaagaagtcagagatgccatggaaaatgaaatgagaacccagcttcgccgacaggcagctgcccacactgatcacttgcgagatgtccttagggtacaagaacaggaattgaagtctgaatttgagcagaacctgtctgagaaactctctgaacaagaattacaatttcgtcgtctcagtcaagagcaagttgacaactttactctggatataaatactgcctatgccagactcagaggaatcgaacaggctgttcagagccatgcagttgctgaagaggaagccagaaaagcccaccaactctggctttcagtggaggcattaaagtacagcatgaagacctcatctgcagaaacacctactatcccgctgggtagtgcagttgaggccatcaaagccaactgttctgataatgaattcacccaagctttaaccgcagctatccctccagagtccctgacccgtggggtgtacagtgaagagacccttagagcccgtttctatgctgttcaaaaactggcccgaagggtagcaatgattgatgaaaccagaaatagcttgtaccagtacttcctctcctacctacagtccctgctcctattcccacctcagcaactgaagccgcccccagagctctgccctgaggatataaacacatttaaattactgtcatatgcttcctattgcattgagcatggtgatctggagctagcagcaaagtttgtcaatcagctgaagggggaatccagacgagtggcacaggactggctgaaggaagcccgaatgaccctagaaacgaaacagatagtggaaatcctgacagcatatgccagcgccgtaggaataggaaccactcaggtgcagccagagtgaggtttaggaagattttcataaagtcatatttcatgtcaaaggaaatcagcagtgatagatgaagggttcgcagcgagagtcccggacttgtctagaaatgagcaggtttacaagtactgttctaaatgttaacacctgttgcatttatattctttccatttgctatcatgtcagtgaacgccaggagtgctttctttgcaacttgtgtaacattttctgttttttcaggttttactgatgaggcttgtgaggccaatcaaaataatgtttgtgatctctactactgttgattttgccctcggagcaaactgaataaagcaacaagatgaaaa

SEQ ID NO: 447173 - DNA, 2573 bp, Homo sapiens
ttccggtgcgccgggcgcggacgcgggcacgcacacacgcaagcacgcctccacttaactcgcgccgccgcggcagctcgagtccaccagcagcgccgtccgcttgaccgagatgctgcgggcctgtcagttatcgggtgtgaccgccgccgcccagagttgtctctgtgggaagtttgtcctccgtccattgcgaccatgccgcagatactctacttcaggcagctctgggttgactactggcaaaattgctggagctggccttttgtttgttggtggaggtattggtggcactatcctatatgccaaatgggattcccatttccgggaaagtgtagagaaaaccataccttactcagacaaactcttcgagatggttcttggtcctgcagcttataatgttccattgccaaagaaatcgattcagtcgggtccactaaaaatctctagtgtatcagaagtaatgaaagaatctaaacagcctgcctcacaactccaaaaacaaaagggagatactccagcttcagcaacagcaggtgataccctgtcggtcccagcccctgcagttcagcctgaggaatctttaaaaactgatcaccctgaaattggtgaaggaaaacccacacctgcactttcagaagaagcatcctcatcttctataagggagcgaccacctgaagaagttgcagctcgccttgcacaacaggaaaaacaagaacaagttaaaattgagtctctagccaagagcttagaagatgctctgaggcaaactgcaagtgtcactctgcaggctattgcagctcagaatgctgcggtccaggctgtcaatgcacactccaacatattgaaagccgccatggacaattctgagattgcaggcgagaagaaatctgctcagtggcgcacagtggagggtgcattgaaggaacgcagaaaggcagtagatgaagctgccgatgcccttctcaaagccaaagaagagttagagaagatgaaaagtgtgattgaaaatgcaaagaaaaaagaggttgctggggccaagcctcatataactgctgcagagggtaaacttcacaacatgatagttgatctggataatgtggtcaaaaaggtccaagcagctcagtctgaggctaaggttgtatctcagtatcatgagctggtggtccaagctcgggatgactttaaacgagagctggacagtattactccagaagtccttcctgggtggaaaggaatgagtgtttcagacttagctgacaagctctctactgatgatctgaactccctcattgctcatgcacatcgtcgtattgatcagctgaacagagagctggcagaacagaaggccaccgaaaagcagcacatcacgttagccttggagaaacaaaagctggaagaaaagcgggcatttgactctgcagtagcaaaagcattagaacatcacagaagtgaaatacaggctgaacaggacagaaagatagaagaagtcagagatgccatggaaaatgaaatgagaacccagcttcgccgacaggcagctgcccacactgatcacttgcgagatgtccttagggtacaagaacaggaattgaagtctgaatttgagcagaacctgtctgagaaactctctgaacaagaattacaatttcgtcgtctcagtcaagagcaagttgacaactttactctggatataaatactgcctatgccagactcagaggaatcgaacaggctgttcagagccatgcagttgctgaagaggaagccagaaaagcccaccaactctggctttcagtggaggcattaaagtacagcatgaagacctcatctgcagaaacacctactatcccgctgggtagtgcagttgaggccatcaaagccaactgttctgataatgaattcacccaagctttaaccgcagctatccctccagagtccctgacccgtggggtgtacagtgaagagacccttagagcccgtttctatgctgttcaaaaactggcccgaagggtagcaatgattgatgaaaccagaaatagcttgtaccagtacttcctctcctacctacagtccctgctcctattcccacctcagcaactgaagccgcccccagagctctgccctgaggatataaacacatttaaattactgtcatatgcttcctattgcattgagcatggtgatctggagctagcagcaaagtttgtcaatcagctgaagggggaatccagacgaagtgaggtttaggaagattttcataaagtcatatttcatgtcaaaggaaatcagcagtgatagatgaagggttcgcagcgagagtcccggacttgtctagaaatgagcaggtttacaagtactgttctaaatgttaacacctgttgcatttatattctttccatttgctatcatgtcagtgaacgccaggagtgctttctttgcaacttgtgtaacattttctgttttttcaggttttactgatgaggcttgtgaggccaatcaaaataatgtttgtgatctctactactgttgattttgccctcggagcaaactgaataaagcaacaagatgaaaa

SEQ ID NO: 447174 - DNA, 2167 bp, Homo sapiens
ttccggtgcgccgggcgcggacgcgggcacgcacacacgcaagcacgcctccacttaactcgcgccgccgcggcagctcgagtccaccagcagcgccgtccgcttgaccgagatgctgcgggcctgtcagttatcgggtgtgaccgccgccgcccagagttgtctctgtgggaagtttgtcctccgtccattgcgaccatgccgcagatactctacttcaggcagctctgggttgactactggcaaaattgctggagctggccttttgtttgttggtggaggtattggtggcactatcctatatgccaaatgggattcccatttccgggaaagtgtagagaaaaccataccttactcagacaaactcttcgagatggttcttggtcctgcagcttataatgttccattgccaaagaaatcgattcagtcgggtccactaaaaatctctagtgtatcagaagtaatgaaagaatctaaacagcctgcctcacaactccaaaaacaaaagggagatactccagcttcagcaacagcaggtgataccctgtcggtcccagcccctgcagttcagcctgaggaatctttaaaaactgatcaccctgaaattggtgaaggaaaacccacacctgcactttcagaagaagcatcctcatcttctataagggagcgaccacctgaagaagttgcagctcgccttgcacaacaggaaaaacaagaacaagttaaaattgagtctctagccaagagcttagaagatgctctgaggcaaactgcaagtgtcactctgcaggctattgcagctcagaatgctgcggtccaggctgtcaatgcacactccaacatattgaaagccgccatggacaattctgagattgcaggcgagaagaaatctgctcagtggcgcacagtggagggtgcattgaaggaacgcagaaaggcagtagatgaagctgccgatgcccttctcaaagccaaagaagagttagagaagatgaaaagtgtgattgaaaatgcaaagaaaaaagaggttgctggggccaagcctcatataactgctgcagagggtaaacttcacaacatgatagttgatctggataatgtggtcaaaaaggtccaagcagctcagtctgaggctaaggttgtatctcagtatcatgagctggtggtccaagctcgggatgactttaaacgagagctggacagtattactccagaagtccttcctgggtggaaaggaatgagtgtttcagacttagctgacaagctctctactgatgatctgaactccctcattgctcatgcacatcgtcgtattgatcagctgaacagagagctggcagaacagaaggccaccgaaaagcagcacatcacgttagccttggagaaacaaaagctggaagaaaagcgggcatttgactctgcagtagcaaaagcattagaacatcacagaagtgaaatacaggctgaacaggacagaaagatagaagaagtcagagatgccatggaaaatgaaatgagaacccagcttcgccgacaggcagctgcccacactgatcacttgcgagatgtccttagggtacaagaacaggaattgaagtctgaatttgagcagaacactgtctggcagaaactctctgaacacagacttacaatcccggcggactcaagacaagcagcacagggcacaactaacacgccgcgacataacatcacacggccaatgccaaacacccagaggaactcgaacaggcgcggcacacagccacggcacgtcgccgaaaagagcaacacaaagagccaccacactcggggacacacgggagatcacacgacacacgagagcaccccgatcgcaaacaaacacccaacaaaaaccgactgcgactaattgcacagagaggaccacaaaagacccaaccggagccgcaagcacgagcacccaccgacgacataagagagacagacacaacaccccgacaccgggggcacctgagcagcgacgctcggaacgactcggaccactaaacagatcacccagcaacagaagcagaacagccacgcacaacgcacgaccgacgacaacaaacccaaccacgagaatacactatacctcaggctgccgaccgcaccacgaacatagaacacacacgtcctgcaccgtacagcc

SEQ ID NO: 447175 - DNA, 1505 bp, Homo sapiens
ttccggtgcgccgggcgcggacgcgggcacgcacacacgcaagcacgcctccacttaactcgcgccgccgcggcagctcgagtccaccagcagcgccgtccgcttgaccgagatgctgcgggcctgtcagttatcgggtgtgaccgccgccgcccagagttgtctctgtgggaagtttgtcctccgtccattgcgaccatgccgcagatactctacttcaggcagctctgggttgactactggcaaaattgctggagctggccttttgtttgttggtggaggtattggtggcactatcctatatgccaaatgggattcccatttccgggaaagtgtagagaaaaccataccttactcagacaaactcttcgagatggttcttggtcctgcagcttataatgttccattgccaaagaaatcgattcagtcgggtccactaaaaatctctagtgtatcagaagtaatgaaagaatctaaacagcctgcctcacaactccaaaaacaaaagggagatactccagcttcagcaacagcaggtgataccctgtcggtcccagcccctgcagttcagcctgaggaatctttaaaaactgatcaccctgaaattggtgaaggaaaacccacacctgcactttcagaagaagcatcctcatcttctataagggagcgaccacctgaagaagttgcagctcgccttgcacaacaggaaaaacaagaacaagttaaaattgagtctctagccaagagcttagaagatgctctgaggcaaactgcaagtgtcactctgcaggctattgcagctcagaatgctgcggtccaggctgtcaatgcacactccaacatattgaaagccgccatggacaattctgagattgcaggcgagaagaaatctgctcagtggcgcacagtggagggtgcattgaaggaacgcagaaaggcagtagatgaagctgccgatgcccttctcaaagccaaagaagagttagagaagatgaaaagtgtgattgaaaatgcaaagaaaaaagaggttgctggggccaagcctcatataactgctgcagagggtaaacttcacaacatgatagttgatctggataatgtggtcaaaaaggtccaagcagctcagtctgaggctaaggttgtatctcagtatcatgagctggtggtccaagctcgggatgactttaaacgagagctggacagtattactccagaagtccttcctgggtggaaaggaatgagtgagtacaactgaagtaatgttttttttttgatgttttaaccactaatcaatgaatctaaacttgcttcatctccattgtagtccacatccctctggcatgcatgcatatctctttttgttacagcgttttattttaaccacagtcattacagatgacacagctgcaacactactcttgtagttttagctgtggtgaacatgagttccagctagtgtttaattccataatccgtgattggttctgttctgatatttgctactc

SEQ ID NO: 447176 - DNA, 768 bp, Homo sapiens
ttccggtgcgccgggcgcggacgcgggcacgcacacacgcaagcacgcctccacttaactcgcgccgccgcggcagctcgagtccaccagcagcgccgtccgcttgaccgagatgctgcgggcctgtcagttatcgggtgtgaccgccgccgcccagagttgtctctgtgggaagtttgtcctccgtccattgcgaccatgccgcagatactctacttcaggcagctctgggttgactactggcaaaattgctggagctggccttttgtttgttggtggaggtattggtggcactatcctatatgccaaatgggattcccatttccgggaaagtgtagagaaaaccataccttactcagacaaactcttcgagatggttcttggtcctgcagcttataatgttccattgccaaagaaatcgattcagtcgggtccactaaaaatctctagtgtatcagaagtaatgaaagaatctaaacagcctgcctcacaactccaaaaacaaaagggagatactccagcttcagcaacagcaggtgataccctgtcggtcccagcccctgcagttcagcctgaggaatctttaaaaactgatcaccctgaaattggtgaaggaaaacccacacctgcactttcaggtaatttaattatttctatttgttcttttatacatgatacactcatcagaactatttaatgcctaggcaacacgtagacactaagtatacatttacactaggtttaggtcttcagagtttcttaggaaat

SEQ ID NO: 447177 - DNA, 464 bp, Homo sapiens
ttccggtgcgccgggcgcggacgcgggcacgcacacacgcaagcacgcctccacttaactcgcgccgccgcggcagctcgagtccaccagcagcgccgtccgcttgaccgagatgctgcgggcctgtcagttatcgggtgtgaccgccgccgcccagagttgtctctgtgggaagtttgtcctccgtccattgcgaccatgccgcagatactctacttcaggcagctctgggttgactactggcaaaattgctggagctggccttttgtttgttggtggaggtattggtggcactatcctatatgccaaatgggattcccatttccgggaaagtgtagagaaaaccataccttactcagacaaactcttcgagatggttctttcattacttctgatacactagagatttttagtggacccgactgaatcgatttctttggcaatggaacattataagctgcagg

SEQ ID NO: 447178 - DNA, 464 bp, Homo sapiens
gagtatcacttttttctggaactatttctgttttatttcagaacctgtctgagaaactctctgaacaagaattacaatttcgtcgtctcagtcaagagcaagttgacaactttactctggatataaatactgcctatgccagactcagaggaatcgaacaggctgttcagagtaagcataagctatgtttatcttacagataattttcctcagcataatttatcaaaataattttatagggaaaatggggtacatgtactgacatcaggacataaaaatactaatcactctacttaattgcagtttttgccattaaaagtaatggcaaaatctatataactagaaatttataccttgtatgacaaacacaaaatcaccatttacaaggctatttacccagtatcctttggctatgtcgcatgtgcctgggtggtaagggctaggggtcagtgtggtcccatgct

SEQ ID NO: 447179 - DNA, 287 bp, Homo sapiens
gtttacaagtactgttctaaatgttaacacctgttgcatttatattctttccatttgctatcatgtcagtgaacgccaggagtgctttctttgcaacttgtgtaacattttctgttttttcaggttttactgatgaggcttgtgaggccaatcaaaataatgtttgtgatctctactactgttgattttgccctcggagcaaactgaataaagcaacaagatgaaaagagtatcttatcccttttcaaaaagtacagttctggccaggtgcagtagctcacgcctgt

SEQ ID NO: 447180 - DNA, 578 bp, Homo sapiens
gcagaaactggcccgaagggtagcgaggatcgagtgaaagcagaaatagcgtgtaccagtacttcctctcctacctacagtcgctgctcctatttctggtttcatcaatcatggcgacccttagagcccgtttctatgctgttcaaaaactggcccgaagggtagcaatgattgatgaaaccagaaatagcttgtaccagtacttcctctcctacctacagttgctgaggtgggaagtagcgagcagggactgagaggcttgaagaaggaacacgaccagagtaagcgagaacgcaggagaagaactagccaatggaagaacgagaacacgaagaaacgacggacctcggccacgagggggaccatgcaagccccagaaatctggatgtgcaagaatggcgaagaccatgttcgcttaaggagatggacgagtgaggcagagagttatgatgacggtccatagagagctggggtgggcggaagcgaatggtcttgaggtaacacattcgacgtggccagcgataatggggtgactaatatgcagtcgcacttttaaggtatagaaaaaaggagtgaaa

SEQ ID NO: 447181 - DNA, 2738 bp, Homo sapiens
  misc_feature (1)..(1): n is a, c, g, or t
ntaaacttactaaacgtgtcccttacagggctcagcagcacgggcccctgtgcgcttgtgccggacactttctgtgccacagcaagggggcagctcgagtccaccagcagcgccgtccgcttgaccgagatgctgcgggcctgtcagttatcgggtgtgaccgccgccgcccagagttgtctctgtgggaagtttgtcctccgtccattgcgaccatgccgcagatactctacttcaggcagctctgggttgactactggcaaaattgctggagctggccttttgtttgttggtggaggtattggtggcactatcctatatgccaaatgggattcccatttccgggaaagtgtagagaaaaccataccttactcagacaaactcttcgagatggttcttggtcctgcagcttataatgttccattgccaaagaaatcgattcagtcgggtccactaaaaatctctagtgtatcagaagtaatgaaagaatctaaacagcctgcctcacaactccaaaaacaaaagggagatactccagcttcagcaacagcacctacagaagcggctcaaattatttctgcagcaggtgataccctgtcggtcccagcccctgcagttcagcctgaggaatctttaaaaactgatcaccctgaaattggtgaaggaaaacccacacctgcactttcagaagaagcatcctcatcttctataagggagcgaccacctgaagaagttgcagctcgccttgcacaacaggaaaaacaagaacaagttaaaattgagtctctagccaagagcttagaagatgctctgaggcaaactgcaagtgtcactctgcaggctattgcagctcagaatgctgcggtccaggctgtcaatgcacactccaacatattgaaagccgccatggacaattctgagattgcaggcgagaagaaatctgctcagtggcgcacagtggagggtgcattgaaggaacgcagaaaggcagtagatgaagctgccgatgcccttctcaaagccaaagaagagttagagaagatgaaaagtgtgattgaaaatgcaaagaaaaaagaggttgctggggccaagcctcatataactgctgcagagggtaaacttcacaacatgatagttgatctggataatgtggtcaaaaaggtccaagcagctcagtctgaggctaaggttgtatctcagtatcatgagctggtggtccaagctcgggatgactttaaacgagagctggacagtattactccagaagtccttcctgggtggaaaggaatgagtgtttcagacttagctgacaagctctctactgatgatctgaactccctcattgctcatgcacatcgtcgtattgatcagctgaacagagagctggcagaacagaaggccaccgaaaagcagcacatcacgttagccttggagaaacaaaagctggaagaaaagcgggcatttgactctgcagtagcaaaagcattagaacatcacagaagtgaaatacaggctgaacaggacagaaagatagaagaagtcagagatgccatggaaaatgaaatgagaacccagcttcgccgacaggcagctgcccacactgatcacttgcgagatgtccttagggtacaagaacaggaattgaagtctgaatttgagcagaacctgtctgagaaactctctgaacaagaattacaatttcgtcgtctcagtcaagagcaagttgacaactttactctggatataaatactgcctatgccagactcagaggaatcgaacaggctgttcagagccatgcagttgctgaagaggaagccagaaaagcccaccaactctggctttcagtggaggcattaaagtacagcatgaagacctcatctgcagaaacacctactatcccgctgggtagtgcagttgaggccatcaaagccaactgttctgataatgaattcacccaagctttaaccgcagctatccctccagagtccctgacccgtggggtgtacagtgaagagacccttagagcccgtttctatgctgttcaaaaactggcccgaagggtagcaatgattgatgaaaccagaaatagcttgtaccagtacttcctctcctacctacagtccctgctcctattcccacctcagcaactgaagccgcccccagagctctgccctgaggatataaacacatttaaattactgtcatatgcttcctattgcattgagcatggtgatctggagctagcagcaaagtttgtcaatcagctgaagggggaatccagacgagtggcacaggactggctgaaggaagcccgaatgaccctagaaacgaaacagatagtggaaatcctgacagcatatgccagcgccgtaggaataggaaccactcaggtgcagccagagtgaggtttaggaagattttcataaagtcatatttcatgtcaaaggaaatcagcagtgatagatgaagggttcgcagcgagagtcccggacttgtctagaaatgagcaggtttacaagtactgttctaaatgttaacacctgttgcatttatattctttccatttgctatcatgtcagtgaacgccaggagtgctttctttgcaacttgtgtaacattttctgttttttcaggttttactgatgaggcttgtgaggccaatcaaaataatgtttgtgatctctactactgttgattttgccctcggagcaaactgaataaagcaacaagatgaaaa

SEQ ID NO: 447182 - DNA, 2468 bp, Homo sapiens
tattataagccttgcctggaataatgatggttaaaatgcaggtggatgcagacaagacttctttcttttgttcgttcccaaccattgtccattttgtgtgagtttatgtatgcagtggacagtgcccctgtttgtgtgttattcaaacatgtggcagtacaaatatttgtgtctctaaggagtcagatgtgaagtgggtggtgatggtggtagtaaatttctgtgtgtttctctgttaacccaggaaagtataaataccatgagtaacatatatttatagcacctacagaagcggctcaaattatttctgcagcaggtgataccctgtcggtcccagcccctgcagttcagcctgaggaatctttaaaaactgatcaccctgaaattggtgaaggaaaacccacacctgcactttcagaagaagcatcctcatcttctataagggagcgaccacctgaagaagttgcagctcgccttgcacaacaggaaaaacaagaacaagttaaaattgagtctctagccaagagcttagaagatgctctgaggcaaactgcaagtgtcactctgcaggctattgcagctcagaatgctgcggtccaggctgtcaatgcacactccaacatattgaaagccgccatggacaattctgagattgcaggcgagaagaaatctgctcagtggcgcacagtggagggtgcattgaaggaacgcagaaaggcagtagatgaagctgccgatgcccttctcaaagccaaagaagagttagagaagatgaaaagtgtgattgaaaatgcaaagaaaaaagaggttgctggggccaagcctcatataactgctgcagagggtaaacttcacaacatgatagttgatctggataatgtggtcaaaaaggtccaagcagctcagtctgaggctaaggttgtatctcagtatcatgagctggtggtccaagctcgggatgactttaaacgagagctggacagtattactccagaagtccttcctgggtggaaaggaatgagtgtttcagacttagctgacaagctctctactgatgatctgaactccctcattgctcatgcacatcgtcgtattgatcagctgaacagagagctggcagaacagaaggccaccgaaaagcagcacatcacgttagccttggagaaacaaaagctggaagaaaagcgggcatttgactctgcagtagcaaaagcattagaacatcacagaagtgaaatacaggctgaacaggacagaaagatagaagaagtcagagatgccatggaaaatgaaatgagaacccagcttcgccgacaggcagctgcccacactgatcacttgcgagatgtccttagggtacaagaacaggaattgaagtctgaatttgagcagaacctgtctgagaaactctctgaacaagaattacaatttcgtcgtctcagtcaagagcaagttgacaactttactctggatataaatactgcctatgccagactcagaggaatcgaacaggctgttcagagccatgcagttgctgaagaggaagccagaaaagcccaccaactctggctttcagtggaggcattaaagtacagcatgaagacctcatctgcagaaacacctactatcccgctgggtagtgcagttgaggccatcaaagccaactgttctgataatgaattcacccaagctttaaccgcagctatccctccagagtccctgacccgtggggtgtacagtgaagagacccttagagcccgtttctatgctgttcaaaaactggcccgaagggtagcaatgattgatgaaaccagaaatagcttgtaccagtacttcctctcctacctacagtccctgctcctattcccacctcagcaactgaagccgcccccagagctctgccctgaggatataaacacatttaaattactgtcatatgcttcctattgcattgagcatggtgatctggagctagcagcaaagtttgtcaatcagctgaagggggaatccagacgagtggcacaggactggctgaaggaagcccgaatgaccctagaaacgaaacagatagtggaaatcctgacagcatatgccagcgccgtaggaataggaaccactcaggtgcagccagagtgaggtttaggaagattttcataaagtcatatttcatgtcaaaggaaatcagcagtgatagatgaagggttcgcagcgagagtcccggacttgtctagaaatgagcaggtttacaagtactgttctaaatgttaacacctgttgcatttatattctttccatttgctatcatgtcagtgaacgccaggagtgctttctttgcaacttgtgtaacattttctgttttttcaggttttactgatgaggcttgtgaggccaatcaaaataatgtttgtgatctctactactgttgattttgccctcggagcaaactgaataaagcaacaagatgaaaa

SEQ ID NO: 447183 - DNA, 2530 bp, Homo sapiens
gatgtgttttccttctttagagttgtctctgtgggaagtttgtcctccgtccattgcgaccatgccgcagatactctacttcaggcagctctgggttgactactggcaaaattgctggagctggccttttgtttgttggtggaggtattggtggcactatcctatatgccaaatgggattcccatttccgggaaagtgtagagaaaaccataccttactcagacaaactcttcgagatggttcttggtcctgcagcttataatgttccattgccaaagaaatcgattcagtcgggtccactaaaaatctctagtgtatcagaagtaatgaaagaatctaaacagcctgcctcacaactccaaaaacaaaagggagatactccagcttcagcaacagcacctacagaagcggctcaaattatttctgcagcaggtgataccctgtcggtcccagcccctgcagttcagcctgaggaatctttaaaaactgatcaccctgaaattggtgaaggaaaacccacacctgcactttcagaagaagcatcctcatcttctataagggagcgaccacctgaagaagttgcagctcgccttgcacaacaggtgaggcaaactgcaagtgtcactctgcaggctattgcagctcagaatgctgcggtccaggctgtcaatgcacactccaacatattgaaagccgccatggacaattctgagattgcaggcgagaagaaatctgctcagtggcgcacagtggagggtgcattgaaggaacgcagaaaggcagtagatgaagctgccgatgcccttctcaaagccaaagaagagttagagaagatgaaaagtgtgattgaaaatgcaaagaaaaaagaggttgctggggccaagcctcatataactgctgcagagggtaaacttcacaacatgatagttgatctggataatgtggtcaaaaaggtccaagcagctcagtctgaggctaaggttgtatctcagtatcatgagctggtggtccaagctcgggatgactttaaacgagagctggacagtattactccagaagtccttcctgggtggaaaggaatgagtgtttcagacttagctgacaagctctctactgatgatctgaactccctcattgctcatgcacatcgtcgtattgatcagctgaacagagagctggcagaacagaaggccaccgaaaagcagcacatcacgttagccttggagaaacaaaagctggaagaaaagcgggcatttgactctgcagtagcaaaagcattagaacatcacagaagtgaaatacaggctgaacaggacagaaagatagaagaagtcagagatgccatggaaaatgaaatgagaacccagcttcgccgacaggcagctgcccacactgatcacttgcgagatgtccttagggtacaagaacaggaattgaagtctgaatttgagcagaacctgtctgagaaactctctgaacaagaattacaatttcgtcgtctcagtcaagagcaagttgacaactttactctggatataaatactgcctatgccagactcagaggaatcgaacaggctgttcagagccatgcagttgctgaagaggaagccagaaaagcccaccaactctggctttcagtggaggcattaaagtacagcatgaagacctcatctgcagaaacacctactatcccgctgggtagtgcagttgaggccatcaaagccaactgttctgataatgaattcacccaagctttaaccgcagctatccctccagagtccctgacccgtggggtgtacagtgaagagacccttagagcccgtttctatgctgttcaaaaactggcccgaagggtagcaatgattgatgaaaccagaaatagcttgtaccagtacttcctctcctacctacagtccctgctcctattcccacctcagcaactgaagccgcccccagagctctgccctgaggatataaacacatttaaattactgtcatatgcttcctattgcattgagcatggtgatctggagctagcagcaaagtttgtcaatcagctgaagggggaatccagacgagtggcacaggactggctgaaggaagcccgaatgaccctagaaacgaaacagatagtggaaatcctgacagcatatgccagcgccgtaggaataggaaccactcaggtgcagccagagtgaggtttaggaagattttcataaagtcatatttcatgtcaaaggaaatcagcagtgatagatgaagggttcgcagcgagagtcccggacttgtctagaaatgagcaggtttacaagtactgttctaaatgttaacacctgttgcatttatattctttccatttgctatcatgtcagtgaacgccaggagtgctttctttgcaacttgtgtaacattttctgttttttcaggttttactgatgaggcttgtgaggccaatcaaaataatgtttgtgatctctactactgttgattttgccctcggagcaaactgaataaagcaacaagatgaaaa

SEQ ID NO: 447184 - DNA, 3000 bp, Homo sapiens
ttccggtgcgccgggcgcggacgcgggcacgcacacacgcaagcacgcctccacttaactcgcgccgccgcggcagctcgagtccaccagcagcgccgtccgcttgaccgagatgctgcgggcctgtcagttatcgggtgtgaccgccgccgcccagagttgtctctgtgggaagtttgtcctccgtccattgcgaccatgccgcagatactctacttcaggcagctctgggttgactactggcaaaattgctggagctggccttttgtttgttggtggaggtattggtggcactatcctatatgccaaatgggattcccatttccgggaaagtgtagagaaaaccataccttactcagacaaactcttcgagatggttcttggtcctgcagcttataatgttccattgccaaagaaatcgattcagtcgggtccactaaaaatctctagtgtatcagaagtaatgaaagaatctaaacagcctgcctcacaactccaaaaacaaaagggagatactccagcttcagcaacagcaggtgataccctgtcggtcccagcccctgcagttcagcctgaggaatctttaaaaactgatcaccctgaaattggtgaaggaaaacccacacctgcactttcagaagaagcatcctcatcttctataagggagcgaccacctgaagaagttgcagctcgccttgcacaacaggaaaaacaagaacaagttaaaattgagtctctagccaagagcttagaagatgctctgaggcaaactgcaagtgtcactctgcaggctattgcagctcagaatgctgcggtccaggctgtcaatgcacactccaacatattgaaagccgccatggacaattctgagattgcaggcgagaagaaatctgctcagtggcgcacagtggagggtgcattgaaggaacgcagaaaggcagtagatgaagctgccgatgcccttctcaaagccaaagaagagttagagaagatgaaaagtgtgattgaaaatgcaaagaaaaaagaggttgctggggccaagcctcatataactgctgcagagggtaaacttcacaacatgatagttgatctggataatgtggtcaaaaaggtccaagcagctcagtctgaggctaaggttgtatctcagtatcatgagctggtggtccaagctcgggatgactttaaacgagagctggacagtattactccagaagtccttcctgggtggaaaggaatgagtgtttcagacttagctgacaagctctctactgatgatctgaactccctcattgctcatgcacatcgtcgtattgatcagctgaacagagagctggcagaacagaaggccaccgaaaagcagcacatcacgttagccttggagaaacaaaagctggaagaaaagcgggcatttgactctgcagtagcaaaagcattagaacatcacagaagtgaaatacaggctgaacaggacagaaagatagaagaagtcagagatgccatggaaaatgaaatgagaacccagcttcgccgacaggcagctgcccacactgatcacttgcgagatgtccttagggtacaagaacaggaattgaagtctgaatttgagcagaacctgtctgagaaactctctgaacaagaattacaatttcgtcgtctcagtcaagagcaagttgacaactttactctggatataaatactgcctatgccagactcagaggaatcgaacaggctgttcagagccatgcagttgctgaagaggaagccagaaaagcccaccaactctggctttcagtggaggcattaaagtacagcatgaagacctcatctgcagaaacacctactatcccgctgggtagtgcagttgaggccatcaaagccaactgttctgataatgaattcacccaagctttaaccgcagctatccctccagagtccctgacccgtggggtgtacagtgaagagacccttagagcccgtttctatgctgttcaaaaactggcccgaagggtagcaatgattgatgaaaccagaaatagcttgtaccagtacttcctctcctacctacagtccctgctcctattcccacctcagcaactgaagccgcccccagagctctgccctgaggatataaacacatttaaattactgtcatatgcttcctattgcattgagcatggtgatctggagctagcagcaaagtttgtcaatcagctgaagggggaatccagacgagtggcacaggactggctgaaggaagcccgaatgaccctagaaacgaaacagatagtggaaatcctgacagcatatgccagcgccgtaggaataggaaccactcaggtgcagccagagtgaggtttaggaagattttcataaagtcatatttcatgtcaaaggaaatcagcagtgatagatgaagggttcgcagcgagagtcccggacttgtctagaaatgagcaggtttacaagtactgttctaaatgttaacacctgttgcatttatattctttccatttgctatcatgtcagtgaacgccaggagtgctttctttgcaacttgtgtaacattttctgttttttcaggttttactgatgaggcttgtgaggccaatcaaaataatgtttgtgatctctactactgttgattttgccctcggagcaaactgaataaagcaacaagatgaaaaaaaaaaaaaaaaaaaaaaaaaaatttggggcggcctgggccccaaaagagttttagagaccccaatcgcgtggggggcggcgagggcccccagtagaggtcaagttgcacaaatggggccatagcgtggttcccagagaagacaactcgcgggcgaggcacatcgtggcgtgcgcttccttccaccaaataagaacaagcccccggggggccaccggaccggtttgacaaaaacacgaaggcgggtcgggaggccatacaggggatctcacacggggtccacagcgagtcgaaatcaattcgccggcacgga

SEQ ID NO: 447185 - DNA, 2017 bp, Homo sapiens
ttccggtgcgccgggcgcggacgcgggcacgcacacacgcaagcacgcctccacttaactcgcgccgccgcggcagctcgagtccaccagcagcgccgtccgcttgaccgagatgctgcgggcctgtcagttatcgggtgtgaccgccgccgcccagagttgtctctgtgggaagtttgtcctccgtccattgcgaccatgccgcagatactctacttcaggcagctctgggttgactactggcaaaattgctggagctggccttttgtttgttggtggaggtattggtggcactatcctatatgccaaatgggattcccatttccgggaaagtgtagagaaaaccataccttactcagacaaactcttcgagatggttcttggtcctgcagcttataatgttccattgccaaagaaatcgattcagtcgggtccactaaaaatctctagtgtatcagaagtaatgaaagaatctaaacagcctgcctcacaactccaaaaacaaaagggagatactccagcttcagcaacagcaggtgataccctgtcggtcccagcccctgcagttcagcctgaggaatctttaaaaactgatcaccctgaaattggtgaaggaaaacccacacctgcactttcagaagaagcatcctcatcttctataagggagcgaccacctgaagaagttgcagctcgccttgcacaacaggaaaaacaagaacaagttaaaattgagtctctagccaagagcttagaagatgctctgaggcaaactgcaagtgtcactctgcaggctattgcagctcagaatgctgcggtccaggctgtcaatgcacactccaacatattgaaagccgccatggacaattctgagattgcaggcgagaagaaatctgctcagtggcgcacagtggagggtgcattgaaggaacgcagaaaggcagtagatgaagctgccgatgcccttctcaaagccaaagaagagttagagaagatgaaaagtgtgattgaaaatgcaaagaaaaaagaggttgctggggccaagcctcatataactgctgcagagggtaaacttcacaacatgatagttgatctggataatgtggtcaaaaaggtccaagcagctcagtctgaggctaaggttgtatctcagtatcatgagctggtggtccaagctcgggatgactttaaacgagagctggacagtattactccagaagtccttcctgggtggaaaggaatgagtgtttcagacttagctgacaagctctctactgatgatctgaactccctcattgctcatgcacatcgtcgtattgatcagctgaacagagagctggcagaacagaaggccaccgaaaagcagcacatcacgttagccttggagaaacaaaagctggaagaaaagcgggcatttgactctgcagtagcaaaagcattagaacatcacagaagtgaaatacaggctgaacaggacagaaagatagaagaagtcagagatgccatggaaaatgaaatgagaacccagcttcgccgacaggcagctgcccacactgatcacttgcgagatgtccttagggtacaagaacaggaattgaagtctgaatttgagcagaacctgtctgagaaactctctgaacaagaattacaatttcgtcgtctcagtcaagagcaagttgacaactttactctggatataaatactgcctatgccagactcagaggaatcgaacaggctgttcagagccatgcagttgctgaagaggaagccagaaaagcccaccaactctggctttcagtggaggcattaaagtacagcatgaagacctcatctgcagaaacacctactatcccgctgggtagtgcagttgaggccatcaaagccaactgttctgataatgaattcacccaagctttaaccgcagctcgcccctgagttagcagctcgcccctgagttacccgcagctcgcccctgagttagcagctcgcccctggttagcagctcgccctgagttagca

SEQ ID NO: 447186 - DNA, 1742 bp, Homo sapiens
ttccggtgcgccgggcgcggacgcgggcacgcacacacgcaagcacgcctccacttaactcgcgccgccgcggcagctcgagtccaccagcagcgccgtccgcttgaccgagatgctgcgggcctgtcagttatcgggtgtgaccgccgccgcccagagttgtctctgtgggaagtttgtcctccgtccattgcgaccatgccgcagatactctacttcaggcagctctgggttgactactggcaaaattgctggagctggccttttgtttgttggtggaggtattggtggcactatcctatatgccaaatgggattcccatttccgggaaagtgtagagaaaaccataccttactcagacaaactcttcgagatggttcttggtcctgcagcttataatgttccattgccaaagaaatcgattcagtcgggtccactaaaaatctctagtgtatcagaagtaatgaaagaatctaaacagcctgcctcacaactccaaaaacaaaagggagatactccagcttcagcaacagcaggtgataccctgtcggtcccagcccctgcagttcagcctgaggaatctttaaaaactgatcaccctgaaattggtgaaggaaaacccacacctgcactttcagaagaagcatcctcatcttctataagggagcgaccacctgaagaagttgcagctcgccttgcacaacaggaaaaacaagaacaagttaaaattgagtctctagccaagagcttagaagatgctctgaggcaaactgcaagtgtcactctgcaggctattgcagctcagaatgctgcggtccaggctgtcaatgcacactccaacatattgaaagccgccatggacaattctgagattgcaggcgagaagaaatctgctcagtggcgcacagtggagggtgcattgaaggaacgcagaaaggcagtagatgaagctgccgatgcccttctcaaagccaaagaagagttagagaagatgaaaagtgtgattgaaaatgcaaagaaaaaagaggttgctggggccaagcctcatataactgctgcagagggtaaacttcacaacatgatagttgatctggataatgtggtcaaaaaggtatgtttcctaagtcttatagtattttatattttaaaatataatctcttaaaggattttaaggatttaggaaaacagcaaattcctaccatctccccgtcttttctcctgcaaagtgtattcgttgttactgttttaaaaaatttgccttggctgggtgtggtggttcacacctgtaatcccagcactttggcaggccgaggtgggcagataacttgagcccaggagtttgagaccagcctgggcaacatggtgaaactctgtttctacaaaaaatacaaaaataagtggatgtggtggtgtgcgcctgtagtcctagctactcaggagactgaggtgagaggatgacttgggcctgggaggttgaggctgcagtgagctgagatggtgccactgcactctatcctgggtgacagagtgagaccctgtcaaaaaaaaaaaaattttttttttttgccttggacaccaaccaagtggattgttccatattgttgatactttctataatagataacatttttggttatgattattgtcacttatgaaaatgtccattttgtagcagatcttctgcctgcacttatatgatatgtatggagggagggggcatagtaagatgggaaagggcctg

SEQ ID NO: 447187 - DNA, 1161 bp, Homo sapiens
ttccggtgcgccgggcgcggacgcgggcacgcacacacgcaagcacgcctccacttaactcgcgccgccgcggcagctcgagtccaccagcagcgccgtccgcttgaccgagatgctgcgggcctgtcagttatcgggtgtgaccgccgccgcccagagttgtctctgtgggaagtttgtcctccgtccattgcgaccatgccgcagatactctacttcaggcagctctgggttgactactggcaaaattgctggagctggccttttgtttgttggtggaggtattggtggcactatcctatatgccaaatgggattcccatttccgggaaagtgtagagaaaaccataccttactcagacaaactcttcgagatggttcttggtcctgcagcttataatgttccattgccaaagaaatcggaaacattgtttatgtgtatatacgagagcttttgctcaggagtagaaggatagattccaggctattagcagtggctacctaagagagtggaaagggaaaggagcagtgaagaggcaagttaaagccactgatatatcttggcattattttgcttgttacagtaaacagtcttcatcattcaaaaataatattttaatgaaaatggaaataattctggtttctggtagtgactaagttcagaaccaccctgttgtgtttaagtagtcatgttagggatatctgagtcctactagtctcaatctccaacacatatgggcccttagaacataccggtaccataaaccctaaactactccaatgctaaaataaccgtcccaacaattatatactacatgaatgatttccaaaaaacacataatttgaatcaacacaacacccacagctatattagcatcatccctctactattttaacaaatcaacaagactattagtgttgcccaactttctcgaccctaaaaccccctctaatactaatactgatcgtacctcacaatcaggaagccaagcatttccagtgaacatatcagaaaaaatctactctctatataattcctaaattcttattatacttacggctggtgacgggcagattcgtctcaaaagaaaagagtggttatatgcggtggatggagagaggcggagcgggatgtaatgacgggtgggcttgaattttgtaa

SEQ ID NO: 447188 - DNA, 4825 bp, Homo sapiens
ccagcggacagtgacaacccagcctcaaacctggtccctactttaggccaagcgtcagcttttttagttcaaccctgatttccactccagacaaggacaaataacctcttggtcggggccccagatgaagtccccgcggtgtgctctcctggcccttgtcaatttcggggtgccccctcctctccatccgcacccgactgcacgcgcctccctgggaccccgcactggcgagccgtccctcccggcgctggacgccccacctgtcccggcgccgtcggaagagccctgcagagtgagcccctagggccaccccgctgccttcctccccgtccccgcagccgctgtagccagcgtgggagccgggcaggtcgcgtggggcgctggacttaccgagaggttagcgccgccgtcgggggagggcgtgtcccgcacgtgtgtgtccgcgcgtgtccgcgcccgcgtgtgccagcgcgcgtgccttggccgtgcgcgccgagccgggtcgcactaactccctcggcgccgacgggctcagcccatggttattccaggatctttggagacccgaggaaagccgtgttgaccaaaagcaagacaaatgactcacagagaaaaaagatggcagaaccaagggcaactaaagccgtcaggttctgaacagctggtagatgggctggcttactgaaggacatgattcagactgtcccggacccagcagctcatatcaaggaagccttatcagttgtgagtgaggaccagtcgttgtttgagtgtgcctacggaacgccacacctggctaagacagagatgaccgcgtcctcctccagcgactatggacagacttccaagatgagcccacgcgtccctcagcaggattggctgtctcaacccccagccagggtcaccatcaaaatggaatgtaaccctagccaggtgaatggctcaaggaactctcctgatgaatgcagtgtggccaaaggcgggaagatggtgggcagcccagacaccgttgggatgaactacggcagctacatggaggagaagcacatgccacccccaaacatgaccacgaacgagcgcagagttatcgtgccagcagatcctacgctatggagtacagaccatgtgcggcagtggctggagtgggcggtgaaagaatatggccttccagacgtcaacatcttgttattccagaacatcgatgggaaggaactgtgcaagatgaccaaggacgacttccagaggctcacccccagctacaacgccgacatccttctctcacatctccactacctcagagagactcctcttccacatttgacttcagatgatgttgataaagccttacaaaactctccacggttaatgcatgctagaaacacagatttaccatatgagccccccaggagatcagcctggaccggtcacggccaccccacgccccagtcgaaagctgctcaaccatctccttccacagtgcccaaaactgaagaccagcgtcctcagttagatccttatcagattcttggaccaacaagtagccgccttgcaaatccaggcagtggccagatccagctttggcagttcctcctggagctcctgtcggacagctccaactccagctgcatcacctgggaaggcaccaacggggagttcaagatgacggatcccgacgaggtggcccggcgctggggagagcggaagagcaaacccaacatgaactacgataagctcagccgcgccctccgttactactatgacaagaacatcatgaccaaggtccatgggaagcgctacgcctacaagttcgacttccacgggatcgcccaggccctccagccccaccccccggagtcatctctgtacaagtacccctcagacctcccgtacatgggctcctatcacgcccacccacagaagatgaactttgtggcgccccaccctccagccctccccgtgacatcttccagtttttttgctgccccaaacccatactggaattcaccaactgggggtatataccccaacactaggctccccaccagccatatgccttctcatctgggcacttactactaaagacctggcggaggcttttcccatcagcgtgcattcaccagcccatcgccacaaactctatcggagaacatgaatcaaaagtgcctcaagaggaatgaaaaaagctttactggggctggggaaggaagccggggaagagatccaaagactcttgggagggagttactgaagtcttactacagaaatgaggaggatgctaaaaatgtcacgaatatggacatatcatctgtggactgaccttgtaaaagacagtgtatgtagaagcatgaagtcttaaggacaaagtgccaaagaaagtggtcttaagaaatgtataaactttagagtagagtttggaatcccactaatgcaaactgggatgaaactaaagcaatagaaacaacacagttttgacctaacataccgtttataatgccattttaaggaaaactacctgtatttaaaaatagaaacatatcaaaaacaagagaaaagacacgagagagactgtggcccatcaacagacgttgatatgcaactgcatggcatgtgctgttttggttgaaatcaaatacattccgtttgatggacagctgtcagctttctcaaactgtgaagatgacccaaagtttccaactcctttacagtattaccgggactatgaactaaaaggtgggactgaggatgtgtatagagtgagcgtgtgattgtagacagaggggtgaagaaggaggaggaagaggcagagaaggaggagaccagggctgggaaagaaacttctcaagcaatgaagactggactcaggacatttggggactgtgtacaatgagttatggagactcgagggttcatgcagtcagtgttataccaaacccagtgttaggagaaaggacacagcgtaatggagaaaggggaagtagtagaattcagaaacaaaaatgcgcatctctttctttgtttgtcaaatgaaaattttaactggaattgtctgatatttaagagaaacattcaggacctcatcattatgtgggggctttgttctccacagggtcaggtaagagatggccttcttggctgccacaatcagaaatcacgcaggcattttgggtaggcggcctccagttttcctttgagtcgcgaacgctgtgcgtttgtcagaatgaagtatacaagtcaatgtttttccccctttttatataataattatataacttatgcatttatacactacgagttgatctcggccagccaaagacacacgacaaaagagacaatcgatataatgtggccttgaattttaactctgtatgcttaatgtttacaatatgaagttattagttcttagaatgcagaatgtatgtaataaaataagcttggcctagcatggcaaatcagatttatacaggagtctgcatttgcactttttttagtgactaaagttgcttaatgaaaacatgtgctgaatgttgtggattttgtgttataatttactttgtccaggaacttgtgcaagggagagccaaggaaataggatgtttggcacccaaatggcgtcagcctctccaggtccttcttgcctcccctcctgtcttttatttctagccccttttggaacagaaggaccccgggtttcacattggagcctccatatttatgcctggaatggaaagaggcctatgaagctggggttgtcattgagaaattctagttcagcacctggtcacaaatcacccttaattcctgctatgattaaaatacatttgttgaacagtgaacaagctaccactcgtaaggcaaactgtattattactggcaaataaagcgtcatggatagctgcaatttctcactttacagaaacaagggataacgtctagatttgctgcggggtttctctttcaggagctctcactaggtagacagctttagtcctgctacatcagagttacctgggcactgtggcttgggattcactagccctgagcctgatgttgctggctatcccttgaagacaatgtttatttccataatctagagtcagtttccctgggcatcttttctttgaatcacaaatgctgccaaccttggtccaggtgaaggcaactcaaaaggtgaaaatacaaggtgaccgtgcgaaggcgctagccgaaacatcttagctgaataggtttctgaactggcccttttcatagctgtttcagggcctgtttttttcacgttgcagtccttttgctatgattatgtgaagttgccaaacctctgtgctgtggatgttttggcagtgggctttgaagtcggcaggacacgattaccaatgctcctgacaccccgtgtcatttggattagacggagcccaaccatccatcattttgcagcagcctgggaaggcccacaaagtgcccgtatctccttagggaaaataaataaatacaatcatgaaagctggcagttaggctgacccaaactgtgctaatggaaaagatcagtcatttttattttggaatgcaaagtcaagacacacctacattcttcatagaaatacacatttacttggataatcactcagttctctcttcaagactgtctcatgagcaagatcataaaaacaagacatgattatcatattcaattttaacagatgttttccattagatccctcaaccctccacccccagtccaggttattagcaagtcttatgagcaactgggataattttggataacatgataatactgagttccttcaaatacataattcttaaattgttt

SEQ ID NO: 447189 - DNA, 600 bp, Homo sapiens
ccagcggacagtgacaacccagcctcaaacctggtccctactttaggccaagcgtcagcttttttagttcaaccctgatttccactccagacaaggacaaataacctcttggtcggggccccagatgaagtccccgcggtgtgctctcctggcccttgtcaatttcggggtgccccctcctctccatccgcacccgactgcacgcgcctccctgggaccccgcactggcgagccgtccctcccggcgctggacgccccacctgtcccggcgccgtcggaagagccctgcagagtgagcccctagggccaccccgctgccttcctccccgtccccgcagccgctgtagccagcgtgggagccgggcaggtcgcgtggggcgctggacttaccgagaggttagcgccgccgtcgggggagggcgtgtcccgcacgtgtgtgtccgcgcgtgtccgcgcccgcgtgtgccagcgcgcgtgccttggccgtgcgcgccgagccgggtcgcactaactccctcggcgccgacgggctcagcccatggtgtgggcgccgggttcagggaggctccggctcccgccaatcgcggagcagggcggccg

SEQ ID NO: 447190 - DNA, 4607 bp, Homo sapiens
ccagcggacagtgacaacccagcctcaaacctggtccctactttaggccaagcgtcagcttttttagttcaaccctgatttccactccagacaaggacaaataacctcttggtcggggccccagatgaagtccccgcggtgtgctctcctggcccttgtcaatttcggggtgccccctcctctccatccgcacccgactgcacgcgcctccctgggaccccgcactggcgagccgtccctcccggcgctggacgccccacctgtcccggcgccgtcggaagagccctgcagagtgagcccctagggccaccccgctgccttcctccccgtccccgcagccgctgtagccagcgtgggagccgggcaggtcgcgtggggcgctggacttaccgagaggttagcgccgccgtcgggggagggcgtgtcccgcacgtgtgtgtccgcgcgtgtccgcgcccgcgtgtgccagcgcgcgtgccttggccgtgcgcgccgagccgggtcgcactaactccctcggcgccgacgggctcagcccatggttattccaggatctttggagacccgaggaaagccgtgttgaccaaaagcaagacaaatgactcacagagaaaaaagatggcagaaccaagggcaactaaagccgtcaggttctgaacagctggtagatgggctggcttactgaaggacatgattcagactgtcccggacccagcagctcatatcaaggaactctcctgatgaatgcagtgtggccaaaggcgggaagatggtgggcagcccagacaccgttgggatgaactacggcagctacatggaggagaagcacatgccacccccaaacatgaccacgaacgagcgcagagttatcgtgccagcagatcctacgctatggagtacagaccatgtgcggcagtggctggagtgggcggtgaaagaatatggccttccagacgtcaacatcttgttattccagaacatcgatgggaaggaactgtgcaagatgaccaaggacgacttccagaggctcacccccagctacaacgccgacatccttctctcacatctccactacctcagagagactcctcttccacatttgacttcagatgatgttgataaagccttacaaaactctccacggttaatgcatgctagaaacacagatttaccatatgagccccccaggagatcagcctggaccggtcacggccaccccacgccccagtcgaaagctgctcaaccatctccttccacagtgcccaaaactgaagaccagcgtcctcagttagatccttatcagattcttggaccaacaagtagccgccttgcaaatccaggcagtggccagatccagctttggcagttcctcctggagctcctgtcggacagctccaactccagctgcatcacctgggaaggcaccaacggggagttcaagatgacggatcccgacgaggtggcccggcgctggggagagcggaagagcaaacccaacatgaactacgataagctcagccgcgccctccgttactactatgacaagaacatcatgaccaaggtccatgggaagcgctacgcctacaagttcgacttccacgggatcgcccaggccctccagccccaccccccggagtcatctctgtacaagtacccctcagacctcccgtacatgggctcctatcacgcccacccacagaagatgaactttgtggcgccccaccctccagccctccccgtgacatcttccagtttttttgctgccccaaacccatactggaattcaccaactgggggtatataccccaacactaggctccccaccagccatatgccttctcatctgggcacttactactaaagacctggcggaggcttttcccatcagcgtgcattcaccagcccatcgccacaaactctatcggagaacatgaatcaaaagtgcctcaagaggaatgaaaaaagctttactggggctggggaaggaagccggggaagagatccaaagactcttgggagggagttactgaagtcttactacagaaatgaggaggatgctaaaaatgtcacgaatatggacatatcatctgtggactgaccttgtaaaagacagtgtatgtagaagcatgaagtcttaaggacaaagtgccaaagaaagtggtcttaagaaatgtataaactttagagtagagtttggaatcccactaatgcaaactgggatgaaactaaagcaatagaaacaacacagttttgacctaacataccgtttataatgccattttaaggaaaactacctgtatttaaaaatagaaacatatcaaaaacaagagaaaagacacgagagagactgtggcccatcaacagacgttgatatgcaactgcatggcatgtgctgttttggttgaaatcaaatacattccgtttgatggacagctgtcagctttctcaaactgtgaagatgacccaaagtttccaactcctttacagtattaccgggactatgaactaaaaggtgggactgaggatgtgtatagagtgagcgtgtgattgtagacagaggggtgaagaaggaggaggaagaggcagagaaggaggagaccagggctgggaaagaaacttctcaagcaatgaagactggactcaggacatttggggactgtgtacaatgagttatggagactcgagggttcatgcagtcagtgttataccaaacccagtgttaggagaaaggacacagcgtaatggagaaaggggaagtagtagaattcagaaacaaaaatgcgcatctctttctttgtttgtcaaatgaaaattttaactggaattgtctgatatttaagagaaacattcaggacctcatcattatgtgggggctttgttctccacagggtcaggtaagagatggccttcttggctgccacaatcagaaatcacgcaggcattttgggtaggcggcctccagttttcctttgagtcgcgaacgctgtgcgtttgtcagaatgaagtatacaagtcaatgtttttccccctttttatataataattatataacttatgcatttatacactacgagttgatctcggccagccaaagacacacgacaaaagagacaatcgatataatgtggccttgaattttaactctgtatgcttaatgtttacaatatgaagttattagttcttagaatgcagaatgtatgtaataaaataagcttggcctagcatggcaaatcagatttatacaggagtctgcatttgcactttttttagtgactaaagttgcttaatgaaaacatgtgctgaatgttgtggattttgtgttataatttactttgtccaggaacttgtgcaagggagagccaaggaaataggatgtttggcacccaaatggcgtcagcctctccaggtccttcttgcctcccctcctgtcttttatttctagccccttttggaacagaaggaccccgggtttcacattggagcctccatatttatgcctggaatggaaagaggcctatgaagctggggttgtcattgagaaattctagttcagcacctggtcacaaatcacccttaattcctgctatgattaaaatacatttgttgaacagtgaacaagctaccactcgtaaggcaaactgtattattactggcaaataaagcgtcatggatagctgcaatttctcactttacagaaacaagggataacgtctagatttgctgcggggtttctctttcaggagctctcactaggtagacagctttagtcctgctacatcagagttacctgggcactgtggcttgggattcactagccctgagcctgatgttgctggctatcccttgaagacaatgtttatttccataatctagagtcagtttccctgggcatcttttctttgaatcacaaatgctgccaaccttggtccaggtgaaggcaactcaaaaggtgaaaatacaaggtgaccgtgcgaaggcgctagccgaaacatcttagctgaataggtttctgaactggcccttttcatagctgtttcagggcctgtttttttcacgttgcagtccttttgctatgattatgtgaagttgccaaacctctgtgctgtggatgttttggcagtgggctttgaagtcggcaggacacgattaccaatgctcctgacaccccgtgtcatttggattagacggagcccaaccatccatcattttgcagcagcctgggaaggcccacaaagtgcccgtatctccttagggaaaataaataaatacaatcatgaaagctggcagttaggctgacccaaactgtgctaatggaaaagatcagtcatttttattttggaatgcaaagtcaagacacacctacattcttcatagaaatacacatttacttggataatcactcagttctctcttcaagactgtctcatgagcaagatcataaaaacaagacatgattatcatattcaattttaacagatgttttccattagatccctcaaccctccacccccagtccaggttattagcaagtcttatgagcaactgggataattttggataacatgataatactgagttccttcaaatacataattcttaaattgttt

SEQ ID NO: 447191 - DNA, 4208 bp, Homo sapiens
cgctctaaacaacctcatcaaaactactttctggtcagagagaagcaataattattattaacatttattaacgatcaataaacttgattgcattatggccagcactattaaggaagccttatcagttgtgagtgaggaccagtcgttgtttgagtgtgcctacggaacgccacacctggctaagacagagatgaccgcgtcctcctccagcgactatggacagacttccaagatgagcccacgcgtccctcagcaggattggctgtctcaacccccagccagggtcaccatcaaaatggaatgtaaccctagccaggtgaatggctcaaggaactctcctgatgaatgcagtgtggccaaaggcgggaagatggtgggcagcccagacaccgttgggatgaactacggcagctacatggaggagaagcacatgccacccccaaacatgaccacgaacgagcgcagagttatcgtgccagcagatcctacgctatggagtacagaccatgtgcggcagtggctggagtgggcggtgaaagaatatggccttccagacgtcaacatcttgttattccagaacatcgatgggaaggaactgtgcaagatgaccaaggacgacttccagaggctcacccccagctacaacgccgacatccttctctcacatctccactacctcagagagactcctcttccacatttgacttcagatgatgttgataaagccttacaaaactctccacggttaatgcatgctagaaacacagatttaccatatgagccccccaggagatcagcctggaccggtcacggccaccccacgccccagtcgaaagctgctcaaccatctccttccacagtgcccaaaactgaagaccagcgtcctcagttagatccttatcagattcttggaccaacaagtagccgccttgcaaatccaggcagtggccagatccagctttggcagttcctcctggagctcctgtcggacagctccaactccagctgcatcacctgggaaggcaccaacggggagttcaagatgacggatcccgacgaggtggcccggcgctggggagagcggaagagcaaacccaacatgaactacgataagctcagccgcgccctccgttactactatgacaagaacatcatgaccaaggtccatgggaagcgctacgcctacaagttcgacttccacgggatcgcccaggccctccagccccaccccccggagtcatctctgtacaagtacccctcagacctcccgtacatgggctcctatcacgcccacccacagaagatgaactttgtggcgccccaccctccagccctccccgtgacatcttccagtttttttgctgccccaaacccatactggaattcaccaactgggggtatataccccaacactaggctccccaccagccatatgccttctcatctgggcacttactactaaagacctggcggaggcttttcccatcagcgtgcattcaccagcccatcgccacaaactctatcggagaacatgaatcaaaagtgcctcaagaggaatgaaaaaagctttactggggctggggaaggaagccggggaagagatccaaagactcttgggagggagttactgaagtcttactacagaaatgaggaggatgctaaaaatgtcacgaatatggacatatcatctgtggactgaccttgtaaaagacagtgtatgtagaagcatgaagtcttaaggacaaagtgccaaagaaagtggtcttaagaaatgtataaactttagagtagagtttggaatcccactaatgcaaactgggatgaaactaaagcaatagaaacaacacagttttgacctaacataccgtttataatgccattttaaggaaaactacctgtatttaaaaatagaaacatatcaaaaacaagagaaaagacacgagagagactgtggcccatcaacagacgttgatatgcaactgcatggcatgtgctgttttggttgaaatcaaatacattccgtttgatggacagctgtcagctttctcaaactgtgaagatgacccaaagtttccaactcctttacagtattaccgggactatgaactaaaaggtgggactgaggatgtgtatagagtgagcgtgtgattgtagacagaggggtgaagaaggaggaggaagaggcagagaaggaggagaccagggctgggaaagaaacttctcaagcaatgaagactggactcaggacatttggggactgtgtacaatgagttatggagactcgagggttcatgcagtcagtgttataccaaacccagtgttaggagaaaggacacagcgtaatggagaaaggggaagtagtagaattcagaaacaaaaatgcgcatctctttctttgtttgtcaaatgaaaattttaactggaattgtctgatatttaagagaaacattcaggacctcatcattatgtgggggctttgttctccacagggtcaggtaagagatggccttcttggctgccacaatcagaaatcacgcaggcattttgggtaggcggcctccagttttcctttgagtcgcgaacgctgtgcgtttgtcagaatgaagtatacaagtcaatgtttttccccctttttatataataattatataacttatgcatttatacactacgagttgatctcggccagccaaagacacacgacaaaagagacaatcgatataatgtggccttgaattttaactctgtatgcttaatgtttacaatatgaagttattagttcttagaatgcagaatgtatgtaataaaataagcttggcctagcatggcaaatcagatttatacaggagtctgcatttgcactttttttagtgactaaagttgcttaatgaaaacatgtgctgaatgttgtggattttgtgttataatttactttgtccaggaacttgtgcaagggagagccaaggaaataggatgtttggcacccaaatggcgtcagcctctccaggtccttcttgcctcccctcctgtcttttatttctagccccttttggaacagaaggaccccgggtttcacattggagcctccatatttatgcctggaatggaaagaggcctatgaagctggggttgtcattgagaaattctagttcagcacctggtcacaaatcacccttaattcctgctatgattaaaatacatttgttgaacagtgaacaagctaccactcgtaaggcaaactgtattattactggcaaataaagcgtcatggatagctgcaatttctcactttacagaaacaagggataacgtctagatttgctgcggggtttctctttcaggagctctcactaggtagacagctttagtcctgctacatcagagttacctgggcactgtggcttgggattcactagccctgagcctgatgttgctggctatcccttgaagacaatgtttatttccataatctagagtcagtttccctgggcatcttttctttgaatcacaaatgctgccaaccttggtccaggtgaaggcaactcaaaaggtgaaaatacaaggtgaccgtgcgaaggcgctagccgaaacatcttagctgaataggtttctgaactggcccttttcatagctgtttcagggcctgtttttttcacgttgcagtccttttgctatgattatgtgaagttgccaaacctctgtgctgtggatgttttggcagtgggctttgaagtcggcaggacacgattaccaatgctcctgacaccccgtgtcatttggattagacggagcccaaccatccatcattttgcagcagcctgggaaggcccacaaagtgcccgtatctccttagggaaaataaataaatacaatcatgaaagctggcagttaggctgacccaaactgtgctaatggaaaagatcagtcatttttattttggaatgcaaagtcaagacacacctacattcttcatagaaatacacatttacttggataatcactcagttctctcttcaagactgtctcatgagcaagatcataaaaacaagacatgattatcatattcaattttaacagatgttttccattagatccctcaaccctccacccccagtccaggttattagcaagtcttatgagcaactgggataattttggataacatgataatactgagttccttcaaatacataattcttaaattgttt

SEQ ID NO: 447192 - DNA, 4127 bp, Homo sapiens
cgctctaaacaacctcatcaaaactactttctggtcagagagaagcaataattattattaacatttattaacgatcaataaacttgattgcattatggccagcactattaaggaagccttatcagttgtgagtgaggaccagtcgttgtttgagtgtgcctacggaacgccacacctggctaagacagagatgaccgcgtcctcctccagcgactatggacagacttccaagatgagcccacgcgtccctcagcaggattggctgtctcaacccccagccagggtcaccatcaaaatggaatgtaaccctagccaggtgaatggctcaaggaactctcctgatgaatgcagtgtggccaaaggcgggaagatggtgggcagcccagacaccgttgggatgaactacggcagctacatggaggagaagcacatgccacccccaaacatgaccacgaacgagcgcagagttatcgtgccagcagatcctacgctatggagtacagaccatgtgcggcagtggctggagtgggcggtgaaagaatatggccttccagacgtcaacatcttgttattccagaacatcgatgggaaggaactgtgcaagatgaccaaggacgacttccagaggctcacccccagctacaacgccgacatccttctctcacatctccactacctcagagagaatttaccatatgagccccccaggagatcagcctggaccggtcacggccaccccacgccccagtcgaaagctgctcaaccatctccttccacagtgcccaaaactgaagaccagcgtcctcagttagatccttatcagattcttggaccaacaagtagccgccttgcaaatccaggcagtggccagatccagctttggcagttcctcctggagctcctgtcggacagctccaactccagctgcatcacctgggaaggcaccaacggggagttcaagatgacggatcccgacgaggtggcccggcgctggggagagcggaagagcaaacccaacatgaactacgataagctcagccgcgccctccgttactactatgacaagaacatcatgaccaaggtccatgggaagcgctacgcctacaagttcgacttccacgggatcgcccaggccctccagccccaccccccggagtcatctctgtacaagtacccctcagacctcccgtacatgggctcctatcacgcccacccacagaagatgaactttgtggcgccccaccctccagccctccccgtgacatcttccagtttttttgctgccccaaacccatactggaattcaccaactgggggtatataccccaacactaggctccccaccagccatatgccttctcatctgggcacttactactaaagacctggcggaggcttttcccatcagcgtgcattcaccagcccatcgccacaaactctatcggagaacatgaatcaaaagtgcctcaagaggaatgaaaaaagctttactggggctggggaaggaagccggggaagagatccaaagactcttgggagggagttactgaagtcttactacagaaatgaggaggatgctaaaaatgtcacgaatatggacatatcatctgtggactgaccttgtaaaagacagtgtatgtagaagcatgaagtcttaaggacaaagtgccaaagaaagtggtcttaagaaatgtataaactttagagtagagtttggaatcccactaatgcaaactgggatgaaactaaagcaatagaaacaacacagttttgacctaacataccgtttataatgccattttaaggaaaactacctgtatttaaaaatagaaacatatcaaaaacaagagaaaagacacgagagagactgtggcccatcaacagacgttgatatgcaactgcatggcatgtgctgttttggttgaaatcaaatacattccgtttgatggacagctgtcagctttctcaaactgtgaagatgacccaaagtttccaactcctttacagtattaccgggactatgaactaaaaggtgggactgaggatgtgtatagagtgagcgtgtgattgtagacagaggggtgaagaaggaggaggaagaggcagagaaggaggagaccagggctgggaaagaaacttctcaagcaatgaagactggactcaggacatttggggactgtgtacaatgagttatggagactcgagggttcatgcagtcagtgttataccaaacccagtgttaggagaaaggacacagcgtaatggagaaaggggaagtagtagaattcagaaacaaaaatgcgcatctctttctttgtttgtcaaatgaaaattttaactggaattgtctgatatttaagagaaacattcaggacctcatcattatgtgggggctttgttctccacagggtcaggtaagagatggccttcttggctgccacaatcagaaatcacgcaggcattttgggtaggcggcctccagttttcctttgagtcgcgaacgctgtgcgtttgtcagaatgaagtatacaagtcaatgtttttccccctttttatataataattatataacttatgcatttatacactacgagttgatctcggccagccaaagacacacgacaaaagagacaatcgatataatgtggccttgaattttaactctgtatgcttaatgtttacaatatgaagttattagttcttagaatgcagaatgtatgtaataaaataagcttggcctagcatggcaaatcagatttatacaggagtctgcatttgcactttttttagtgactaaagttgcttaatgaaaacatgtgctgaatgttgtggattttgtgttataatttactttgtccaggaacttgtgcaagggagagccaaggaaataggatgtttggcacccaaatggcgtcagcctctccaggtccttcttgcctcccctcctgtcttttatttctagccccttttggaacagaaggaccccgggtttcacattggagcctccatatttatgcctggaatggaaagaggcctatgaagctggggttgtcattgagaaattctagttcagcacctggtcacaaatcacccttaattcctgctatgattaaaatacatttgttgaacagtgaacaagctaccactcgtaaggcaaactgtattattactggcaaataaagcgtcatggatagctgcaatttctcactttacagaaacaagggataacgtctagatttgctgcggggtttctctttcaggagctctcactaggtagacagctttagtcctgctacatcagagttacctgggcactgtggcttgggattcactagccctgagcctgatgttgctggctatcccttgaagacaatgtttatttccataatctagagtcagtttccctgggcatcttttctttgaatcacaaatgctgccaaccttggtccaggtgaaggcaactcaaaaggtgaaaatacaaggtgaccgtgcgaaggcgctagccgaaacatcttagctgaataggtttctgaactggcccttttcatagctgtttcagggcctgtttttttcacgttgcagtccttttgctatgattatgtgaagttgccaaacctctgtgctgtggatgttttggcagtgggctttgaagtcggcaggacacgattaccaatgctcctgacaccccgtgtcatttggattagacggagcccaaccatccatcattttgcagcagcctgggaaggcccacaaagtgcccgtatctccttagggaaaataaataaatacaatcatgaaagctggcagttaggctgacccaaactgtgctaatggaaaagatcagtcatttttattttggaatgcaaagtcaagacacacctacattcttcatagaaatacacatttacttggataatcactcagttctctcttcaagactgtctcatgagcaagatcataaaaacaagacatgattatcatattcaattttaacagatgttttccattagatccctcaaccctccacccccagtccaggttattagcaagtcttatgagcaactgggataattttggataacatgataatactgagttccttcaaatacataattcttaaattgttt

SEQ ID NO: 447193 - DNA, 858 bp, Homo sapiens
cgctctaaacaacctcatcaaaactactttctggtcagagagaagcaataattattattaacatttattaacgatcaataaacttgattgcattatggccagcactattaaggaagccttatcagttgtgagtgaggaccagtcgttgtttgagtgtgcctacggaacgccacacctggctaagacagagatgaccgcgtcctcctccagcgactatggacagacttccaagatgagcccacgcgtccctcagcaggattggctgtctcaacccccagccagggtcaccatcaaaatggaatgtaaccctagccaggtgaatggctcaaggaactctcctgatgaatgcagtgtggccaaaggcgggaagatggtgggcagcccagacaccgttgggatgaactacggcagctacatggaggagaagcacatgccacccccaaacatgaccacgaacgagcgcagagttatcgtgccagcagatcctacgctatggagtacagaccatgtgcggcagtggctggagtgggcggtgaaagaatatggccttccagacgtcaacatcttgttattccagaacatcgatgggaaggaactgtgcaagatgaccaaggacgacttccagaggctcacccccagctacaacgccgacatccttctctcacatctccactacctcagagagactcctcttccacatttgacttcagatgatgttgataaagccttacaaaactctccacggttaatgcatgctagaaacacagggggtgcagcttttattttcccaaatacttcagtatatcctgaagctacgcaaagaattacaactaggccagatacgaaaacacccctgtg

SEQ ID NO: 447194 - DNA, 868 bp, Homo sapiens
ccagcggacagtgacaacccagcctcaaacctggtccctactttaggccaagcgtcagcttttttagttcaaccctgatttccactccagacaaggacaaataacctcttggtcggggccccagatgaagtccccgcggtgtgctctcctggcccttgtcaatttcggggtgccccctcctctccatccgcacccgactgcacgcgcctccctgggaccccgcactggcgagccgtccctcccggcgctggacgccccacctgtcccggcgccgtcggaagagccctgcagagtgagcccctagggccaccccgctgccttcctccccgtccccgcagccgctgtagccagcgtgggagccgggcaggtcgcgtggggcgctggacttaccgagaggttagcgccgccgtcgggggagggcgtgtcccgcacgtgtgtgtccgcgcgtgtccgcgcccgcgtgtgccagcgcgcgtgccttggccgtgcgcgccgagccgggtcgcactaactccctcggcgccgacgggctcagcccatggttattccaggatctttggagacccgaggaaagccgtgttgaccaaaagcaagacaaatgactcacagagaaaaaagatggcagaaccaagggcaactaaagccgtcaggttctgaacagctggtagatgggctggcttactgaaggacatgattcagactgtcccggacccagcagctcatatcaagcgagcaggagacaagtaggtgaatgattggatttccgatgttggaacgttgttttatctgggctcgccgacactcagcgctccatcacctcacacctgccctggctgctttctgacctgcacttcctgaggctctggag

SEQ ID NO: 447195 - DNA, 519 bp, Homo sapiens
ttaggatattttaaaataatgtttaagaaataggttttgtcggtacatgtacagttgatccctggtattaatatttgaaaacaaaataaggtttaatattcttcaacttatattcaggttattccaggatctttggagacccgaggaaagccgtgttgaccaaaagcaagacaaatgactcacagagaaaaaagatggcagaaccaagggcaactaaaggtaaaatgaacagaacccaaataatcttatgctgcctagtcaggaccccttttaaaaaatgtggatatgtaaatattttgtatctttcctatttgattttcatggttccaaacctccacagaccatttctggattctttgctgtacttggatgaattatgttggttctacatgacacccttgacttccctgagataagatgccccattgcccagcactgcctgttcctggccctacagtgtggagattttagaattactgccttctcagttctatagtcttcacagcccctcttttctcc

SEQ ID NO: 447196 - DNA, 955 bp, Homo sapiens
cgctctaaacaacctcatcaaaactactttctggtcagagagaagcaataattattattaacatttattaacgatcaataaacttgattgcattatggccagcactattaaggaagccttatcagttgtgagtgaggaccagtcgttgtttgagtgtgcctacggaacgccacacctggctaagacagagatgaccgcgtcctcctccagcgactatggacagacttccaagatgagcccacgcgtccctcagcaggattggctgtctcaacccccagccagggtcaccatcaaaatggaatgtaaccctagccaggtgaatggctcaaggaactctcctgatgaatgcagtgtggccaaaggcgggaagatggtgggcagcccagacaccgttgggatgaactacggcagctacatggaggagaagcacatgccacccccaaacatgaccacgaacgagcgcagagttatcgtgccagcagatcctacgctatggagtacagaccatgtgcggcagtggctggagtgggcggtgaaagaatatggccttccagacgtcaacatcttgttattccagaacatcgatgggaaggaactgtgcaagatgaccaaggacgacttccagaggctcacccccagctacaacgccgacatccttctctcacatctccactacctcagagagactcctcttccacatttgacttcagatgatgttgataaagccttacaaaactctccacggttaatgcatgctagaaacacagatttaccatatgagccccccaggagatcagcctggaccggtcacggccaccccacgccccagtcgaaagctgtcacatctcttcacagtgccaaatgaagacaggtctcggtaatctatgattcttggcacagttcgcctgcaatcgggggccgaccttggatcccgggccggggagccccggctccg

SEQ ID NO: 447197 - DNA, 3526 bp, Homo sapiens
cccactagttacccaccccaaactggatcctacagccaagctccaagtcaatatagccaacagagcagcagctacgggcagcagaatttaccatatgagccccccaggagatcagcctggaccggtcacggccaccccacgccccagtcgaaagctgctcaaccatctccttccacagtgcccaaaactgaagaccagcgtcctcagttagatccttatcagattcttggaccaacaagtagccgccttgcaaatccaggcagtggccagatccagctttggcagttcctcctggagctcctgtcggacagctccaactccagctgcatcacctgggaaggcaccaacggggagttcaagatgacggatcccgacgaggtggcccggcgctggggagagcggaagagcaaacccaacatgaactacgataagctcagccgcgccctccgttactactatgacaagaacatcatgaccaaggtccatgggaagcgctacgcctacaagttcgacttccacgggatcgcccaggccctccagccccaccccccggagtcatctctgtacaagtacccctcagacctcccgtacatgggctcctatcacgcccacccacagaagatgaactttgtggcgccccaccctccagccctccccgtgacatcttccagtttttttgctgccccaaacccatactggaattcaccaactgggggtatataccccaacactaggctccccaccagccatatgccttctcatctgggcacttactactaaagacctggcggaggcttttcccatcagcgtgcattcaccagcccatcgccacaaactctatcggagaacatgaatcaaaagtgcctcaagaggaatgaaaaaagctttactggggctggggaaggaagccggggaagagatccaaagactcttgggagggagttactgaagtcttactacagaaatgaggaggatgctaaaaatgtcacgaatatggacatatcatctgtggactgaccttgtaaaagacagtgtatgtagaagcatgaagtcttaaggacaaagtgccaaagaaagtggtcttaagaaatgtataaactttagagtagagtttggaatcccactaatgcaaactgggatgaaactaaagcaatagaaacaacacagttttgacctaacataccgtttataatgccattttaaggaaaactacctgtatttaaaaatagaaacatatcaaaaacaagagaaaagacacgagagagactgtggcccatcaacagacgttgatatgcaactgcatggcatgtgctgttttggttgaaatcaaatacattccgtttgatggacagctgtcagctttctcaaactgtgaagatgacccaaagtttccaactcctttacagtattaccgggactatgaactaaaaggtgggactgaggatgtgtatagagtgagcgtgtgattgtagacagaggggtgaagaaggaggaggaagaggcagagaaggaggagaccagggctgggaaagaaacttctcaagcaatgaagactggactcaggacatttggggactgtgtacaatgagttatggagactcgagggttcatgcagtcagtgttataccaaacccagtgttaggagaaaggacacagcgtaatggagaaaggggaagtagtagaattcagaaacaaaaatgcgcatctctttctttgtttgtcaaatgaaaattttaactggaattgtctgatatttaagagaaacattcaggacctcatcattatgtgggggctttgttctccacagggtcaggtaagagatggccttcttggctgccacaatcagaaatcacgcaggcattttgggtaggcggcctccagttttcctttgagtcgcgaacgctgtgcgtttgtcagaatgaagtatacaagtcaatgtttttccccctttttatataataattatataacttatgcatttatacactacgagttgatctcggccagccaaagacacacgacaaaagagacaatcgatataatgtggccttgaattttaactctgtatgcttaatgtttacaatatgaagttattagttcttagaatgcagaatgtatgtaataaaataagcttggcctagcatggcaaatcagatttatacaggagtctgcatttgcactttttttagtgactaaagttgcttaatgaaaacatgtgctgaatgttgtggattttgtgttataatttactttgtccaggaacttgtgcaagggagagccaaggaaataggatgtttggcacccaaatggcgtcagcctctccaggtccttcttgcctcccctcctgtcttttatttctagccccttttggaacagaaggaccccgggtttcacattggagcctccatatttatgcctggaatggaaagaggcctatgaagctggggttgtcattgagaaattctagttcagcacctggtcacaaatcacccttaattcctgctatgattaaaatacatttgttgaacagtgaacaagctaccactcgtaaggcaaactgtattattactggcaaataaagcgtcatggatagctgcaatttctcactttacagaaacaagggataacgtctagatttgctgcggggtttctctttcaggagctctcactaggtagacagctttagtcctgctacatcagagttacctgggcactgtggcttgggattcactagccctgagcctgatgttgctggctatcccttgaagacaatgtttatttccataatctagagtcagtttccctgggcatcttttctttgaatcacaaatgctgccaaccttggtccaggtgaaggcaactcaaaaggtgaaaatacaaggtgaccgtgcgaaggcgctagccgaaacatcttagctgaataggtttctgaactggcccttttcatagctgtttcagggcctgtttttttcacgttgcagtccttttgctatgattatgtgaagttgccaaacctctgtgctgtggatgttttggcagtgggctttgaagtcggcaggacacgattaccaatgctcctgacaccccgtgtcatttggattagacggagcccaaccatccatcattttgcagcagcctgggaaggcccacaaagtgcccgtatctccttagggaaaataaataaatacaatcatgaaagctggcagttaggctgacccaaactgtgctaatggaaaagatcagtcatttttattttggaatgcaaagtcaagacacacctacattcttcatagaaatacacatttacttggataatcactcagttctctcttcaagactgtctcatgagcaagatcataaaaacaagacatgattatcatattcaattttaacagatgttttccattagatccctcaaccctccacccccagtccaggttattagcaagtcttatgagcaactgggataattttggataacatgataatactgagttccttcaaatacataattcttaaattgttt

SEQ ID NO: 447198 - DNA, 4118 bp, Homo sapiens
cgctctaaacaacctcatcaaaactactttctggtcagagagaagcaataattattattaacatttattaacgatcaataaacttgattgcattatggccagcactattaaggaagccttatcagttgtgagtgaggaccagtcgttgtttgagtgtgcctacggaacgccacacctggctaagacagagatgaccgcgtcctcctccagcgactatggacagacttccaagatgagcccacgcgtccctcagcaggattggctgtctcaacccccagccagggtcaccatcaaaatggaatgtaaccctagccaggtgaatggctcaaggaactctcctgatgaatgcagtgtggccaaaggcgggaagatggtgggcagcccagacaccgttgggatgaactacggcagctacatggaggagaagcacatgccacccccaaacatgaccacgaacgagcgcagagttatcgtgccagcagatcctacgctatggagtacagaccatgtgcggcagtggctggagtgggcggtgaaagaatatggccttccagacgtcaacatcttgttattccagaacatcgatgggaaggaactgtgcaagatgaccaaggacgacttccagaggctcacccccagctacaacgccgacatccttctctcacatctccactacctcagagagactcctcttccacatttgacttcagatgatgttgataaagccttacaaaactctccacggttaatgcatgctagaaacacagatttaccatatgagccccccaggagatcagcctggaccggtcacggccaccccacgccccagtcgaaagctgctcaaccatctccttccacagtgcccaaaactgaagaccagcgtcctcagttagatccttatcagattcttggaccaacaagtagccgccttgcaaatccaggcagtggccagatccagctttggcagttcctcctggagctcctgtcggacagctccaactccagctgcatcacctgggaaggcaccaacggggagttcaagatgacggatcccgacgaggtggcccggcgctggggagagcggaagagcaaacccaacatgaactacgataagctcagccgcgccctccgttactactatgacaagaacatcatgaccaagtacccctcagacctcccgtacatgggctcctatcacgcccacccacagaagatgaactttgtggcgccccaccctccagccctccccgtgacatcttccagtttttttgctgccccaaacccatactggaattcaccaactgggggtatataccccaacactaggctccccaccagccatatgccttctcatctgggcacttactactaaagacctggcggaggcttttcccatcagcgtgcattcaccagcccatcgccacaaactctatcggagaacatgaatcaaaagtgcctcaagaggaatgaaaaaagctttactggggctggggaaggaagccggggaagagatccaaagactcttgggagggagttactgaagtcttactacagaaatgaggaggatgctaaaaatgtcacgaatatggacatatcatctgtggactgaccttgtaaaagacagtgtatgtagaagcatgaagtcttaaggacaaagtgccaaagaaagtggtcttaagaaatgtataaactttagagtagagtttggaatcccactaatgcaaactgggatgaaactaaagcaatagaaacaacacagttttgacctaacataccgtttataatgccattttaaggaaaactacctgtatttaaaaatagaaacatatcaaaaacaagagaaaagacacgagagagactgtggcccatcaacagacgttgatatgcaactgcatggcatgtgctgttttggttgaaatcaaatacattccgtttgatggacagctgtcagctttctcaaactgtgaagatgacccaaagtttccaactcctttacagtattaccgggactatgaactaaaaggtgggactgaggatgtgtatagagtgagcgtgtgattgtagacagaggggtgaagaaggaggaggaagaggcagagaaggaggagaccagggctgggaaagaaacttctcaagcaatgaagactggactcaggacatttggggactgtgtacaatgagttatggagactcgagggttcatgcagtcagtgttataccaaacccagtgttaggagaaaggacacagcgtaatggagaaaggggaagtagtagaattcagaaacaaaaatgcgcatctctttctttgtttgtcaaatgaaaattttaactggaattgtctgatatttaagagaaacattcaggacctcatcattatgtgggggctttgttctccacagggtcaggtaagagatggccttcttggctgccacaatcagaaatcacgcaggcattttgggtaggcggcctccagttttcctttgagtcgcgaacgctgtgcgtttgtcagaatgaagtatacaagtcaatgtttttccccctttttatataataattatataacttatgcatttatacactacgagttgatctcggccagccaaagacacacgacaaaagagacaatcgatataatgtggccttgaattttaactctgtatgcttaatgtttacaatatgaagttattagttcttagaatgcagaatgtatgtaataaaataagcttggcctagcatggcaaatcagatttatacaggagtctgcatttgcactttttttagtgactaaagttgcttaatgaaaacatgtgctgaatgttgtggattttgtgttataatttactttgtccaggaacttgtgcaagggagagccaaggaaataggatgtttggcacccaaatggcgtcagcctctccaggtccttcttgcctcccctcctgtcttttatttctagccccttttggaacagaaggaccccgggtttcacattggagcctccatatttatgcctggaatggaaagaggcctatgaagctggggttgtcattgagaaattctagttcagcacctggtcacaaatcacccttaattcctgctatgattaaaatacatttgttgaacagtgaacaagctaccactcgtaaggcaaactgtattattactggcaaataaagcgtcatggatagctgcaatttctcactttacagaaacaagggataacgtctagatttgctgcggggtttctctttcaggagctctcactaggtagacagctttagtcctgctacatcagagttacctgggcactgtggcttgggattcactagccctgagcctgatgttgctggctatcccttgaagacaatgtttatttccataatctagagtcagtttccctgggcatcttttctttgaatcacaaatgctgccaaccttggtccaggtgaaggcaactcaaaaggtgaaaatacaaggtgaccgtgcgaaggcgctagccgaaacatcttagctgaataggtttctgaactggcccttttcatagctgtttcagggcctgtttttttcacgttgcagtccttttgctatgattatgtgaagttgccaaacctctgtgctgtggatgttttggcagtgggctttgaagtcggcaggacacgattaccaatgctcctgacaccccgtgtcatttggattagacggagcccaaccatccatcattttgcagcagcctgggaaggcccacaaagtgcccgtatctccttagggaaaataaataaatacaatcatgaaagctggcagttaggctgacccaaactgtgctaatggaaaagatcagtcatttttattttggaatgcaaagtcaagacacacctacattcttcatagaaatacacatttacttggataatcactcagttctctcttcaagactgtctcatgagcaagatcataaaaacaagacatgattatcatattcaattttaacagatgttttccattagatccctcaaccctccacccccagtccaggttattagcaagtcttatgagcaactgggataattttggataacatgataatactgagttccttcaaatacataattcttaaattgttt

SEQ ID NO: 447199 - DNA, 6214 bp, Homo sapiens
tggaccccggacgcggccgagcggcaatggggtgggcgccgttcctgaatccggagcgtttccacgtcgccggctctccacgacccaaccctaatcagaggaccacggtgcgggtcccgcgctctgctccccctcccggaggcgccgttcgctgggagtcgggctggtttcgagaatcgcaggcaccggcgcccaaggcgggaggttcggcttcgcccctcgccctccccctcgcggccattgggctgccccgcggcgcgcccgctggacggggcggggccctccgctctcccctccgctcccctcccctatttcccggggtgggaacgccgggaggcgggaggagagggggctgccaggggcgtccggttacatccccgccttcctctgtcctggccgcgggaccgggtttgcgggaccgcagttcgggaacatgttggcctcgagcagccggatccgggctgcgtggacgcgggcgctgctgctgccgctgctgctggcggggcctgtgggctgcctgagccgccaggagctctttcccttcggccccggacagggggacctggagctggaggacggggatgacttcgtctctcctgccctggagctgagtggggcgctccgcttctacgacagatccgacatcgacgcagtctacgtcaccacaaatggcatcattgctacgagtgaacccccggccaaagaatcccatcccgggctcttcccaccaacattcggtgcagtcgcccctttcctggcggacttggacacgaccgatggcctggggaaggtttattatcgagaagacttatccccctccatcactcagcgagcagcagagtgtgtccacagagggttcccggagatctctttccagcctagtagcgcggtggttgtcacttgggaatccgtggccccctaccaagggcccagcagggacccagaccagaaaggcaagagaaacacgttccaggctgttctagcctcctctgattccagctcctatgccattttcctttatcctgaggatggtctgcagttccatacgacattctcaaagaaggaaaacaaccaagttcctgccgtggttgcattcagtcaaggttcagtgggattcttatggaagagcaacggagcttataacatatttgctaatgacagggaatcaattgaaaatttggccaagagtagtaactctgggcagcagggtgtctgggtgtttgagattgggagtccagccaccaccaatggcgtggtgcctgcagacgtgatcctcggaactgaagatggggcagagtatgatgatgaggatgaagattatgacctggcgaccactcgtctgggcctggaggatgtgggcaccacgcccttctcctacaaggctctgagaaggggaggtgctgacacatacagtgtgcccagcgtcctctccccgcgccgggcagctaccgaaaggccccttggacctcccacagagagaaccaggtctttccagttggcagtggagacttttcaccagcagcaccctcaggtcatagatgtggatgaagttgaggaaacaggagttgttttcagctataacacggattcccgccagacgtgtgctaacaacagacaccagtgctcggtgcacgcagagtgcagggactacgccacgggcttctgctgcagctgtgtcgctggctatacgggcaatggcaggcaatgtgttgcagaaggttccccccagcgagtcaatggcaaggtgaaaggaaggatctttgtggggagcagccaggtccccattgtctttgagaacactgacctccactcttacgtagtaatgaaccacgggcgctcctacacagccatcagcaccattcccgagaccgttggatattctctgcttccactggccccagttggaggcatcattggatggatgtttgcagtggagcaggacggattcaagaatgggttcagcatcaccgggggtgagttcactcgccaggctgaggtgaccttcgtggggcacccgggcaatctggtcattaagcagcggttcagcggcatcgatgagcatgggcacctgaccatcgacacggagctggagggccgcgtgccgcagattccgttcggctcctccgtgcacattgagccctacacggagctgtaccactactccacctcagtgatcacttcctcctccacccgggagtacacggtgactgagcccgagcgagatggggcatctccttcacgcatctacacttaccagtggcgccagaccatcaccttccaggaatgcgtccacgatgactcccggccagccctgcccagcacccagcagctctcggtggacagcgtgttcgtcctgtacaaccaggaggagaagatcttgcgctacgctttcagcaactccattgggcctgtgagggaaggctcccctgatgctcttcagaatccctgctacatcggcactcatgggtgtgacaccaacgcggcctgtcgccctggtcccaggacacagttcacctgcgagtgctccatcggcttccgaggagacgggcgaacctgctatgatattgatgaatgttcagaacaaccctcagtgtgtgggagccacacaatctgcaataatcacccaggaaccttccgctgcgagtgtgtggagggctaccagttttcagatgagggaacgtgtgtggctgtcgtggaccagcgccccatcaactactgtgaaactggccttcataactgcgacataccccagcgggcccagtgtatctacacaggaggctcctcctacacctgttcctgcttgccaggcttttctggggatggccaagcctgccaagatgtagatgaatgccagccaagccgatgtcaccctgacgccttctgctacaacactccaggctctttcacgtgccagtgcaaacctggttatcagggagacggcttccgttgcgtgcccggagaggtggagaaaacccggtgccagcacgagcgagaacacattctcggggcagcgggggcgacagacccacagcgacccattcctccggggctgttcgttcctgagtgcgatgcgcacgggcactacgcgcccacccagtgccacggcagcaccggctactgctggtgcgtggatcgcgacggccgcgaggtggagggcaccaggaccaggcccgggatgacgcccccgtgtctgagtacagtggctcccccgattcaccaaggacctgcggtgcctaccgccgtgatccccttgcctcctgggacccatttactctttgcccagactgggaagattgagcgcctgcccctggagggaaataccatgaggaagacagaagcaaaggcgttccttcatgtcccggctaaagtcatcattggactggcctttgactgcgtggacaagatggtttactggacggacatcactgagccttccattgggagagctagtctacatggtggagagccaaccaccatcattagacaagatcttggaagtccagaaggtatcgctgttgatcaccttggccgcaacatcttctggacagactctaacctggatcgaatagaagtggcgaagctggacggcacgcagcgccgggtgctctttgagactgacctggtgaatcccagaggcattgtaacggattccgtgagagggaacctttactggacagactggaacagagataaccccaagattgaaacttcctacatggacggcacgaaccggaggatccttgtgcaggatgacctgggcttgcccaatggactgaccttcgatgcgttctcatctcagctctgctgggtggatgcaggcaccaatcgggcggaatgcctgaaccccagtcagcccagcagacgcaaggctctcgaagggctccagtatccttttgctgtgacgagctacgggaagaatctgtatttcacagactggaagatgaattccgtggttgctctcgatcttgcaatttccaaggagacggatgctttccaaccccacaagcagacccggctgtatggcatcaccacggccctgtctcagtgtccgcaaggccataactactgctcagtgaacaatggcggctgcacccacctatgcttggccaccccagggagcaggacctgccgttgccctgacaacaccttgggagttgactgtatcgaacggaaatgaagacaagagtgccttatttcctttccaagtatttcacagcaacactctacttgaagcaacttggtccagattgaaaagtgtcctctggctgagtggccactaggcccagacccagcccagcctgagccccaacaacttttccctcactgttccccaaaacatgcaccctggacttctctaatagaaaagtctccacccctacacaaggacagaaccctccacccctacccccaaccctcagacagacttatacacccctgagtgaggattacatgcccatcccagtgtcctaggaccttttcccaatactagccccccagtggtgaacagaacctcccaaatttgagttgcacccttccctgtggccttatgagctcagcctcgctttgaggtacccaccgtcctgtcagctccttgacctatgagccggggcctgactaggaaaagttgggagttaaggaggaaattagcattccttaatgttttgttttggtgctctgaatttcttctttattatagtcctatagttttactcctcagttcctcaccatcatcatcttgtctaagacccccattataatattcatgcgctgctttttcatcaaaacctaccctgtcctagagatctatgggcatttggtggatgataatgagcagcccctcccagatagaatgtcaatatttgagcagtaggatattggcatttgttagttaaaggcttaaatcaaaagaatgtccaatggtaggaatttcaaggtgtaggtcagatatttgagaataggggatttttttgatgtgccttaaattataccaaagattactaattattcctctttgcccaaaatacttgcatccaaggttctagtctctgttgctgtgctggtctttagccccactgcttgcactgatgtccctccttttcacggagacctatctgaggtacaggatggggctggcaccagatgatgtcccaccacagtccctcacctccggcctccacatgacagaaccaatttacactcaaccatgacctcacccctccttggtttctccctcgatctgtggccctttttggatgtattcttatctaacaacacaatccggaaagactgaattgaatatttatactaatggttcatatcctttattgctcaatgatctaattaaagggatcattgccacatttcatgtttatatttctacaatttgtttagaaaacatctcctgaccatatcagtagctcgtgttatctttttatcaactgcttcccagagtcctaaaacaatagaaattttggattgaaaagttcagcataaggagtttgagtcagtaaaggatgggataaaggagtcgagatgattcaatgaaaagtatcacaaaaaagagattgatcaacaagagaaataaaaaagcccaagaggaagtggtaggggaaggaatttaagaacagcaataagtaaaactcttaagtaactccaaaaagaaaatggtacattttgccaaagaccacttatacttgagaacatggaagaatttgcctgatactctctttggggaaaagagtctctcctcttttcctcaaaccccagtacactcagcctctctgccccaccttctcctgactttgtcctcacttgcttctgcagtacattggaacctgaattgaaagaaagtcttccttgaataattggagtttgtcttgagaggcaaatatagccccaagaatcacaagattcgaggaccatgtaggtcttttacgtagcccaaatccataaattagtctcactttttgtatttatcgtttcatattaaaccctctatatcaaatgttcatcatgattttgtatgatttttataactattttattcattttattagatttattctaaaattttttaatggtaaattcttaaactgtggaaaccactgaaggtgcttattaactgttctcccagatttgtacaagtattggatgattccttgagtttacagctgtacaaatagtgtggaaaataaactttttttaaaaaagaaaa

SEQ ID NO: 447200 - DNA, 6310 bp, Homo sapiens
tggaccccggacgcggccgagcggcaatggggtgggcgccgttcctgaatccggagcgtttccacgtcgccggctctccacgacccaaccctaatcagaggaccacggtgcgggtcccgcgctctgctccccctcccggaggcgccgttcgctgggagtcgggctggtttcgagaatcgcaggcaccggcgcccaaggcgggaggttcggcttcgcccctcgccctccccctcgcggccattgggctgccccgcggcgcgcccgctggacggggcggggccctccgctctcccctccgctcccctcccctatttcccggggtgggaacgccgggaggcgggaggagagggggctgccaggggcgtccggttacatccccgccttcctctgtcctggccgcgggaccgggtttgcgggaccgcagttcgggaacatgttggcctcgagcagccggatccgggctgcgtggacgcgggcgctgctgctgccgctgctgctggcggggcctgtgggctgcctgagccgccaggagctctttcccttcggccccggacagggggacctggagctggaggacggggatgacttcgtctctcctgccctggagctgagtggggcgctccgcttctacgacagatccgacatcgacgcagtctacgtcaccacaaatggcatcattgctacgagtgaacccccggccaaagaatcccatcccgggctcttcccaccaacattcggtgcagtcgcccctttcctggcggacttggacacgaccgatggcctggggaaggtttattatcgagaagacttatccccctccatcactcagcgagcagcagagtgtgtccacagagggttcccggagatctctttccagcctagtagcgcggtggttgtcacttgggaatccgtggccccctaccaagggcccagcagggacccagaccagaaaggcaagagaaacacgttccaggctgttctagcctcctctgattccagctcctatgccattttcctttatcctgaggatggtctgcagttccatacgacattctcaaagaaggaaaacaaccaagttcctgccgtggttgcattcagtcaaggttcagtgggattcttatggaagagcaacggagcttataacatatttgctaatgacagggaatcaattgaaaatttggccaagagtagtaactctgggcagcagggtgtctgggtgtttgagattgggagtccagccaccaccaatggcgtggtgcctgcagacgtgatcctcggaactgaagatggggcagagtatgatgatgaggatgaagattatgacctggcgaccactcgtctgggcctggaggatgtgggcaccacgcccttctcctacaaggctctgagaaggggaggtgctgacacatacagtgtgcccagcgtcctctccccgcgccgggcagctaccgaaaggccccttggacctcccacagagagaaccaggtctttccagttggcagtggagacttttcaccagcagcaccctcaggtcatagatgtggatgaagttgaggaaacaggagttgttttcagctataacacggattcccgccagacgtgtgctaacaacagacaccagtgctcggtgcacgcagagtgcagggactacgccacgggcttctgctgcagctgtgtcgctggctatacgggcaatggcaggcaatgtgttgcagaaggttccccccagcgagtcaatggcaaggtgaaaggaaggatctttgtggggagcagccaggtccccattgtctttgagaacactgacctccactcttacgtagtaatgaaccacgggcgctcctacacagccatcagcaccattcccgagaccgttggatattctctgcttccactggccccagttggaggcatcattggatggatgtttgcagtggagcaggacggattcaagaatgggttcagcatcaccgggggtgagttcactcgccaggctgaggtgaccttcgtggggcacccgggcaatctggtcattaagcagcggttcagcggcatcgatgagcatgggcacctgaccatcgacacggagctggagggccgcgtgccgcagattccgttcggctcctccgtgcacattgagccctacacggagctgtaccactactccacctcagtgatcacttcctcctccacccgggagtacacggtgactgagcccgagcgagatggggcatctccttcacgcatctacacttaccagtggcgccagaccatcaccttccaggaatgcgtccacgatgactcccggccagccctgcccagcacccagcagctctcggtggacagcgtgttcgtcctgtacaaccaggaggagaagatcttgcgctacgctttcagcaactccattgggcctgtgagggaaggctcccctgatgctcttcagaatccctgctacatcggcactcatgggtgtgacaccaacgcggcctgtcgccctggtcccaggacacagttcacctgcgagtgctccatcggcttccgaggagacgggcgaacctgctatgatattgatgaatgttcagaacaaccctcagtgtgtgggagccacacaatctgcaataatcacccaggaaccttccgctgcgagtgtgtggagggctaccagttttcagatgagggaacgtgtgtggctgtcgtggaccagcgccccatcaactactgtgaaactggccttcataactgcgacataccccagcgggcccagtgtatctacacaggaggctcctcctacacctgttcctgcttgccaggcttttctggggatggccaagcctgccaagatgtagatgaatgccagccaagccgatgtcaccctgacgccttctgctacaacactccaggctctttcacgtgccagtgcaaacctggttatcagggagacggcttccgttgcgtgcccggagaggtggagaaaacccggtgccagcacgagcgagaacacattctcggggcagcgggggcgacagacccacagcgacccattcctccggggctgttcgttcctgagtgcgatgcgcacgggcactacgcgcccacccagtgccacggcagcaccggctactgctggtgcgtggatcgcgacggccgcgaggtggagggcaccaggaccaggcccgggatgacgcccccgtgtctgagtacagtggctcccccgattcaccaaggacctgcggtgcctaccgccgtgatccccttgcctcctgggacccatttactctttgcccagactgggaagattgagcgcctgcccctggagggaaataccatgaggaagacagaagcaaaggcgttccttcatgtcccggctaaagtcatcattggactggcctttgactgcgtggacaagatggtttactggacggacatcactgagccttccattgggagagctagtctacatggtggagagccaaccaccatcattagacaagatcttggaagtccagaaggtatcgctgttgatcaccttggccgcaacatcttctggacagactctaacctggatcgaatagaagtggcgaagctggacggcacgcagcgccgggtgctctttgagactgacctggtgaatcccagaggcattgtaacggattccgtgagagggaacctttactggacagactggaacagagataaccccaagattgaaacttcctacatggacggcacgaaccggaggatccttgtgcaggatgacctgggcttgcccaatggactgaccttcgatgcgttctcatctcagctctgctgggtggatgcaggcaccaatcgggcggaatgcctgaaccccagtcagcccagcagacgcaaggctctcgaagggctccagtatccttttgctgtgacgagctacgggaagaatctgtatttcacagactggaagatgaattccgtggttgctctcgatcttgcaatttccaaggagacggatgctttccaaccccacaagcagacccggctgtatggcatcaccacggccctgtctcagtgtccgcaaggccataactactgctcagtgaacaatggcggctgcacccacctatgcttggccaccccagggagcaggacctgccgttgccctgacaacaccttgggagttgactgtatcgaacggaaatgaagacaagagtgccttatttcctttccaagtatttcacagcaacactctacttgaagcaacttggtccagattgaaaagtgtcctctggctgagtggccactaggcccagacccagcccagcctgagccccaacaacttttccctcactgttccccaaaacatgcaccctggacttctctaatagaaaagtctccacccctacacaaggacagaaccctccacccctacccccaaccctcagacagacttatacacccctgagtgaggattacatgcccatcccagtgtcctaggaccttttcccaatactagccccccagtggtgaacagaacctcccaaatttgagttgcacccttccctgtggccttatgagctcagcctcgctttgaggtacccaccgtcctgtcagctccttgacctatgagccggggcctgactaggaaaagttgggagttaaggaggaaattagcattccttaatgttttgttttggtgctctgaatttcttctttattatagtcctatagttttactcctcagttcctcaccatcatcatcttgtctaagacccccattataatattcatgcgctgctttttcatcaaaacctaccctgtcctagagatctatgggcatttggtggatgataatgagcagcccctcccagatagaatgtcaatatttgagcagtaggatattggcatttgttagttaaaggcttaaatcaaaagaatgtccaatggtaggaatttcaaggtgtaggtcagatatttgagaataggggatttttttgatgtgccttaaattataccaaagattactaattattcctctttgcccaaaatacttgcatccaaggttctagtctctgttgctgtgctggtctttagccccactgcttgcactgatgtccctccttttcacggagacctatctgaggtacaggatggggctggcaccagatgatgtcccaccacagtccctcacctccggcctccacatgacagaaccaatttacactcaaccatgacctcacccctccttggtttctccctcgatctgtggccctttttggatgtattcttatctaacaacacaatccggaaagactgaattgaatatttatactaatggttcatatcctttattgctcaatgatctaattaaagggatcattgccacatttcatgtttatatttctacaatttgtttagaaaacatctcctgaccatatcagtagctcgtgttatctttttatcaactgcttcccagagtcctaaaacaatagaaattttggattgaaaagttcagcataaggagtttgagtcagtaaaggatgggataaaggagtcgagatgattcaatgaaaagtatcacaaaaaagagattgatcaacaagagaaataaaaaagcccaagaggaagtggtaggggaaggaatttaagaacagcaataagtaaaactcttaagtaactccaaaaagaaaatggtacattttgccaaagaccacttatacttgagaacatggaagaatttgcctgatactctctttggggaaaagagtctctcctcttttcctcaaaccccagtacactcagcctctctgccccaccttctcctgactttgtcctcacttgcttctgcagtacattggaacctgaattgaaagaaagtcttccttgaataattggagtttgtcttgagaggcaaatatagccccaagaatcacaagattcgaggaccatgtaggtcttttacgtagcccaaatccataaattagtctcactttttgtatttatcgtttcatattaaaccctctatatcaaatgttcatcatgattttgtatgatttttataactattttattcattttattagatttattctaaaattttttaatggtaaattcttaaactgtggaaaccactgaaggtgcttattaactgttctcccagatttgtacaagtattggatgattccttgagtttacagctgtacaaatagtgtggaaaataaactttttttaaaaaagaaaagggggcgtctagagataccccagggcccacataggtccagtttggaaagggcccacgggggataaacaggacggccagtacaggagggaaggaggt

SEQ ID NO: 447201 - DNA, 5322 bp, Homo sapiens
cgactgcgggagtagtcaacaagagaaataaaaaagcccagcaggtacccagaccagaaaggcaagagaaacacgttccaggctgttctagcctcctctgattccagctcctatgccattttcctttatcctgaggatggtctgcagttccatacgacattctcaaagaaggaaaacaaccaagttcctgccgtggttgcattcagtcaaggttcagtgggattcttatggaagagcaacggagcttataacatatttgctaatgacagggaatcaattgaaaatttggccaagagtagtaactctgggcagcagggtgtctgggtgtttgagattgggagtccagccaccaccaatggcgtggtgcctgcagacgtgatcctcggaactgaagatggggcagagtatgatgatgaggatgaagattatgacctggcgaccactcgtctgggcctggaggatgtgggcaccacgcccttctcctacaaggctctgagaaggggaggtgctgacacatacagtgtgcccagcgtcctctccccgcgccgggcagctaccgaaaggccccttggacctcccacagagagaaccaggtctttccagttggcagtggagacttttcaccagcagcaccctcaggtcatagatgtggatgaagttgaggaaacaggagttgttttcagctataacacggattcccgccagacgtgtgctaacaacagacaccagtgctcggtgcacgcagagtgcagggactacgccacgggcttctgctgcagctgtgtcgctggctatacgggcaatggcaggcaatgtgttgcagaaggttccccccagcgagtcaatggcaaggtgaaaggaaggatctttgtggggagcagccaggtccccattgtctttgagaacactgacctccactcttacgtagtaatgaaccacgggcgctcctacacagccatcagcaccattcccgagaccgttggatattctctgcttccactggccccagttggaggcatcattggatggatgtttgcagtggagcaggacggattcaagaatgggttcagcatcaccgggggtgagttcactcgccaggctgaggtgaccttcgtggggcacccgggcaatctggtcattaagcagcggttcagcggcatcgatgagcatgggcacctgaccatcgacacggagctggagggccgcgtgccgcagattccgttcggctcctccgtgcacattgagccctacacggagctgtaccactactccacctcagtgatcacttcctcctccacccgggagtacacggtgactgagcccgagcgagatggggcatctccttcacgcatctacacttaccagtggcgccagaccatcaccttccaggaatgcgtccacgatgactcccggccagccctgcccagcacccagcagctctcggtggacagcgtgttcgtcctgtacaaccaggaggagaagatcttgcgctacgctttcagcaactccattgggcctgtgagggaaggctcccctgatgctcttcagaatccctgctacatcggcactcatgggtgtgacaccaacgcggcctgtcgccctggtcccaggacacagttcacctgcgagtgctccatcggcttccgaggagacgggcgaacctgctatgatattgatgaatgttcagaacaaccctcagtgtgtgggagccacacaatctgcaataatcacccaggaaccttccgctgcgagtgtgtggagggctaccagttttcagatgagggaacgtgtgtggctgtcgtggaccagcgccccatcaactactgtgaaactggccttcataactgcgacataccccagcgggcccagtgtatctacacaggaggctcctcctacacctgttcctgcttgccaggcttttctggggatggccaagcctgccaagatgtagatgaatgccagccaagccgatgtcaccctgacgccttctgctacaacactccaggctctttcacgtgccagtgcaaacctggttatcagggagacggcttccgttgcgtgcccggagaggtggagaaaacccggtgccagcacgagcgagaacacattctcggggcagcgggggcgacagacccacagcgacccattcctccggggctgttcgttcctgagtgcgatgcgcacgggcactacgcgcccacccagtgccacggcagcaccggctactgctggtgcgtggatcgcgacggccgcgaggtggagggcaccaggaccaggcccgggatgacgcccccgtgtctgagtacagtggctcccccgattcaccaaggacctgcggtgcctaccgccgtgatccccttgcctcctgggacccatttactctttgcccagactgggaagattgagcgcctgcccctggagggaaataccatgaggaagacagaagcaaaggcgttccttcatgtcccggctaaagtcatcattggactggcctttgactgcgtggacaagatggtttactggacggacatcactgagccttccattgggagagctagtctacatggtggagagccaaccaccatcattagacaagatcttggaagtccagaaggtatcgctgttgatcaccttggccgcaacatcttctggacagactctaacctggatcgaatagaagtggcgaagctggacggcacgcagcgccgggtgctctttgagactgacctggtgaatcccagaggcattgtaacggattccgtgagagggaacctttactggacagactggaacagagataaccccaagattgaaacttcctacatggacggcacgaaccggaggatccttgtgcaggatgacctgggcttgcccaatggactgaccttcgatgcgttctcatctcagctctgctgggtggatgcaggcaccaatcgggcggaatgcctgaaccccagtcagcccagcagacgcaaggctctcgaagggctccagtatccttttgctgtgacgagctacgggaagaatctgtatttcacagactggaagatgaattccgtggttgctctcgatcttgcaatttccaaggagacggatgctttccaaccccacaagcagacccggctgtatggcatcaccacggccctgtctcagtgtccgcaaggccataactactgctcagtgaacaatggcggctgcacccacctatgcttggccaccccagggagcaggacctgccgttgccctgacaacaccttgggagttgactgtatcgaacggaaatgaagacaagagtgccttatttcctttccaagtatttcacagcaacactctacttgaagcaacttggtccagattgaaaagtgtcctctggctgagtggccactaggcccagacccagcccagcctgagccccaacaacttttccctcactgttccccaaaacatgcaccctggacttctctaatagaaaagtctccacccctacacaaggacagaaccctccacccctacccccaaccctcagacagacttatacacccctgagtgaggattacatgcccatcccagtgtcctaggaccttttcccaatactagccccccagtggtgaacagaacctcccaaatttgagttgcacccttccctgtggccttatgagctcagcctcgctttgaggtacccaccgtcctgtcagctccttgacctatgagccggggcctgactaggaaaagttgggagttaaggaggaaattagcattccttaatgttttgttttggtgctctgaatttcttctttattatagtcctatagttttactcctcagttcctcaccatcatcatcttgtctaagacccccattataatattcatgcgctgctttttcatcaaaacctaccctgtcctagagatctatgggcatttggtggatgataatgagcagcccctcccagatagaatgtcaatatttgagcagtaggatattggcatttgttagttaaaggcttaaatcaaaagaatgtccaatggtaggaatttcaaggtgtaggtcagatatttgagaataggggatttttttgatgtgccttaaattataccaaagattactaattattcctctttgcccaaaatacttgcatccaaggttctagtctctgttgctgtgctggtctttagccccactgcttgcactgatgtccctccttttcacggagacctatctgaggtacaggatggggctggcaccagatgatgtcccaccacagtccctcacctccggcctccacatgacagaaccaatttacactcaaccatgacctcacccctccttggtttctccctcgatctgtggccctttttggatgtattcttatctaacaacacaatccggaaagactgaattgaatatttatactaatggttcatatcctttattgctcaatgatctaattaaagggatcattgccacatttcatgtttatatttctacaatttgtttagaaaacatctcctgaccatatcagtagctcgtgttatctttttatcaactgcttcccagagtcctaaaacaatagaaattttggattgaaaagttcagcataaggagtttgagtcagtaaaggatgggataaaggagtcgagatgattcaatgaaaagtatcacaaaaaagagattgatcaacaagagaaataaaaaagcccaagaggaagtggtaggggaaggaatttaagaacagcaataagtaaaactcttaagtaactccaaaaagaaaatggtacattttgccaaagaccacttatacttgagaacatggaagaatttgcctgatactctctttggggaaaagagtctctcctcttttcctcaaaccccagtacactcagcctctctgccccaccttctcctgactttgtcctcacttgcttctgcagtacattggaacctgaattgaaagaaagtcttccttgaataattggagtttgtcttgagaggcaaatatagccccaagaatcacaagattcgaggaccatgtaggtcttttacgtagcccaaatccataaattagtctcactttttgtatttatcgtttcatattaaaccctctatatcaaatgttcatcatgattttgtatgatttttataactattttattcattttattagatttattctaaaattttttaatggtaaattcttaaactgtggaaaccactgaaggtgcttattaactgttctcccagatttgtacaagtattggatgattccttgagtttacagctgtacaaatagtgtggaaaataaactttttttaaaaaagaaaa

SEQ ID NO: 447202 - DNA, 6155 bp, Homo sapiens
tggaccccggacgcggccgagcggcaatggggtgggcgccgttcctgaatccggagcgtttccacgtcgccggctctccacgacccaaccctaatcagaggaccacggtgcgggtcccgcgctctgctccccctcccggaggcgccgttcgctgggagtcgggctggtttcgagaatcgcaggcaccggcgcccaaggcgggaggttcggcttcgcccctcgccctccccctcgcggccattgggctgccccgcggcgcgcccgctggacggggcggggccctccgctctcccctccgctcccctcccctatttcccggggtgggaacgccgggaggcgggaggagagggggctgccaggggcgtccggttacatccccgccttcctctgtcctggccgcgggaccgggtttgcgggaccgcagttcgggaacatgttggcctcgagcagccggatccgggctgcgtggacgcgggcgctgctgctgccgctgctgctggcggggcctgtgggctgcctgagccgccaggagctctttcccttcggccccggacagggggacctggagctggaggacggggatgacttcgtctctcctgccctggagctgagtggggcgctccgcttctacgacagatccgacatcgacgcagtctacgtcaccacaaatggcatcattgctacgagtgaacccccggccaaagaatcccatcccgggctcttcccaccaacattcggtgcagtcgcccctttcctggcggacttggacacgaccgatggcctggggaaggtttattatcgagaagacttatccccctccatcactcagcgagcagcagagtgtgtccacagagggttcccggagatctctttccagcctagtagcgcggtggttgtcacttgggaatccgtggccccctaccaagggcccagcagggacccagaccagaaaggcaagagaaacacgttccaggctgttctagcctcctctgattccagctcctatgccattttcctttatcctgaggatggtctgcagttccatacgacattctcaaagaaggaaaacaaccaagttcctgccgtggttgcattcagtcaaggttcagtgggattcttatggaagagcaacggagcttataacatatttgctaatgacagggaatcaattgaaaatttggccaagagtagtaactctgggcagcagggtgtctgggtgtttgagattgggagtccagccaccaccaatggcgtggtgcctgcagacgtgatcctcggaactgaagatggggcagagtatgatgatgaggatgaagattatgacctggcgaccactcgtctgggcctggaggatgtgggcaccacgcccttctcctacaaggctctgagaaggggaggtgctgacacatacagtgtgcccagcgtcctctccccgcgccgggcagctaccgaaaggccccttggacctcccacagagagaaccaggtctttccagttggcagtggagacttttcaccagcagcaccctcaggtcatagatgtggatgaagttgaggaaacaggagttgttttcagctataacacggattcccgccagacgtgtgctaacaacagacaccagtgctcggtgcacgcagagtgcagggactacgccacgggcttctgctgcagctgtgtcgctggctatacgggcaatggcaggcaatgtgttgcagaaggttccccccagcgagtcaatggcaaggtgaaaggaaggatctttgtggggagcagccaggtccccattgtctttgagaacactgacctccactcttacgtagtaatgaaccacgggcgctcctacacagccatcagcaccattcccgagaccgttggatattctctgcttccactggccccagttggaggcatcattggatggatgtttgcagtggagcaggacggattcaagaatgggttcagcatcaccgggggtgagttcactcgccaggctgaggtgaccttcgtggggcacccgggcaatctggtcattaagcagcggttcagcggcatcgatgagcatgggcacctgaccatcgacacggagctggagggccgcgtgccgcagattccgttcggctcctccgtgcacattgagccctacacggagctgtaccactactccacctcagtgatcacttcctcctccacccgggagtacacggtgactgagcccgagcgagatggggcatctccttcacgcatctacacttaccagtggcgccagaccatcaccttccaggaatgcgtccacgatgactcccggccagccctgcccagcacccagcagctctcggtggacagcgtgttcgtcctgtacaaccaggaggagaagatcttgcgctacgctttcagcaactccattgggcctgtgagggaaggctcccctgatgctcttcagaatccctgctacatcggcactcatgggtgtgacaccaacgcggcctgtcgccctggtcccaggacacagttcacctgcgagtgctccatcggcttccgaggagacgggcgaacctgctatgatattgatgaatgttcagaacaaccctcagtgtgtgggagccacacaatctgcaataatcacccaggaaccttccgctgcgagtgtgtggagggctaccagttttcagatgagggaacgtgtgtggctgtcgtggaccagcgccccatcaactactgtgaaactggccttcataactgcgacataccccagcgggcccagtgtatctacacaggaggctcctcctacacctgttcctgcttgccaggcttttctggggatggccaagcctgccaagatgtagatgaatgccagccaagccgatgtcaccctgacgccttctgctacaacactccaggctctttcacgtgccagtgcaaacctggttatcagggagacggcttccgttgcgtgcccggagaggtggagaaaacccggtgccagcacgagcgagaacacattctcggggcagcgggggcgacagacccacagcgacccattcctccggggctgttcgttcctgagtgcgatgcgcacgggcactacgcgcccacccagtgccacggcagcaccggctactgctggtgcgtggatcgcgacggccgcgaggtggagggcaccaggaccaggcccgggatgacgcccccgtgtctgagtacagtggctcccccgattcaccaaggacctgcggtgcctaccgccgtgatccccttgcctcctgggacccatttactctttgcccagactgggaagattgagcgcctgcccctggagggaaataccatgaggaagacagaagcaaaggcgttccttcatgtcccggctaaagtcatcattggactggcctttgactgcgtggacaagatggtttactggacggacatcactgagccttccattgggagagctagtctacatggtggagagccaaccaccatcattagacaagatcttggaagtccagaaggtatcgctgttgatcaccttggccgcaacatcttctggacagactctaacctggatcgaatagaagtggcgaagctggacggcacgcagcgccgggtgctctttgagactgacctggtgaatcccagaggcattgtaacggattccgtgagagggaacctttactggacagactggaacagagataaccccaagattgaaacttcctacatggacggcacgaaccggaggatccttgtgcaggatgacctgggcttgcccaatggactgaccttcgatgcgttctcatctcagctctgctgggtggatgcaggcaccaatcgggcggaatgcctgaaccccagtcagcccagcagacgcaaggctctcgaagggctccagtatccttttgctgtgacgagctacgggaagaatctgtatttcacagactggaagatgaattccgtggttgctctcgatcttgcaatttccaaggagacggatgctttccaaccccacaagcagacccggctgtatggcatcaccacggccctgtctcagtgtccgcaaggccataactactgctcagtgaacaatggcggctgcacccacctatgcttggccaccccagggagcaggacctgccgttgccctgacaacaccttgggagttgactgtatcgaacggaaatgaagacaagagtgccttatttcctttccaagtatttcacagcaacactctacttgaagcaacttggtccagattgaaaagtgtcctctggctgagtggccactaggcccagacccagcccagcctgagccccaacaacttttccctcactgttccccaaaacatgcaccctggacttctctaatagaaaagtctccacccctacacaaggacagaaccctccacccctacccccaaccctcagacagacttatacacccctgagtgaggattacatgcccatcccagtgtcctaggaccttttcccaatactagccccccagtggtgaacagaacctcccaaatttgagttgcacccttgacctatgagccggggcctgactaggaaaagttgggagttaaggaggaaattagcattccttaatgttttgttttggtgctctgaatttcttctttattatagtcctatagttttactcctcagttcctcaccatcatcatcttgtctaagacccccattataatattcatgcgctgctttttcatcaaaacctaccctgtcctagagatctatgggcatttggtggatgataatgagcagcccctcccagatagaatgtcaatatttgagcagtaggatattggcatttgttagttaaaggcttaaatcaaaagaatgtccaatggtaggaatttcaaggtgtaggtcagatatttgagaataggggatttttttgatgtgccttaaattataccaaagattactaattattcctctttgcccaaaatacttgcatccaaggttctagtctctgttgctgtgctggtctttagccccactgcttgcactgatgtccctccttttcacggagacctatctgaggtacaggatggggctggcaccagatgatgtcccaccacagtccctcacctccggcctccacatgacagaaccaatttacactcaaccatgacctcacccctccttggtttctccctcgatctgtggccctttttggatgtattcttatctaacaacacaatccggaaagactgaattgaatatttatactaatggttcatatcctttattgctcaatgatctaattaaagggatcattgccacatttcatgtttatatttctacaatttgtttagaaaacatctcctgaccatatcagtagctcgtgttatctttttatcaactgcttcccagagtcctaaaacaatagaaattttggattgaaaagttcagcataaggagtttgagtcagtaaaggatgggataaaggagtcgagatgattcaatgaaaagtatcacaaaaaagagattgatcaacaagagaaataaaaaagcccaagaggaagtggtaggggaaggaatttaagaacagcaataagtaaaactcttaagtaactccaaaaagaaaatggtacattttgccaaagaccacttatacttgagaacatggaagaatttgcctgatactctctttggggaaaagagtctctcctcttttcctcaaaccccagtacactcagcctctctgccccaccttctcctgactttgtcctcacttgcttctgcagtacattggaacctgaattgaaagaaagtcttccttgaataattggagtttgtcttgagaggcaaatatagccccaagaatcacaagattcgaggaccatgtaggtcttttacgtagcccaaatccataaattagtctcactttttgtatttatcgtttcatattaaaccctctatatcaaatgttcatcatgattttgtatgatttttataactattttattcattttattagatttattctaaaattttttaatggtaaattcttaaactgtggaaaccactgaaggtgcttattaactgttctcccagatttgtacaagtattggatgattccttgagtttacagctgtacaaatagtgtggaaaataaactttttttaaaaaagaaaa

SEQ ID NO: 447203 - DNA, 2340 bp, Homo sapiens
tggaccccggacgcggccgagcggcaatggggtgggcgccgttcctgaatccggagcgtttccacgtcgccggctctccacgacccaaccctaatcagaggaccacggtgcgggtcccgcgctctgctccccctcccggaggcgccgttcgctgggagtcgggctggtttcgagaatcgcaggcaccggcgcccaaggcgggaggttcggcttcgcccctcgccctccccctcgcggccattgggctgccccgcggcgcgcccgctggacggggcggggccctccgctctcccctccgctcccctcccctatttcccggggtgggaacgccgggaggcgggaggagagggggctgccaggggcgtccggttacatccccgccttcctctgtcctggccgcgggaccgggtttgcgggaccgcagttcgggaacatgttggcctcgagcagccggatccgggctgcgtggacgcgggcgctgctgctgccgctgctgctggcggggcctgtgggctgcctgagccgccaggagctctttcccttcggccccggacagggggacctggagctggaggacggggatgacttcgtctctcctgccctggagctgagtggggcgctccgcttctacgacagatccgacatcgacgcagtctacgtgagtgagccccgggagggcgggcgaggggctgcagggcgcggcgggccgggggcgcccgtggagccggacggacttgggcgtagcaggcggggacccggacccgctggccgccggggcaccgggcacggcgcagggtctcccgcctctgcagggtccgcgaaggtcttcccgacccggtccctgctatccgaagagcgggtcgcggggtctgggtggctccgcgcgccccgggccgtgaccccggcacccatggaccccgcggagcttcctccccggcggctgtgggctgcatcgccgcagggaggtcagtccgcgtccctcggctgtccagtcccttcggggctaggacctggccggtcccgggtggagccaggttctcgcgcggagcctccgcagggcaagagccggagctggatcgcagtctgcgcgcgggccccgggactcttgtggctgcgggagagtttcgccggcagcctcctgtatttgtgtgtggactccggatgtgtcttggcagtgatgctgctttccagttgggctcgtttcagagtccagagtccagagcgggaaacacagggctcccagtgatcccatttcctgtggccaggcattgtcaccacggaggccccaaacgaggagcgggaccagatgacctacagctccctggatcctccccgtgactggccgggcctggggtcgctgtcaacttgttgaagtcctttcgtgccgctgccttcctcggccgcccaccatgtggatttcatataaggcttgtgtgcattccagaagtgtggggggttggccgggggaagggggttggaactgcaaacgcagcggctgcagcctgtcctgcccgtgaaatggctgtgctcccggtctggcctgggaacactgcgccttagacaacactcacgtggaacttgtaggctttgcctaaaacgaatgagcccttcaagtctggatccacaaagagccctcccccatgttggttgactgccctggcccctttgcacactggtgaagcctgtggatcccttttcagtataacgcttttattttagtttttagagagacgaggtcttgctctgttgcccaggctgggtgcagcggtgcgatcttgggtcactgcagcctccaactccttggctcaagctgtcctctggcctcagcctcctgagtagctgggaccacaggcgagtgtcaccatgctgggcagtataaagttttaaatgcataaaataaaatccacaagatgaccaaggaaggcaattatgttgaaatacagatcaaaatattaaaaaaacacacatcttatgctcttatgtactatatatgcttatatgcttactttatttatttatttatttatttatttttttttttgagacagagtctctctctatcccccagcctggagtttagtggcacaatctcagctcactgcaacctccacctcctgggttcaaatgattctcctgcctcagcctcctgagtagctgggattacagatgactgccaccacacttggctaatttttgtattttaagtagagacatggtttcaccatgttggccaggctagtcttgaactcctgacctcagatgatctgcccacctcagcttcccaaagtgctgggattacaggcatgagccaccatgcctggcccaatatatgcttacttt

SEQ ID NO: 447204 - DNA, 459 bp, Homo sapiens
ccttgtgcaggatgacctgggcttgcccaatggactgaccttcgatgcgttctcatctcagctctgctgggtggatgcaggtgatggaaagctggacactgtccagggcgggtctcaatctcctaagtcaggggtgggcaaactagggccctggggtcaaatctaaccagccacctgtttttatataacccagaagctatgaatggtttttacggttttatctggtacattaaatatatactggtacaaaattgtatagatacctgcatactgtccttggttttgcctcctggcctgcaaaacctgaaataatttactatctggtgctttaagaaaaagttggccaccctcgtgttgtaagtggcactgcacagagcctggagtcaccctgataccgataagcaattcacaacttacattagtctgccctggctcgtgcctccccagcagaagcaacac

SEQ ID NO: 447205 - DNA, 389 bp, Homo sapiens
cagcgccgggtgctctttgagactgacctggtgaatcccagaggcattgtaacggattccgtgagagggtatctttgtgtaaatatgtgtgtgcatctctttgatttgcatctgcccttttagagattctcagatgtgaggctttaactccagcattggtctcctgaaattaatgagtacgggacgaaagagtctacagttttggtgacttgtagatatccacggtacaatgccagaacatgtattacagtgtggacttgataccatgtcccactttcaaatcttttgccaggagactttacaagttggcatgctcagaaattggatattttccatatggcttcaatgtggatcaacactcaggttatatcaactccagaagagtagca

SEQ ID NO: 447206 - DNA, 1979 bp, Homo sapiens
tggaccccggacgcggccgagcggcaatggggtgggcgccgttcctgaatccggagcgtttccacgtcgccggctctccacgacccaaccctaatcagaggaccacggtgcgggtcccgcgctctgctccccctcccggaggcgccgttcgctgggagtcgggctggtttcgagaatcgcaggcaccggcgcccaaggcgggaggttcggcttcgcccctcgccctccccctcgcggccattgggctgccccgcggcgcgcccgctggacggggcggggccctccgctctcccctccgctcccctcccctatttcccggggtgggaacgccgggaggcgggaggagagggggctgccaggggcgtccggttacatccccgccttcctctgtcctggccgcgggaccgggtttgcgggaccgcagttcgggaacatgttggcctcgagcagccggatccgggctgcgtggacgcgggcgctgctgctgccgctgctgctggcggggcctgtgggctgcctgagccgccaggagctctttcccttcggccccggacagggggacctggagctggaggacggggatgacttcgtctctcctgccctggagctgagtggggcgctccgcttctacgacagatccgacatcgacgcagtctacgtgagtgagccccgggagggcgggcgaggggctgcagggcgcggcgggccgggggcgcccgtggagccggacggacttgggcgtagcaggcggggacccggacccgctggccgccggggcaccgggcacggcgcagggtctcccgcctctgcagggtccgcgaaggtcttcccgacccggtccctgctatccgaagagcgggtcgcggggtctgggtggctccgcgcgccccgggccgtgaccccggcacccatggaccccgcggagcttcctccccggcggctgtgggctgcatcgccgcagggaggtcagtccgcgtccctcggctgtccagtcccttcggggctaggacctggccggtcccgggtggagccaggttctcgcgcggagcctccgcagggcaagagccggagctggatcgcagtctgcgcgcgggccccgggactcttgtggctgcgggagagtttcgccggcagcctcctgtatttgtgtgtggactccggatgtgtcttggcagtgatgctgctttccagttgggctcgtttcagagtccagagtccagagcgggaaacacagggctcccagtgatcccatttcctgtggccaggcattgtcaccacggaggccccaaacgaggagcgggaccagatgacctacagctccctggatcctccccgtgactggccgggcctggggtcgctgtcaacttgttgaagtcctttcgtgccgctgccttcctcggccgcccaccatgtggatttcatataaggcttgtgtgcattccagaagtgtggggggttggccgggggaagggggttggaactgcaaacgcagcggctgcagcctgtcctgcccgtgaaatggctgtgctcccggtctggcctgggaacactgcgccttagacaacactcacgtggaacttgtaggctttgcctaaaacgaatgagcccttcaagtctggatccacaaagagccctcccccatgttggttgactgccctggcccctttgcacactggtgaagcctgtggatcccttttcagtataacgcttttattttagtttttagagagacgaggtcttgctctgttgcccaggctgggtgcagcggtgcgatcttgggtcactgcagcctccaactccttggctcaagctgtcctctggcctcagcctcctgagtagctgggaccacaggcgagtgtcaccatgctgggcagtataaagttttaaatgcataaaataaaatccacaagatgaccaaggaaggcaattatgttgaaatacagatcaaaatattaaaaaaacacacatcttatgctctt

SEQ ID NO: 447207 - DNA, 6008 bp, Homo sapiens
tggaccccggacgcggccgagcggcaatggggtgggcgccgttcctgaatccggagcgtttccacgtcgccggctctccacgacccaaccctaatcagaggaccacggtgcgggtcccgcgctctgctccccctcccggaggcgccgttcgctgggagtcgggctggtttcgagaatcgcaggcaccggcgcccaaggcgggaggttcggcttcgcccctcgccctccccctcgcggccattgggctgccccgcggcgcgcccgctggacggggcggggccctccgctctcccctccgctcccctcccctatttcccggggtgggaacgccgggaggcgggaggagagggggctgccaggggcgtccggttacatccccgccttcctctgtcctggccgcgggaccgggtttgcgggaccgcagttcgggaacatgttggcctcgagcagccggatccgggctgcgtggacgcgggcgctgctgctgccgctgctgctggcggggcctgtgggctgcctgagccgccaggagctctttcccttcggccccggacagggggacctggagctggaggacggggatgacttcgtctctcctgccctggagctgagtggggcgctccgcttctacgacagatccgacatcgacgcagtctacgtcaccacaaatggcatcattgctacgagtgaacccccggccaaagaatcccatcccgggctcttcccaccaacattcggtgcagtcgcccctttcctggcggacttggacacgaccgatggcctggggaaggtttattatcgagaagacttatccccctccatcactcagcgagcagcagagtgtgtccacagagggttcccggagatctctttccagcctagtagcgcggtggttgtcacttgggaatccgtggccccctaccaagggcccagcagggacccagaccagaaaggcaagagaaacacgttccaggctgttctagcctcctctgattccagctcctatgccattttcctttatcctgaggatggtctgcagttccatacgacattctcaaagaaggaaaacaaccaagttcctgccgtggttgcattcagtcaaggttcagtgggattcttatggaagagcaacggagcttataacatatttgctaatgacagggaatcaattgaaaatttggccaagagtagtaactctgggcagcagggtgtctgggtgtttgagattgggagtccagccaccaccaatggcgtggtgcctgcagacgtgatcctcggaactgaagatggggcagagtatgatgatgaggatgaagattatgacctggcgaccactcgtctgggcctggaggatgtgggcaccacgcccttctcctacaaggctctgagaaggggaggtgctgacacatacagtgtgcccagcgtcctctccccgcgccgggcagctaccgaaaggccccttggacctcccacagagagaaccaggtctttccagttggcagtggagacttttcaccagcagcaccctcaggtcatagatgtggatgaagttgaggaaacaggagttgttttcagctataacacggattcccgccagacgtgtgctaacaacagacaccagtgctcggtgcacgcagagtgcagggactacgccacgggcttctgctgcagctgtgtcgctggctatacgggcaatggcaggcaatgtgttgcagaaggttccccccagcgagtcaatggcaaggtgaaaggaaggatctttgtggggagcagccaggtccccattgtctttgagaacactgacctccactcttacgtagtaatgaaccacgggcgctcctacacagccatcagcaccattcccgagaccgttggatattctctgcttccactggccccagttggaggcatcattggatggatgtttgcagtggagcaggacggattcaagaatgggttcagcatcaccgggggtgagttcactcgccaggctgaggtgaccttcgtggggcacccgggcaatctggtcattaagcagcggttcagcggcatcgatgagcatgggcacctgaccatcgacacggagctggagggccgcgtgccgcagattccgttcggctcctccgtgcacattgagccctacacggagctgtaccactactccacctcagtgatcacttcctcctccacccgggagtacacggtgactgagcccgagcgagatggggcatctccttcacgcatctacacttaccagtggcgccagaccatcaccttccaggaatgcgtccacgatgactcccggccagccctgcccagcacccagcagctctcggtggacagcgtgttcgtcctgtacaaccaggaggagaagatcttgcgctacgctttcagcaactccattgggcctgtgagggaaggctcccctgatgctcttcagaatccctgctacatcggcactcatgggtgtgacaccaacgcggcctgtcgccctggtcccaggacacagttcacctgcgagtgctccatcggcttccgaggagacgggcgaacctgctatgatattgatgaatgttcagaacaaccctcagtgtgtgggagccacacaatctgcaataatcacccaggaaccttccgctgcgagtgtgtggagggctaccagttttcagatgagggaacgtgtgtggctgtcgtggaccagcgccccatcaactactgtgaaactggccttcataactgcgacataccccagcgggcccagtgtatctacacaggaggctcctcctacacctgttcctgcttgccaggcttttctggggatggccaagcctgccaagatgtagatgaatgccagccaagccgatgtcaccctgacgccttctgctacaacactccaggctctttcacgtgccagtgcaaacctggttatcagggagacggcttccgttgcgtgcccggagaggtggagaaaacccggtgccagcacgagcgagaacacattctcggggcagcgggggcgacagacccacagcgacccattcctccggggctgttcgttcctgagtgcgatgcgcacgggcactacgcgcccacccagtgccacggcagcaccggctactgctggtgcgtggatcgcgacggccgcgaggtggagggcaccaggaccaggcccgggatgacgcccccgtgtctgagtacagtggctcccccgattcaccaaggacctgcggtgcctaccgccgtgatccccttgcctcctgggacccatttactctttgcccagactgggaagattgagcgcctgcccctggagggaaataccatgaggaagacagaagcaaaggcgttccttcatgtcccggctaaagtcatcattggactggcctttgactgcgtggacaagatggtttactggacggacatcactgagccttccattgggagagctagtctacatggtggagagccaaccaccatcattagacaagatcttggaagtccagaaggtatcgctgttgatcaccttggccgcaacatcttctggacagactctaacctggatcgaatagaagtggcgaagctggacggcacgcagcgccgggtgctctttgagactgacctggtgaatcccagaggcattgtaacggattccgtgagagggaacctttactggacagactggaacagagataaccccaagattgaaacttcctacatggacggcacgaaccggaggatccttgtgcaggatgacctgggcttgcccaatggactgaccttcgatgcgttctcatctcagctctgctgggtggatgcaggcaccaatcgggcggaatgcctgaaccccagtcagcccagcagacgcaaggctctcgaagggctccagtatccttttgctgtgacgagctacgggaagaatctgtatttcacagactggaagatgaattccgtggttgctctcgatcttgcaatttccaaggagacggatgctttccaaccccacaagcagacccggctgtatggcatcaccacggccctgtctcagtgtccgcaaggccataactactgctcagtgaacaatggcggctgcacccacctatgcttggccaccccagggagcaggacctgccgttgccctgacaacaccttgggagttgactgtatcgaacggaaatgaagacaagagtgccttatttcctttccaagtatttcacagcaacactctacttgaagcaacttggtccagattgaaaagtgtcctctggctgagtggccactaggcccagacccagcccagcctgagccccaacaacttttccctcactgttccccaaaacatgcaccctggacttctctaatagaaaagtctccacccctacacaaggacagaaccctccacccctacccccaaccctcagacagacttatacacccctgagtgaggattacatgcccatcccagtgtcctaggaccttttcccaatactagccccccagtggtgaacagaacctcccaaatttgagttgcacccttccctgtggccttatgagctcagcctcgctttgaggtacccaccgtcctgtcagctccttgacctatgagccggggcctgactaggaaaagttgggagttaaggaggaaattagcattccttaatgttttgttttggtgctctgaatttcttctttattatagtcctatagttttactcctcagttcctcaccatcatcatcttgtctaagacccccattataatattcatgcgctgctttttcatcaaaacctaccctgtcctagagatctatgggcatttggtggatgataatgagcagcccctcccagatagaatgtcaatatttgagcagtaggatattggcatttgttagttaaaggcttaaatcaaaagaatgtccaatggtaggaatttcaaggtgtaggtcagatatttgagaataggggatttttttgatgtgccttaaattataccaaagattactaattattcctctttgcccaaaatacttgcatccaaggttctagtctctgttgctgtgctggtctttagccccactgcttgcactgatgtccctccttttcacggagacctatctgaggtacaggatggggctggcaccagatgatgtcccaccacagtccctcacctccggcctccacatgacagaaccaatttacactcaaccatgacctcacccctccttggtttctccctcgatctgtggccctttttggatgtattcttatctaacaacacaatccggaaagactgaattgaatatttatactaatggttcatatcctttattgctcaatgatctaattaaagggatcattgccacatttcatgtttatatttctacaatttgtttagaaaacatctcctgaccatatcagtagctcgtgttatctttttatcaactgcttcccagagtcctaaaacaatagaaattttggattgaaaagttcagcataaggagtttgagtcagtaaaggatgggataaaggagtcgagatgattcaatgaaaagtatcacaaaaaagagattgatcaacaagagaaataaaaaagcccaagaggaagtggtaggggaaggaatttaagaacagcaataagtaaaactcttaagtaactccaaaaagaaaatggtacattttgccaaagaccacttatacttgagaacatggaagaatttgcctgatactctctttggggaaaagagtctctcctcttttcctcaaaccccagtacactcagcctctctgccccaccttctcctgactttgtcctcacttgcttctgcagtacattggaacctgaattgaaagaaagtcttccttgaataattggagtttgtcttgagaggcaaatatagccccaagaatcacaagattcgaggaccatgtaggtcttttacgtagcccaaatccataaattagtctcactttttgtatttatcgtttcatattaaaccctctatatcaaatgtt

SEQ ID NO: 447208 - DNA, 5714 bp, Homo sapiens
  misc_feature (5663)..(5664): n is a, c, g, or t
  misc_feature (5668)..(5668): n is a, c, g, or t
  misc_feature (5683)..(5683): n is a, c, g, or t
  misc_feature (5691)..(5691): n is a, c, g, or t
tggaccccggacgcggccgagcggcaatggggtgggcgccgttcctgaatccggagcgtttccacgtcgccggctctccacgacccaaccctaatcagaggaccacggtgcgggtcccgcgctctgctccccctcccggaggcgccgttcgctgggagtcgggctggtttcgagaatcgcaggcaccggcgcccaaggcgggaggttcggcttcgcccctcgccctccccctcgcggccattgggctgccccgcggcgcgcccgctggacggggcggggccctccgctctcccctccgctcccctcccctatttcccggggtgggaacgccgggaggcgggaggagagggggctgccaggggcgtccggttacatccccgccttcctctgtcctggccgcgggaccgggtttgcgggaccgcagttcgggaacatgttggcctcgagcagccggatccgggctgcgtggacgcgggcgctgctgctgccgctgctgctggcggggcctgtgggctgcctgagccgccaggagctctttcccttcggccccggacagggggacctggagctggaggacggggatgacttcgtctctcctgccctggagctgagtggggcgctccgcttctacgacagatccgacatcgacgcagtctacgtcaccacaaatggcatcattgctacgagtgaacccccggccaaagaatcccatcccgggctcttcccaccaacattcggtgcagtcgcccctttcctggcggacttggacacgaccgatggcctggggaaggtttattatcgagaagacttatccccctccatcactcagcgagcagcagagtgtgtccacagagggttcccggagatctctttccagcctagtagcgcggtggttgtcacttgggaatccgtggccccctaccaagggcccagcagggacccagaccagaaaggcaagagaaacacgttccaggctgttctagcctcctctgattccagctcctatgccattttcctttatcctgaggatggtctgcagttccatacgacattctcaaagaaggaaaacaaccaagttcctgccgtggttgcattcagtcaaggttcagtgggattcttatggaagagcaacggagcttataacatatttgctaatgacagggaatcaattgaaaatttggccaagagtagtaactctgggcagcagggtgtctgggtgtttgagattgggagtccagccaccaccaatggcgtggtgcctgcagacgtgatcctcggaactgaagatggggcagagtatgatgatgaggatgaagattatgacctggcgaccactcgtctgggcctggaggatgtgggcaccacgcccttctcctacaaggctctgagaaggggaggtgctgacacatacagtgtgcccagcgtcctctccccgcgccgggcagctaccgaaaggccccttggacctcccacagagagaaccaggtctttccagttggcagtggagacttttcaccagcagcaccctcaggtcatagatgtggatgaagttgaggaaacaggagttgttttcagctataacacggattcccgccagacgtgtgctaacaacagacaccagtgctcggtgcacgcagagtgcagggactacgccacgggcttctgctgcagctgtgtcgctggctatacgggcaatggcaggcaatgtgttgcagaaggttccccccagcgagtcaatggcaaggtgaaaggaaggatctttgtggggagcagccaggtccccattgtctttgagaacactgacctccactcttacgtagtaatgaaccacgggcgctcctacacagccatcagcaccattcccgagaccgttggatattctctgcttccactggccccagttggaggcatcattggatggatgtttgcagtggagcaggacggattcaagaatgggttcagcatcaccgggggtgagttcactcgccaggctgaggtgaccttcgtggggcacccgggcaatctggtcattaagcagcggttcagcggcatcgatgagcatgggcacctgaccatcgacacggagctggagggccgcgtgccgcagattccgttcggctcctccgtgcacattgagccctacacggagctgtaccactactccacctcagtgatcacttcctcctccacccgggagtacacggtgactgagcccgagcgagatggggcatctccttcacgcatctacacttaccagtggcgccagaccatcaccttccaggaatgcgtccacgatgactcccggccagccctgcccagcacccagcagctctcggtggacagcgtgttcgtcctgtacaaccaggaggagaagatcttgcgctacgctttcagcaactccattgggcctgtgagggaaggctcccctgatgctcttcagaatccctgctacatcggcactcatgggtgtgacaccaacgcggcctgtcgccctggtcccaggacacagttcacctgcgagtgctccatcggcttccgaggagacgggcgaacctgctatgatattgatgaatgttcagaacaaccctcagtgtgtgggagccacacaatctgcaataatcacccaggaaccttccgctgcgagtgtgtggagggctaccagttttcagatgagggaacgtgtgtggctgtcgtggaccagcgccccatcaactactgtgaaactggccttcataactgcgacataccccagcgggcccagtgtatctacacaggaggctcctcctacacctgttcctgcttgccaggcttttctggggatggccaagcctgccaagatgtagatgaatgccagccaagccgatgtcaccctgacgccttctgctacaacactccaggctctttcacgtgccagtgcaaacctggttatcagggagacggcttccgttgcgtgcccggagaggtggagaaaacccggtgccagcacgagcgagaacacattctcggggcagcgggggcgacagacccacagcgacccattcctccggggctgttcgttcctgagtgcgatgcgcacgggcactacgcgcccacccagtgccacggcagcaccggctactgctggtgcgtggatcgcgacggccgcgaggtggagggcaccaggaccaggcccgggatgacgcccccgtgtctgagtacagtggctcccccgattcaccaaggacctgcggtgcctaccgccgtgatccccttgcctcctgggacccatttactctttgcccagactgggaagattgagcgcctgcccctggagggaaataccatgaggaagacagaagcaaaggcgttccttcatgtcccggctaaagtcatcattggactggcctttgactgcgtggacaagatggtttactggacggacatcactgagccttccattgggagagctagtctacatggtggagagccaaccaccatcattagacaagatcttggaagtccagaaggtatcgctgttgatcaccttggccgcaacatcttctggacagactctaacctggatcgaatagaagtggcgaagctggacggcacgcagcgccgggtgctctttgagactgacctggtgaatcccagaggcattgtaacggattccgtgagagggaacctttactggacagactggaacagagataaccccaagattgaaacttcctacatggacggcacgaaccggaggatccttgtgcaggatgacctgggcttgcccaatggactgaccttcgatgcgttctcatctcagctctgctgggtggatgcaggcaccaatcgggcggaatgcctgaaccccagtcagcccagcagacgcaaggctctcgaagggctccagtatccttttgctgtgacgagctacgggaagaatctgtatttcacagactggaagatgaattccgtggttgctctcgatcttgcaatttccaaggagacggatgctttccaaccccacaagcagacccggctgtatggcatcaccacggccctgtctcagtgtccgcaaggccataactactgctcagtgaacaatggcggctgcacccacctatgcttggccaccccagggagcaggacctgccgttgccctgacaacaccttgggagttgactgtatcgaacggaaatgaagacaagagtgccttatttcctttccaagtatttcacagcaacactctacttgaagcaacttggtccagattgaaaagtgtcctctggctgagtggccactaggcccagacccagcccagcctgagccccaacaacttttccctcactgttccccaaaacatgcaccctggacttctctaatagaaaagtctccacccctacacaaggacagaaccctccacccctacccccaaccctcagacagacttatacacccctgagtgaggattacatgcccatcccagtgtcctaggaccttttcccaatactagccccccagtggtgaacagaacctcccaaatttgagttgcacccttccctgtggccttatgagctcagcctcgctttgaggtacccaccgtcctgtcagctccttgacctatgagccggggcctgactaggaaaagttgggagttaaggaggaaattagcattccttaatgttttgttttggtgctctgaatttcttctttattatagtcctatagttttactcctcagttcctcaccatcatcatcttgtctaagacccccattataatattcatgcgctgctttttcatcaaaacctaccctgtcctagagatctatgggcatttggtggatgataatgagcagcccctcccagatagaatgtcaatatttgagcagtaggatattggcatttgttagttaaaggcttaaatcaaaagaatgtccaatggtaggaatttcaaggtgtaggtcagatatttgagaataggggatttttttgatgtgccttaaattataccaaagattactaattattcctctttgcccaaaatacttgcatccaaggttctagtctctgttgctgtgctggtctttagccccactgcttgcactgatgtccctccttttcacggagacctatctgaggtacaggatggggctggcaccagatgatgtcccaccacagtccctcacctccggcctccacatgacagaaccaatttacactcaaccatgacctcacccctccttggtttctccctcgatctgtggccctttttggatgtattcttatctaacaacacaatccggaaagactgaattgaatatttatactaatggttcatatcctttattgctcaatgatctaattaaagggatcattgccacatttcatgtttatatttctacaatttgtttagaaaacatctcctgaccatatcagtagctcgtgttatctttttatcaactgcttcccagagtcctaaaacaatagaaattttggattgaaaagttcagcataaggagtttgagtcagtaaaggatgggataaaggagtcgagatgattcaatgaaaagtatcacaaaaaagagattgatcaacaagagaaataaaaaagcccaagaggaagtggtaggggaaggaatttaagaacagcaataagtaaaactcttaagtaactccaaaaaatgnncttngcaagacctttttgngactgggnaattgccgaaccttgggaaagac

SEQ ID NO: 447209 - DNA, 6140 bp, Homo sapiens
tggaccccggacgcggccgagcggcaatggggtgggcgccgttcctgaatccggagcgtttccacgtcgccggctctccacgacccaaccctaatcagaggaccacggtgcgggtcccgcgctctgctccccctcccggaggcgccgttcgctgggagtcgggctggtttcgagaatcgcaggcaccggcgcccaaggcgggaggttcggcttcgcccctcgccctccccctcgcggccattgggctgccccgcggcgcgcccgctggacggggcggggccctccgctctcccctccgctcccctcccctatttcccggggtgggaacgccgggaggcgggaggagagggggctgccaggggcgtccggttacatccccgccttcctctgtcctggccgcgggaccgggtttgcgggaccgcagttcgggaacatgttggcctcgagcagccggatccgggctgcgtggacgcgggcgctgctgctgccgctgctgctggcggggcctgtgggctgcctgagccgccaggagctctttcccttcggccccggacagggggacctggagctggaggacggggatgacttcgtctctcctgccctggagctgagtggggcgctccgcttctacgacagatccgacatcgacgcagtctacgtcaccacaaatggcatcattgctacgagtgaacccccggccaaagaatcccatcccgggctcttcccaccaacattcggtgcagtcgcccctttcctggcggacttggacacgaccgatggcctggggaaggtttattatcgagaagacttatccccctccatcactcagcgagcagcagagtgtgtccacagagggttcccggagatctctttccagcctagtagcgcggtggttgtcacttgggaatccgtggccccctaccaagggcccagcagggacccagaccagaaaggcaagagaaacacgttccaggctgttctagcctcctctgattccagctcctatgccattttcctttatcctgaggatggtctgcagttccatacgacattctcaaagaaggaaaacaaccaagttcctgccgtggttgcattcagtcaaggttcagtgggattcttatggaagagcaacggagcttataacatatttgctaatgacagggaatcaattgaaaatttggccaagagtagtaactctgggcagcagggtgtctgggtgtttgagattgggagtccagccaccaccaatggcgtggtgcctgcagacgtgatcctcggaactgaagatggggcagagtatgatgatgaggatgaagattatgacctggcgaccactcgtctgggcctggaggatgtgggcaccacgcccttctcctacaaggctctgagaaggggaggtgctgacacatacagtgtgcccagcgtcctctccccgcgccgggcagctaccgaaaggccccttggacctcccacagagagaaccaggtctttccagttggcagtggagacttttcaccagcagcaccctcaggtcatagatgtggatgaagttgaggaaacaggagttgttttcagctataacacggattcccgccagacgtgtgctaacaacagacaccagtgctcggtgcacgcagagtgcagggactacgccacgggcttctgctgcagctgtgtcgctggctatacgggcaatggcaggcaatgtgttgcagaaggttccccccagcgagtcaatggcaaggtgaaaggaaggatctttgtggggagcagccaggtccccattgtctttgagaacactgacctccactcttacgtagtaatgaaccacgggcgctcctacacagccatcagcaccattcccgagaccgttggatattctctgcttccactggccccagttggaggcatcattggatggatgtttgcagtggagcaggacggattcaagaatgggttcagcatcaccgggggtgagttcactcgccaggctgaggtgaccttcgtggggcacccgggcaatctggtcattaagcagcggttcagcggcatcgatgagcatgggcacctgaccatcgacacggagctggagggccgcgtgccgcagattccgttcggctcctccgtgcacattgagccctacacggagctgtaccactactccacctcagtgatcacttcctcctccacccgggagtacacggtgactgagcccgagcgagatggggcatctccttcacgcatctacacttaccagtggcgccagaccatcaccttccaggaatgcgtccacgatgactcccggccagccctgcccagcacccagcagctctcggtggacagcgtgttcgtcctgtacaaccaggaggagaagatcttgcgctacgctttcagcaactccattgggcctgtgagggaaggctcccctgatgctcttcagaatccctgctacatcggcactcatgggtgtgacaccaacgcggcctgtcgccctggtcccaggacacagttcacctgcgagtgctccatcggcttccgaggagacgggcgaacctgctatgatattgatgaatgttcagaacaaccctcagtgtgtgggagccacacaatctgcaataatcacccaggaaccttccgctgcgagtgtgtggagggctaccagttttcagatgagggaacgtgtgtggctgtcgtggaccagcgccccatcaactactgtgaaactggccttcataactgcgacataccccagcgggcccagtgtatctacacaggaggctcctcctacacctgttcctgcttgccaggcttttctggggatggccaagcctgccaagatgtagatgaatgccagccaagccgatgtcaccctgacgccttctgctacaacactccaggctctttcacgtgccagtgcaaacctggttatcagggagacggcttccgttgcgtgcccggagaggtggagaaaacccggtgccagcacgagcgagaacacattctcggggcagcgggggcgacagacccacagcgacccattcctccggggctgttcgttcctgagtgcgatgcgcacgggcactacgcgcccacccagtgccacggcagcaccggctactgctggtgcgtggatcgcgacggccgcgaggtggagggcaccaggaccaggcccgggatgacgcccccgtgtctgagtacagtggctcccccgattcaccaaggacctgcggtgcctaccgccgtgatccccttgcctcctgggacccatttactctttgcccagactgggaagattgagcgcctgcccctggagggaaataccatgaggaagacagaagcaaaggcgttccttcatgtcccggctaaagtcatcattggactggcctttgactgcgtggacaagatggtttactggacggacatcactgagccttccattgggagagctagtctacatggtggagagccaaccaccatcattagacaagatcttggaagtccagaaggtatcgctgttgatcaccttggccgcaacatcttctggacagactctaacctggatcgaatagaagtggcgaagctggacggcacgcagcgccgggtgctctttgagactgacctggtgaatcccagaggcattgtaacggattccgtgagagggaacctttactggacagactggaacagagataaccccaagattgaaacttcctacatggacggcacgaaccggaggatccttgtgcaggatgacctgggcttgcccaatggactgaccttcgatgcgttctcatctcagctctgctgggtggatgcaggcaccaatcgggcggaatgcctgaaccccagtcagcccagcagacgcaaggctctcgaagggctccagtatccttttgctgtgacgagctacgggaagaatctgtatttcacagactggaagatgaattccgtggttgctctcgatcttgcaatttccaaggagacggatgctttccaaccccacaagcagacccggctgtatggcatcaccacggccctgtctcagtgtccgcaaggccataactactgctcagtgaacaatggcggctgcacccacctatgcttggccaccccagggagcaggacctgccgttgccctgacaacaccttgggagttgactgtatcgaacggaaatgaagacaagagtgccttatttcctttccaagtatttcacagcaacactctacttgaagcaacttggtccagattgaaaagtgtcctctggctgagtggccactaggcccagacccagcccagcctgagccccaacaacttttccctcactgttccccaaaacatgcaccctggacttctctaatagaaaagtctccacccctacacaaggacagaaccctccacccctacccccaaccctcagacagacttatacacccctgagtgaggattacatgcccatcccagtgtcctaggaccttttcccaatactagccccccagtggtgaacagaacctcccaaatttgagttgcacccttccctgtggccttatgagctcagcctcgctttgaggtacccaccgtcctgtcagctccttgacctatgagccggggcctgactaggaaaagttgggagttaaggaggaaattagcattccttaatgttttgttttggtgctctgaatttcttctttattatagtcctatagttttactcctcagttcctcaccatcatcatcttgtctaagacccccattataatattcatgcgctgctttttcatcaaaacctaccctgtcctagagatctatgggcatttggtggatgataatgagcagcccctcccagatagaatgtcaatatttgagcagtaggatattggcatttgttagttaaaggcttaaatcaaaagaatgtccaatggtaggaatttcaaggtgtaggtcagatatttgagaataggggatttttttgatgtgccttaaattataccaaagattactaattattcctctttgcccaaaatacttgcatccaaggttctagtctctgttgctgtgctggtctttagccccactgcttgcactgatgtccctccggcctccacatgacagaaccaatttacactcaaccatgacctcacccctccttggtttctccctcgatctgtggccctttttggatgtattcttatctaacaacacaatccggaaagactgaattgaatatttatactaatggttcatatcctttattgctcaatgatctaattaaagggatcattgccacatttcatgtttatatttctacaatttgtttagaaaacatctcctgaccatatcagtagctcgtgttatctttttatcaactgcttcccagagtcctaaaacaatagaaattttggattgaaaagttcagcataaggagtttgagtcagtaaaggatgggataaaggagtcgagatgattcaatgaaaagtatcacaaaaaagagattgatcaacaagagaaataaaaaagcccaagaggaagtggtaggggaaggaatttaagaacagcaataagtaaaactcttaagtaactccaaaaagaaaatggtacattttgccaaagaccacttatacttgagaacatggaagaatttgcctgatactctctttggggaaaagagtctctcctcttttcctcaaaccccagtacactcagcctctctgccccaccttctcctgactttgtcctcacttgcttctgcagtacattggaacctgaattgaaagaaagtcttccttgaataattggagtttgtcttgagaggcaaatatagccccaagaatcacaagattcgaggaccatgtaggtcttttacgtagcccaaatccataaattagtctcactttttgtatttatcgtttcatattaaaccctctatatcaaatgttcatcatgattttgtatgatttttataactattttattcattttattagatttattctaaaattttttaatggtaaattcttaaactgtggaaaccactgaaggtgcttattaactgttctcccagatttgtacaagtattggatgattccttgagtttacagctgtacaaatagtgtggaaaataaactttttttaaaaaagaaaa

SEQ ID NO: 447210 - DNA, 420 bp, Homo sapiens
ctcaccagttgtggttgactttctgtggaaggaggaaacctgcaagagctcctgaagactcacttggttccaatgtctctgtcttcacagaaggctcccctgatgctcttcagaatccctgctacatcggcactcatgggtgtgacaccaacgcggcctgtcgccctggtcccaggacacagttcacctgcgagtgctccatcggcttccgaggagacgggcgaacctgctatggtacagcctttgattctgacttgttggggctgggaaatcaggcgaggaggaggcatccacgttctgtaaaccagagaactgggtgcagcaaggaagcacggatgagataaatactggtggacatgccaggcctgaattatttatgcttcacattcactgttcccgtgggtaaactcgggagtactg

SEQ ID NO: 447211 - DNA, 2673 bp, Homo sapiens
gccacgctctgacctttgcctctcctctccctgcagatctgggtaccacagacgtccagaagaagaagcttgtggatgccatcgtgtccggggacaccagcaaactgatgaagatcctgcagccgcaggacgtggacctggcactggacagcggtgccagcctgctgcacctggcggtggaggccgggcaagaggagtgcgccaagtggctgctgctcaacaatgccaaccccaacctgagcaaccgtaggggctccaccccgttgcacatggccgtggagaggagggtgcggggtgtcgtggagctcctgctggcacggaagatcagtgtcaacgccaaggatgaggaccagtggacagccctccactttgcagcccagaacggggatgagtctagcacacggctgctgttggagaagaacgcctcggtcaacgaggtggactttgagggccggacgcccatgcacgtggcctgccagcacgggcaggagaatatcgtgcgcatcctgctgcgccgaggcgtggacgtgagcctgcagggcaaggatgcctggctgccactgcactacgctgcctggcagggccacctgcccatcgtcaagctgctggccaagcagccgggggtgagtgtgaacgcccagacgctggatgggaggacgccattgcacctggccgcacagcgcgggcactaccgcgtggcccgcatcctcatcgacctgtgctccgacgtcaacgtctgcagcctgctggcacagacacccctgcacgtggccgcggagacggggcacacgagcactgccaggctgctcctgcatcggggcgctggcaaggaggccgtgacctcagacggctacaccgctctgcacctggctgcccgcaacggacacctggccactgtcaagctgcttgtcgaggagaaggccgatgtgctggcccggggacccctgaaccagacggcgctgcacctggctgccgcccacgggcactcggaggtggtggaggagttggtcagcgccgatgtcattgacctgttcgacgagcaggggctcagcgcgctgcacctggccgcccagggccggcacgcacagacggtggagactctgctcaggcatggggcccacatcaacctgcagagcctcaagttccagggcggccatggccccgccgccacactcctgcggcgaagcaagacctagctggctgcctgcggagaccgggggtccacgtggggctcttgtcctgtcctgtgttcctcgtggggatggaacgatcctgcgtggggccccgttgtggcttacctaaatgttaaccaagcagaggtgacatggtgccatcaggaggcggctgctgctgaccggagtgtcccctccaggtgaagctggctcaggtgcacatgcccgctccatcatcgatctaggcacctgctgtctgaagggaccgtgggtcagaatcatttcgttgtgctcctaatgggtcgctgaggctggtctctcagtgatgaagccccaggcgtggaagcatccactctctcctgaggcgagccaccttgggttgctggagctcaccagtcttgagggaggtgcaggggaaactgtgttttttatcttcatacatgacggtgggcagagaggcctgtcttaaagtttccatggaattgttttataaaatatcttaagagatgaataccttatcagctgttgcttgaaacctgttaaaaatgttcataacattggatagtctagtctctaaatgatggctaagtagtggggttggctttgaaaacaatgttttatgcaacaaggaacgaatggtagcagccagctttgcggggcgtatgtgtggccagctcttaaccattccagtctattacttgggtgagtccttgtggacaaccacacacacgtgcccacatggtactagctgccgttcgtttctcgttgcctaagatgttttggcaactctagagccacaggcctaagagtcattaaaaaattctccctttgtaacctcagtgctggggactgaggcgagccccctcaggtcgctggagtgcaccagtcttggggaagaggtgcaggagaagctgtgttttttatctccacacgcagtatgaagataaaattacatagtattacctagacatagacagtattacctaggtagatgcactgctcacctgcacccttcccagctctcatttttgttaggtgatttgggatagggatagtgttttggggtatggggggagtgtttctgacctgctttgcagacgtgcctccgcacctcagcagtttggggtgtggccccagggcggttcttggatgtaaaagatgtggccatctagcctcgtaacttcactgtcacctgtgtcccatagggtgccttctgaatactgttattagaataagtttgttgcagaacgtgaccctgcgtgcaaacatgtaccgtggcctggtatatgatagagattgatattaatgtaccatgtatgttaatgtgaatctgtgggcaggatacttttccatggcaggaaatatccaagctgttgaaactggctatgttttaatatgcctcattgtgcctttactgttgtgtggactgcgtgagggacaagaagttccatttgatgtcaataaagcaaagtacttgcctacttttttgaagctaaaaaaa

SEQ ID NO: 447212 - DNA, 3445 bp, Homo sapiens
gtaacagggcggagcgcgcacctgggcacctgggcagccgccgcggcgctggctagacgtgcgcgatggagggcgacggcgggaccccatgggccctggcgctgctgcgcaccttcgacgcgggcgagttcacgggctgggagaaggtgggctcgggcggcttcgggcaggtgtacaaggtgcgccatgtccactggaagacctggctggccatcaagtgctcgcccagcctgcacgtcgacgacagggagcgcatggagcttttggaagaagccaagaagatggagatggccaagtttcgctacatcctgcctgtgtatggcatctgccgcgaacctgtcggcctggtcatggagtacatggagacgggctccctggaaaagctgctggcttcggagccattgccatgggatctccggttccgaatcatccacgagacggcggtgggcatgaacttcctgcactgcatggccccgccactcctgcacctggacctcaagcccgcgaacatcctgctggatgcccactaccacgtcaagatttctgattttggtctggccaagtgcaacgggctgtcccactcgcatgacctcagcatggatggcctgtttggcacaatcgcctacctccctccagagcgcatcagggagaagagccggctcttcgacaccaagcacgatgtatacagctttgcgatcgtcatctggggcgtgctcacacagaagaagccgtttgcagatgagaagaacatcctgcacatcatggtgaaggtggtgaagggccaccgccccgagctgccgcccgtgtgcagagcccggccgcgcgcctgcagccacctgatacgcctcatgcagcggtgctggcagggggatccgcgagttaggcccaccttccaagaaattacttctgaaaccgaggacctgtgtgaaaagcctgatgacgaagtgaaagaaactgctcatgatctggacgtgaaaagccccccggagcccaggagcgaggtggtgcctgcgaggctcaagcgggcctctgcccccaccttcgataacgactacagcctctccgagcttctctcacagctggactctggagtttcccaggctgtcgagggccccgaggagctcagccgcagctcctctgagtccaagctgccatcgtccggcagtgggaagaggctctcgggggtgtcctcggtggactccgccttctcttccagaggatcactgtcgctgtcctttgagcgggaaccttcaaccagcgatctgggtaccacagacgtccagaagaagaagcttgtggatgccatcgtgtccggggacaccagcaaactgatgaagatcctgcagccgcaggacgtggacctggcactggacagcggtgccagcctgctgcacctggcggtggaggccgggcaagaggagtgcgccaagtggctgctgctcaacaatgccaaccccaacctgagcaaccgtaggggctccaccccgttgcacatggccgtggagaggagggtgcggggtgtcgtggagctcctgctggcacggaagatcagtgtcaacgccaaggatgaggaccagtggacagccctccactttgcagcccagaacggggatgagtctagcacacggctgctgttggagaagaacgcctcggtcaacgaggtggactttgagggccggacgcccatgcacgtggcctgccagcacgggcaggagaatatcgtgcgcatcctgctgcgccgaggcgtggacgtgagcctgcagggcaaggatgcctggctgccactgcactacgctgcctggcagggccacctgcccatcgtcaagctgctggccaagcagccgggggtgagtgtgaacgcccagacgctggatgggaggacgccattgcacctggccgcacagcgcgggcactaccgcgtggcccgcatcctcatcgacctgtgctccgacgtcaacgtctgcagcctgctggcacagacacccctgcacgtggccgcggagacggggcacacgagcactgccaggctgctcctgcatcggggcgctggcaaggaggccgtgacctcagacggctacaccgctctgcacctggctgcccgcaacggacacctggccactgtcaagctgcttgtcgaggagaaggccgatctggctcaggtgcacatgcccgctccatcatcgatctaggcacctgctgtctgaagggaccgtgggtcagaatcatttcgttgtgctcctaatgggtcgctgaggctggtctctcagtgatgaagccccaggcgtggaagcatccactctctcctgaggcgagccaccttgggttgctggagctcaccagtcttgagggaggtgcaggggaaactgtgttttttatcttcatacatgacggtgggcagagaggcctgtcttaaagtttccatggaattgttttataaaatatcttaagagatgaataccttatcagctgttgcttgaaacctgttaaaaatgttcataacattggatagtctagtctctaaatgatggctaagtagtggggttggctttgaaaacaatgttttatgcaacaaggaacgaatggtagcagccagctttgcggggcgtatgtgtggccagctcttaaccattccagtctattacttgggtgagtccttgtggacaaccacacacacgtgcccacatggtactagctgccgttcgtttctcgttgcctaagatgttttggcaactctagagccacaggcctaagagtcattaaaaaattctccctttgtaacctcagtgctggggactgaggcgagccccctcaggtcgctggagtgcaccagtcttggggaagaggtgcaggagaagctgtgttttttatctccacacgcagtatgaagataaaattacatagtattacctagacatagacagtattacctaggtagatgcactgctcacctgcacccttcccagctctcatttttgttaggtgatttgggatagggatagtgttttggggtatggggggagtgtttctgacctgctttgcagacgtgcctccgcacctcagcagtttggggtgtggccccagggcggttcttggatgtaaaagatgtggccatctagcctcgtaacttcactgtcacctgtgtcccatagggtgccttctgaatactgttattagaataagtttgttgcagaacgtgaccctgcgtgcaaacatgtaccgtggcctggtatatgatagagattgatattaatgtaccatgtatgttaatgtgaatctgtgggcaggatacttttccatggcaggaaatatccaagctgttgaaactggctatgttttaatatgcctcattgtgcctttactgttgtgtggactgcgtgagggacaagaagttccatttgatgtcaataaagcaaagtacttgcctacttttttgaagctaaaaaaa

SEQ ID NO: 447213 - DNA, 3384 bp, Homo sapiens
gtaacagggcggagcgcgcacctgggcacctgggcagccgccgcggcgctggctagacgtgcgcgatggagggcgacggcgggaccccatgggccctggcgctgctgcgcaccttcgacgcgggcgagttcacgggctgggagaaggtgggctcgggcggcttcgggcaggtgtacaaggtgcgccatgtccactggaagacctggctggccatcaagtgctcgcccagcctgcacgtcgacgacagggagcgcatggagcttttggaagaagccaagaagatggagatggccaagtttcgctacatcctgcctgtgtatggcatctgccgcgaacctgtcggcctggtcatggagtacatggagacgggctccctggaaaagctgctggcttcggagccattgccatgggatctccggttccgaatcatccacgagacggcggtgggcatgaacttcctgcactgcatggccccgccactcctgcacctggacctcaagcccgcgaacatcctgctggatgcccactaccacgtcaagatttctgattttggtctggccaagtgcaacgggctgtcccactcgcatgacctcagcatggatggcctgtttggcacaatcgcctacctccctccagagcgcatcagggagaagagccggctcttcgacaccaagcacgatgtatacagctttgcgatcgtcatctggggcgtgctcacacagaagaagccgtttgcagatgagaagaacatcctgcacatcatggtgaaggtggtgaagggccaccgccccgagctgccgcccgtgtgcagagcccggccgcgcgcctgcagccacctgatacgcctcatgcagcggtgctggcagggggatccgcgagttaggcccaccttccaagaaattacttctgaaaccgaggacctgtgtgaaaagcctgatgacgaagtgaaagaaactgctcatgatctggacgtgaaaagccccccggagcccaggagcgaggtggtgcctgcgaggctcaagcgggcctctgcccccaccttcgataacgactacagcctctccgagcttctctcacagctggactctggagtttcccaggctgtcgagggccccgaggagctcagccgcagctcctctgagtccaagctgccatcgtccggcagtgggaagaggctctcgggggtgtcctcggtggactccgccttctcttccagaggatcactgtcgctgtcctttgagcgggaaccttcaaccagcgatctgggtaccacagacgtccagaagaagaagcttgtggatgccatcgtgtccggggacaccagcaaactgatgaagatcctgcagccgcaggacgtggacctggcactggacagcggtgccagcctgctgcacctggcggtggaggccgggcaagaggagtgcgccaagtggctgctgctcaacaatgccaaccccaacctgagcaaccgtaggggctccaccccgttgcacatggccgtggagaggagggtgcggggtgtcgtggagctcctgctggcacggaagatcagtgtcaacgccaaggatgaggaccagtggacagccctccactttgcagcccagaacggggatgagtctagcacacggctgctgttggagaagaacgcctcggtcaacgaggtggactttgagggccggacgcccatgcacgtggcctgccagcacgggcaggagaatatcgtgcgcatcctgctgcgccgaggcgtggacgtgagcctgcagggcaaggatgcctggctgccactgcactacgctgcctggcagggccacctgcccatcgtcaagctgctggccaagcagccgggggtgagtgtgaacgcccagacgctggatgggaggacgccattgcacctggccgcacagcgcgggcactaccgcgtggcccgcatcctcatcgacctgtgctccgacgtcaacgtctgcagcctgctggcacagacacccctgcacgtggccgcggagacggggcacacgagcactgccaggctgctcctgcatcggggcgctggcaaggaggccgtgacctcagacggctacaccgctctgcacctggctgcccgcaacggacacctggccactgtcaagctgcttgtcgaggagaaggccgatctggctcaggtgcacatgcccgctccatcatcgatctaggcacctgctgtctgaagggaccgtgggtcagaatcatttcgttgtgctcctaatgggtcgctgaggctggtctctcagtgatgaagccccaggcgtggaagcatccactctctcctgaggcgagccaccttgggttgctggagctcaccagtcttgagggaggtgcaggggaaactgtgttttttatcttcatacatgacggtgggcagagaggcctgtcttaaagtttccatggaattgttttataaaatatcttaagagatgaataccttatcagctgttgcttgaaacctgttaaaaatgttcataacattggatagtctagtctctaaatgatggctaagtagtggggttggctttgaaaacaatgttttatgcaacaaggaacgaatggtagcagccagctttgcggggcgtatgtgtggccagctcttaaccattccagtctattacttgggtgagtccttgtggacaaccacacacacgtgcccacatggtactagctgccgttcgtttctcgttgcctaagatgttttggcaactctagagccacaggcctaagagtcattaaaaaattctccctttgtaacctcagtgctggggactgaggcgagccccctcaggtcgctggagtgcaccagtcttggggaagaggtgcaggagaagctgtgttttttatctccacacgcagtatgaagataaaattacatagtattacctagacatagacagtattacctaggtagatgcactgctcacctgcacccttcccagctctcatttttgttaggtgatttgggatagggatagtgttttggggtgtggccccagggcggttcttggatgtaaaagatgtggccatctagcctcgtaacttcactgtcacctgtgtcccatagggtgccttctgaatactgttattagaataagtttgttgcagaacgtgaccctgcgtgcaaacatgtaccgtggcctggtatatgatagagattgatattaatgtaccatgtatgttaatgtgaatctgtgggcaggatacttttccatggcaggaaatatccaagctgttgaaactggctatgttttaatatgcctcattgtgcctttactgttgtgtggactgcgtgagggacaagaagttccatttgatgtcaataaagcaaagtacttgcctacttttttgaagctaaaaaaa

SEQ ID NO: 447214 - DNA, 2420 bp, Homo sapiens
gtaacagggcggagcgcgcacctgggcacctgggcagccgccgcggcgctggctagacgtgcgcgatggagggcgacggcgggaccccatgggccctggcgctgctgcgcaccttcgacgcgggcgagttcacgggctgggagaaggtgggctcgggcggcttcgggcaggtgtacaaggtgcgccatgtccactggaagacctggctggccatcaagtgctcgcccagcctgcacgtcgacgacagggagcgcatggagcttttggaagaagccaagaagatggagatggccaagtttcgctacatcctgcctgtgtatggcatctgccgcgaacctgtcggcctggtcatggagtacatggagacgggctccctggaaaagctgctggcttcggagccattgccatgggatctccggttccgaatcatccacgagacggcggtgggcatgaacttcctgcactgcatggccccgccactcctgcacctggacctcaagcccgcgaacatcctgctggatgcccactaccacgtcaagatttctgattttggtctggccaagtgcaacgggctgtcccactcgcatgacctcagcatggatggcctgtttggcacaatcgcctacctccctccagagcgcatcagggagaagagccggctcttcgacaccaagcacgatgtatacagctttgcgatcgtcatctggggcgtgctcacacagaagaagccgtttgcagatgagaagaacatcctgcacatcatggtgaaggtggtgaagggccaccgccccgagctgccgcccgtgtgcagagcccggccgcgcgcctgcagccacctgatacgcctcatgcagcggtgctggcagggggatccgcgagttaggcccaccttccaagaaattacttctgaaaccgaggacctgtgtgaaaagcctgatgacgaagtgaaagaaactgctcatgatctggacgtgaaaagccccccggagcccaggagcgaggtggtgcctgcgaggctcaagcgggcctctgcccccaccttcgataacgactacagcctctccgagcttctctcacagctggactctggagtttcccaggctgtcgagggccccgaggagctcagccgcagctcctctgagtccaagctgccatcgtccggcagtgggaagaggctctcgggggtgtcctcggtggactccgccttctcttccagaggatcactgtcgctgtcctttgagcgggaaccttcaaccagcgatctgggtaccacagacgtccagaagaagaagcttgtggatgccatcgtgtccggggacaccagcaaactgatgaagatcctgcagccgcaggacgtggacctggcactggacagcggtgccagcctgctgcacctggcggtggaggccgggcaagaggagtgcgccaagtggctgctgctcaacaatgccaaccccaacctgagcaaccgtaggggctccaccccgttgcacatggccgtggagaggagggtgcggggtgtcgtggagctcctgctggcacggaagatcagtgtcaacgccaaggatgaggaccagtggacagccctccactttgcagcccagaacggggatgagtctagcacacggctgctgttggagaagaacgcctcggtcaacgaggtggactttgagggccggacgcccatgcacgtggcctgccagcacgggcaggagaatatcgtgcgcatcctgctgcgccgaggcgtggacgtgagcctgcagggcaaggatgcctggctgccactgcactacgctgcctggcagggccacctgcccatcgtcaagctgctggccaagcagccgggggtgagtgtgaacgcccagacgctggatgggaggacgccattgcacctggccgcacagcgcgggcactaccgcgtggcccgcatcctcatcgacctgtgctccgacgtcaacgtctgcagcctgctggcacagacacccctgcacgtggccgcggagacggggcacacgagcactgccaggctgctcctgcatcggggcgctggcaaggaggccgtgacctcagacggctacaccgctctgcacctggctgcccgcaacggacacctgtgtcccatagggtgccttctgaatactgttattagaataagtttgttgcagaacgtgaccctgcgtgcaaacatgtaccgtggcctggtatatgatagagattgatattaatgtaccatgtatgttaatgtgaatctgtgggcaggatacttttccatggcaggaaatatccaagctgttgaaactggctatgttttaatatgcctcattgtgcctttactgttgtgtggactgcgtgagggacaagaagttccatttgatgtcaataaagcaaagtacttgcctacttttttgaagctaaaaaaa

SEQ ID NO: 447215 - DNA, 426 bp, Homo sapiens
ctctcacccaccctctgagattgcagaagggagcttttgataaagcatcataaaatatcactgttgcaggctaatgagccccgctctgatggctgtgttgcagatttctgattttggtctggccaagtgcaacgggctgtcccactcgcatgacctcagcatggatggcctgtttggcacaatcgcctacctccctccagagcgcatcagggagaagagccggctcttcgacaccaagcacgatgtatacaggtgtgtgacatgccgccccccatcccctgtgggtgccaggggctctcaacctcaatgcttcatgccctgagctgcagctttcagaaaggcctcttgctgccagtcagaaatggggctcgggccaggcgcggtgactcacgcctgtaatcccagcactgcgggaggccgaggcag

SEQ ID NO: 447216 - DNA, 3897 bp, Homo sapiens
gtaacagggcggagcgcgcacctgggcacctgggcagccgccgcggcgctggctagacgtgcgcgatggagggcgacggcgggaccccatgggccctggcgctgctgcgcaccttcgacgcgggcgagttcacgggctgggagaaggtgggctcgggcggcttcgggcaggtgtacaaggtgcgccatgtccactggaagacctggctggccatcaagtgctcgcccagcctgcacgtcgacgacagggagcgcatggagcttttggaagaagccaagaagatggagatggccaagtttcgctacatcctgcctgtgtatggcatctgccgcgaacctgtcggcctggtcatggagtacatggagacgggctccctggaaaagctgctggcttcggagccattgccatgggatctccggttccgaatcatccacgagacggcggtgggcatgaacttcctgcactgcatggccccgccactcctgcacctggacctcaagcccgcgaacatcctgctggatgcccactaccacgtcaagatttctgattttggtctggccaagtgcaacgggctgtcccactcgcatgacctcagcatggatggcctgtttggcacaatcgcctacctccctccagagcgcatcagggagaagagccggctcttcgacaccaagcacgatgtatacagctttgcgatcgtcatctggggcgtgctcacacagaagaagccgtttgcagatgagaagaacatcctgcacatcatggtgaaggtggtgaagggccaccgccccgagctgccgcccgtgtgcagagcccggccgcgcgcctgcagccacctgatacgcctcatgcagcggtgctggcagggggatccgcgagttaggcccaccttccaagaaattacttctgaaaccgaggacctgtgtgaaaagcctgatgacgaagtgaaagaaactgctcatgatctggacgtgaaaagccccccggagcccaggagcgaggtggtgcctgcgaggctcaagcgggcctctgcccccaccttcgataacgactacagcctctccgagcttctctcacagctggactctggagtttcccaggctgtcgagggccccgaggagctcagccgcagctcctctgagtccaagctgccatcgtccggcagtgggaagaggctctcgggggtgtcctcggtggactccgccttctcttccagaggatcactgtcgctgtcctttgagcgggaaccttcaaccagcgatctgggtaccacagacgtccagaagaagaagcttgtggatgccatcgtgtccggggacaccagcaaactgatgaagatcctgcagccgcaggacgtggacctggcactggacagcggtgccagcctgctgcacctggcggtggaggccgggcaagaggagtgcgccaagtggctgctgctcaacaatgccaaccccaacctgagcaaccgtaggggctccaccccgttgcacatggccgtggagaggagggtgcggggtgtcgtggagctcctgctggcacggaagatcagtgtcaacgccaaggatgaggaccagtggacagccctccactttgcagcccagaacggggatgagtctagcacacggctgctgttggagaagaacgcctcggtcaacgaggtggactttgagggccggacgcccatgcacgtggcctgccagcacgggcaggagaatatcgtgcgcatcctgctgcgccgaggcgtggacgtgagcctgcagggcaaggatgcctggctgccactgcactacgctgcctggcagggccacctgcccatcgtcaagctgctggccaagcagccgggggtgagtgtgaacgcccagacgctggatgggaggacgccattgcacctggccgcacagcgcgggcactaccgcgtggcccgcatcctcatcgacctgtgctccgacgtcaacgtctgcagcctgctggcacagacacccctgcacgtggccgcggagacggggcacacgagcactgccaggctgctcctgcatcggggcgctggcaaggaggccgtgacctcagacggctacaccgctctgcacctggctgcccgcaacggacacctggccactgtcaagctgcttgtcgaggagaaggccgatgtgctggcccggggacccctgaaccagacggcgctgcacctggctgccgcccacgggcactcggaggtggtggaggagttggtcagcgccgatgtcattgacctgttcgacgagcaggggctcagcgcgctgcacctggccgcccagggccggcacgcacagacggtggagactctgctcaggcatggggcccacatcaacctgcagagcctcaagttccagggcggccatggccccgccgccacactcctgcggcgaagcaagacctagctggctgcctgcggagaccgggggtccacgtggggctcttgtcctgtcctgtgttcctcgtggggatggaacgatcctgcgtggggccccgttgtggcttacctaaatgttaaccaagcagaggtgacatggtgccatcaggaggcggctgctgctgaccggagtgtcccctccaggtgaagctggctcaggtgcacatgcccgctccatcatcgatctaggcacctgctgtctgaagggaccgtgggtcagaatcatttcgttgtgctcctaatgggtcgctgaggctggtctctcagtgatgaagccccaggcgtggaagcatccactctctcctgaggcgagccaccttgggttgctggagctcaccagtcttgagggaggtgcaggggaaactgtgttttttatcttcatacatgacggtgggcagagaggcctgtcttaaagtttccatggaattgttttataaaatatcttaagagatgaataccttatcagctgttgcttgaaacctgttaaaaatgttcataacattggatagtctagtctctaaatgatggctaagtagtggggttggctttgaaaacaatgttttatgcaacaaggaacgaatggtagcagccagctttgcggggcgtatgtgtggccagctcttaaccattccagtctattacttgggtgagtccttgtggacaaccacacacacgtgcccacatggtactagctgccgttcgtttctcgttgcctaagatgttttggcaactctagagccacaggcctaagagtcattaaaaaattctccctttgtaacctcagtgctggggactgaggcgagccccctcaggtcgctggagtgcaccagtcttggggaagaggtgcaggagaagctgtgttttttatctccacacgcagtatgaagataaaattacatagtattacctagacatagacagtattacctaggtagatgcactgctcacctgcacccttcccagctctcatttttgttaggtgatttgggatagggatagtgttttggggtatggggggagtgtttctgacctgctttgcagacgtgcctccgcacctcagcagtttggggtgtggccccagggcggttcttggatgtaaaagatgtggccatctagcctcgtaacttcactgtcacctgtgtcccatagggtgccttctgaatactgttattagaataagtttgttgcagaacgtgaccctgcgtgcaaacatgtaccgtggcctggtatatgatagagattgatattaatgtaccatgtatgttaatgtgaatctgtgggcaggatacttttccatggcaggaaatatccaagctgttgaaactggctatgttttaatatgcctcattgtgcctttactgttgtgtggactgcgtgagggacaagaagttccatttgatgtcaataaagcaaagtacttgcctacttttttgaagctaaaaaaa

SEQ ID NO: 447217 - DNA, 569 bp, Homo sapiens
  misc_feature (219)..(220): n is a, c, g, or t
tcgtggaagagagataaacgacgagcatcccctgcatgactgggcctgcctgccgtgatcagaatgacgtcattcaggctcggaaggcctatgacctgcagagtgatgctatttacaaatctgatcttgagtggctgagaggcataggatgggttcccattggctctgtagaggtcgagaaagtgaagagagctggagaaatcctgagtgacaggaagnntcgccagcctgcagaccagctcaaattcacatgcattaccgacactccggaaattgtccatgtagggcccctgggcttgcctggtgagctcaggctgggccgaggcgtgtgagaaatcccccagctcgtgggggccctgcgtttatatggaacgcgtgtgtacgcagaagtcatcatccgagtgacatgtcccctttcttccccacaagaaattacttctgaaaccgaggacctgtgtgaaaagcctgatgacgaagtgaaagaaactgctcatgatctggacgtgaaaagccccccggagcccaggagcgaggtaacgagtccttcccacaggggtcttttgtctcct

SEQ ID NO: 447218 - DNA, 2977 bp, Homo sapiens
  misc_feature (219)..(220): n is a, c, g, or t
tcgtggaagagagataaacgacgagcatcccctgcatgactgggcctgcctgccgtgatcagaatgacgtcattcaggctcggaaggcctatgacctgcagagtgatgctatttacaaatctgatcttgagtggctgagaggcataggatgggttcccattggctctgtagaggtcgagaaagtgaagagagctggagaaatcctgagtgacaggaagnntcgccagcctgcagaccagctcaaattcacatgcattaccgacactccggaaattgtccatgtagggcccctgggcttgcctggtgagctcaggctgggccgaggcgtgtgagaaatcccccagctcgtgggggccctgcgtttatatggaacgcgtgtgtacgcagaagtcatcatccgagtgacatgtcccctttcttccccacaagaaattacttctgaaaccgaggacctgtgtgaaaagcctgatgacgaagtgaaagaaactgctcatgatctggacgtgaaaagccccccggagcccaggagcgaggtggtgcctgcgaggctcaagcgggcctctgcccccaccttcgataacgactacagcctctccgagcttctctcacagctggactctggagtttcccaggctgtcgagggccccgaggagctcagccgcagctcctctgagtccaagctgccatcgtccggcagtgggaagaggctctcgggggtgtcctcggtggactccgccttctcttccagaggatcactgtcgctgtcctttgagcgggaaccttcaaccagcgatctgggtaccacagacgtccagaagaagaagcttgtggatgccatcgtgtccggggacaccagcaaactgatgaagatcctgcagccgcaggacgtggacctggcactggacagcggtgccagcctgctgcacctggcggtggaggccgggcaagaggagtgcgccaagtggctgctgctcaacaatgccaaccccaacctgagcaaccgtaggggctccaccccgttgcacatggccgtggagaggagggtgcggggtgtcgtggagctcctgctggcacggaagatcagtgtcaacgccaaggatgaggaccagtggacagccctccactttgcagcccagaacggggatgagtctagcacacggctgctgttggagaagaacgcctcggtcaacgaggtggactttgagggccggacgcccatgcacgtggcctgccagcacgggcaggagaatatcgtgcgcatcctgctgcgccgaggcgtggacgtgagcctgcagggcaaggatgcctggctgccactgcactacgctgcctggcagggccacctgcccatcgtcaagctgctggccaagcagccgggggtgagtgtgaacgcccagacgctggatgggaggacgccattgcacctggccgcacagcgcgggcactaccgcgtggcccgcatcctcatcgacctgtgctccgacgtcaacgtctgcagcctgctggcacagacacccctgcacgtggccgcggagacggggcacacgagcactgccaggctgctcctgcatcggggcgctggcaaggaggccgtgacctcagacggctacaccgctctgcacctggctgcccgcaacggacacctggccactgtcaagctgcttgtcgaggagaaggccgatctggctcaggtgcacatgcccgctccatcatcgatctaggcacctgctgtctgaagggaccgtgggtcagaatcatttcgttgtgctcctaatgggtcgctgaggctggtctctcagtgatgaagccccaggcgtggaagcatccactctctcctgaggcgagccaccttgggttgctggagctcaccagtcttgagggaggtgcaggggaaactgtgttttttatcttcatacatgacggtgggcagagaggcctgtcttaaagtttccatggaattgttttataaaatatcttaagagatgaataccttatcagctgttgcttgaaacctgttaaaaatgttcataacattggatagtctagtctctaaatgatggctaagtagtggggttggctttgaaaacaatgttttatgcaacaaggaacgaatggtagcagccagctttgcggggcgtatgtgtggccagctcttaaccattccagtctattacttgggtgagtccttgtggacaaccacacacacgtgcccacatggtactagctgccgttcgtttctcgttgcctaagatgttttggcaactctagagccacaggcctaagagtcattaaaaaattctccctttgtaacctcagtgctggggactgaggcgagccccctcaggtcgctggagtgcaccagtcttggggaagaggtgcaggagaagctgtgttttttatctccacacgcagtatgaagataaaattacatagtattacctagacatagacagtattacctaggtagatgcactgctcacctgcacccttcccagctctcatttttgttaggtgatttgggatagggatagtgttttggggtatggggggagtgtttctgacctgctttgcagacgtgcctccgcacctcagcagtttggggtgtggccccagggcggttcttggatgtaaaagatgtggccatctagcctcgtaacttcactgtcacctgtgtcccatagggtgccttctgaatactgttattagaataagtttgttgcagaacgtgaccctgcgtgcaaacatgtaccgtggcctggtatatgatagagattgatattaatgtaccatgtatgttaatgtgaatctgtgggcaggatacttttccatggcaggaaatatccaagctgttgaaactggctatgttttaatatgcctcattgtgcctttactgttgtgtggactgcgtgagggacaagaagttccatttgatgtcaataaagcaaagtacttgcctacttttttgaagctaaaaaaa

SEQ ID NO: 447219 - DNA, 682 bp, Homo sapiens
caggcgccacatgctgggtcagtccccagcctcctgtccacagatccttctctgttctacctcctgggctgtgtccttccacaccctcagctcggtgctcaggcgtgggcagaactggctgggaaggggtggtccttagaggtgggctgtggagaaatgaagatcgagctctggctgccgccatggccttcccatgcaaaaagtattttgtcatccaaaatcaatattttggtcaggcacagtggctcatgcctgtaatcccagcactttgggtggccgaggtgggtggatcatttgaggtcaggagtttgagaccagcctgaccaacatggtgaaattccatctctaccaaaaatacaaaaaaattagctgggcatggtggtggacgcctgtgatcccagctactctcaggaggctgaagcaggagaatcgtttgaacccgggaagctgagattgcagtgagccgagatctcgccactgcactccagcctgggcaacaaagcaagactctttctcaaaaaaaaataaaaataaaaaaatacaggccggacgcagtggctcacgcctgtaattccagtactttgggaggccgaggcaggtggatcacgaggttaggagatcaagaccatcctggctaacacggtgaaaccccgtctctactaaaaatacaaaaaaaaaaaaa

SEQ ID NO: 447220 - DNA, 200 bp, Homo sapiens
aaaaaaaaaaaggaaaaatagtaagaaaataatgtacagttggtactcagatgtggggcctaagctatgaatgggactagagcattgctacaggttgggcattgctgggcactgtatgtaggtcgcctgaccctatctcccatgggagtgatgaccagtcccagaggcctgtgtgactctgaatcttccaacctcacagg

SEQ ID NO: 447221 - DNA, 3306 bp, Homo sapiens
aatgcccagaatactgtaagcactcaagaaactgatttattttcgtcattttcacagcggccaaggtacatgaggatgtagcttatcgcccttttaagggactctcccacgttcgactctaagcggaagtacccgctcagggctccggaagtggcctcagagcccctcagcaacatgcccgcagagaattcttccggaggcggtcacagacatctccgtgacgcagaacgagttagagcgtcccttggggtttccatggtgctgcccttagcctgcagtatctccacttcctctcccgcctgagcgccgggaacggaaaagcaggcggccggtcccagctgcgacgtagacgccgcgtgggggtggggttgggcgagtaggtgacgctctaggcgagctcgttggcctctctatggtgccgagcgcgcccgttcggacgttgcccctttaatcggcagagggcggtgcccaggaggtcccgcgagagctgcggggggcgggggggcggtgccgaggctgggggccggtggcggatggagcccgcgatggagccggagactctggaggcgcgaatcaatagagccacgaaccccctgaacaaggagctcgactgggccagcatcaacggcttctgcgagcagctcaacgaggactttgaggggcctccactcgccacccggctgctggcccacaagatccagtccccacaggagtgggaggcgatccaggccttgacggtgctggaaacatgcatgaagagctgcggcaagcggttccacgacgaagtgggcaagttccgctttctcaacgagctcatcaaggtcgtgtctcccaagtatctgggctctcggacatcggagaaggtgaagaacaagatcttggagctcctctacagctggacagtgggcctgcccgaggaggtgaaaatcgcagaggcctaccagatgctaaagaagcaggggattgtaaagtccgaccccaagcttccagatgacactacctttccccttcctcctccacggccgaagaatgtgatctttgaagatgaggagaaatccaagatgctggcccgcctgctgaagagctcccatcccgaagacctccgcgcagccaataagctcatcaaagagatggtgcaggaggaccagaagcggatggagaagatctcgaagagggtgaatgccatcgaggaggtgaacaacaatgtgaaactgctcacggagatggtgatgagccacagccagggcggcgcagcagctggcagcagcgaggacctcatgaaggaactgtaccagcgctgtgagcggatgcggcccacgctcttccgactggcgagtgacacagaggacaatgatgaggccttagcggagatcctgcaggccaatgacaacctcacccaggtgatcaacctgtataagcagctggtgcggggtgaggaggtcaacggtgatgccacagccggctccatccctgggagcacctcggccctgctggatctctcaggcctggatctcccgcctgcgggcaccacctacccagctatgcccacccgccctggcgagcaggccagccctgagcagcccagtgcctcagtttccctgcttgacgacgagctcatgtctctgggcctcagtgaccccacacccccttcaggcccaagcctggatggtaccggatggaacagcttccagtcgtcggatgccactgagcccccagcccctgctctggcccaggcccccagtatggaaagccgacccccagcgcagacatccctgccagcaagcagcggtctggacgacctagacctcctggggaagaccctcctgcagcagtcgctgcccccggaatcccagcaagtgcggtgggagaagcagcagccaaccccccggctcacactccgggacctgcagaataagagcagcagctgcagctcccccagctccagcgccaccagccttctccacaccgtgtccccagagccccccaggcctccgcagcagcccgtaccaaccgagctctcactggccagcatcactgtgcccctggagtccatcaaacccagcaacatcctgcccgtgactgtgtatgaccagcacggcttccgcatcctcttccattttgcccgggacccactgccagggcgctccgacgtgctggtggtggtggtttccatgctgagcaccgccccccagcccatccgcaacatcgtgttccagtcagctgtccccaaggttatgaaggtgaagctgcagccaccctcgggcacggagctgccagcttttaaccccatcgtccacccctcagcaatcacccaggtcctgctgcttgccaacccccagaaggagaaggttcgcctccgctacaagctcaccttcaccatgggtgaccagacctacaacgagatgggggatgtggaccagttccccccacctgaaacctggggtagcctctagaacagaggggctggggagaggaaggggcagagggaccggtcactgtccagcctggagggaggcattggtggccaaggacaccctttgttgcccatggccattcacccccaggcctggtgcttctccccacacccctgtaggcctcaagtgactcttccccctcctgctccggccccgcccctgctgagccaaacccagtaggaggctgggcctgggtttgtgccgctggggtctccatcaccgggacctggagagggaggggctgtgtagccttggaagaacttgggtcatggggaggaagcacagctgttggggaagggccaggacctcaggcccagccccaaccccagctggggtggggtcttccccacctgtctcttatgccttatgggaaggcccagccataactcgggggccatgctggagctggggaccagcttaggcctcctccataggaacccagtgactggggggtgacgcctacacccccagctatttgcactctggtgtgtggtttgactctgcttttcttccggattggccctgtggtcacagcctcagggggccaggctgggggaacctcacctggcccgtactcctgggggtttccctttgccattgggccccctgagggactgtgggggctcaagggtaatgccagaggcccatggccccagcgaggggctgtggggcacctagagttctcggtgtgtctccttcattcattggcctctgctggggcctcctatgggtgtcttacgtctgtccatccatctgtccgtggtcagaagtggggtcagtgtgtgagtgagagcaggagtatttatgaaaataaaacgtcgtttttcctgga

SEQ ID NO: 447222 - DNA, 3361 bp, Homo sapiens
aatgcccagaatactgtaagcactcaagaaactgatttattttcgtcattttcacagcggccaaggtacatgaggatgtagcttatcgcccttttaagggactctcccacgttcgactctaagcggaagtacccgctcagggctccggaagtggcctcagagcccctcagcaacatgcccgcagagaattcttccggaggcggtcacagacatctccgtgacgcagaacgagttagagcgtcccttggggtttccatggtgctgcccttagcctgcagtatctccacttcctctcccgcctgagcgccgggaacggaaaagcaggcggccggtcccagctgcgacgtagacgccgcgtgggggtggggttgggcgagtaggtgacgctctaggcgagctcgttggcctctctatggtgccgagcgcgcccgttcggacgttgcccctttaatcggcagagggcggtgcccaggaggtcccgcgagagctgcggggggcgggggggcggtgccgaggctgggggccggtggcggatggagcccgcgatggagccggagactctggaggcgcgaatcaatagagccacgaaccccctgaacaaggagctcgactgggccagcatcaacggcttctgcgagcagctcaacgaggactttgaggggcctccactcgccacccggctgctggcccacaagatccagtccccacaggagtgggaggcgatccaggccttgacggtgctggaaacatgcatgaagagctgcggcaagcggttccacgacgaagtgggcaagttccgctttctcaacgagctcatcaaggtcgtgtctcccaagtatctgggctctcggacatcggagaaggtgaagaacaagatcttggagctcctctacagctggacagtgggcctgcccgaggaggtgaaaatcgcagaggcctaccagatgctaaagaagcaggggattgtaaagtccgaccccaagcttccagatgacactacctttccccttcctcctccacggccgaagaatgtgatctttgaagatgaggagaaatccaagatgctggcccgcctgctgaagagctcccatcccgaagacctccgcgcagccaataagctcatcaaagagatggtgcaggaggaccagaagcggatggagaagatctcgaagagggtgaatgccatcgaggaggtgaacaacaatgtgaaactgctcacggagatggtgatgagccacagccagggcggcgcagcagctggcagcagcgaggacctcatgaaggaactgtaccagcgctgtgagcggatgcggcccacgctcttccgactggcgagtgacacagaggacaatgatgaggccttagcggagatcctgcaggccaatgacaacctcacccaggtgatcaacctgtataagcagctggtgcggggtgaggaggtcaacggtgatgccacagccggctccatccctgggagcacctcggccctgctggatctctcaggcctggatctcccgcctgcgggcaccacctacccagctatgcccacccgccctggcgagcaggccagccctgagcagcccagtgcctcagtttccctgcttgacgacgagctcatgtctctgggcctcagtgaccccacacccccttcaggcccaagcctggatggtaccggatggaacagcttccagtcgtcggatgccactgagcccccagcccctgctctggcccaggcccccagtatggaaagccgacccccagcgcagacatccctgccagcaagcagcggtctggacgacctagacctcctggggaagaccctcctgcagcagtcgctgcccccggaatcccagcaagtgcggtgggagaagcagcagccaaccccccggctcacactccgggacctgcagaataagagcagcagctgcagctcccccagctccagcgccaccagccttctccacaccgtgtccccagagccccccaggcctccgcagcagcccgtaccaaccgagctctcactggccagcatcactgtgcccctggagtccatcaaacccagcaacatcctgcccgtgactgtgtatgaccagcacggcttccgcatcctcttccattttgcccgggacccactgccagggcgctccgacgtgctggtggtggtggtttccatgctgagcaccgccccccagcccatccgcaacatcgtgttccagtcagctgtccccaaggttatgaaggtgaagctgcagccaccctcgggcacggagctgccagcttttaaccccatcgtccacccctcagcaatcacccaggtcctgctgcttgccaacccccagaaggagaaggttcgcctccgctacaagctcaccttcaccatgggtgaccagacctacaacgagatgggggatgtggaccagttccccccacctgaaacctggggtagcctctagaacagaggggctggggagaggaaggggcagagggaccggtcactgtccagcctggagggaggcattggtggccaaggacaccctttgttgcccatggccattcacccccaggcctggtgcttctccccacacccctgtaggcctcaagtgactcttccccctcctgctccggccccgcccctgctgagccaaacccagtaggaggctgggcctgggtttgtgccgctggggtctccatcaccgggacctggagagggaggggctgtgtagccttggaagaacttgggtcatggggaggaagcacagctgttggggaagggccaggacctcaggcccagccccaaccccagctggggtggggtcttccccacctgtctcttatgccttatgggaaggcccagccataactcgggggccatgctggagctggggaccagcttaggcctcctccataggaacccagtgactggggggtgacgcctacacccccagctatttgcactctggtgtgtggtttgactctgcttttcttccggattggccctgtggtcacagcctcagggggccaggctgggggaacctcacctggcccgtactcctgggggtttccctttgccattgggccccctgagggactgtgggggctcaagggtaatgccagaggcccatggccccagcgaggggctgtggggcacctagagttctcggtgtgtctccttcattcattggcctctgctggggcctcctatgggtgtcttacgtctgtccatccatctgtccgtggtcagaagtggggtcagtgtgtgagtgagagcaggagtatttatgaaaataaaacgtcgtttttcctggaaaaaaaaaaagggggggcctaaaatacccgagaggccaagtaactccatttttac

SEQ ID NO: 447223 - DNA, 2908 bp, Homo sapiens
gggcggggtacgggtcgccccctcctcacgccccgcccccggcccgggaggggcggtgtcctcagtcggcccctcagaccctggagcgatggaggaccccggccccggcgcggtccagcggtgggagcgggcgccgcccacctgtcggatccctgggccatgacccctgggacggcgaatagagccacgaaccccctgaacaaggagctcgactgggccagcatcaacggcttctgcgagcagctcaacgaggactttgaggggcctccactcgccacccggctgctggcccacaagatccagtccccacaggagtgggaggcgatccaggccttgacggtgctggaaacatgcatgaagagctgcggcaagcggttccacgacgaagtgggcaagttccgctttctcaacgagctcatcaaggtcgtgtctcccaagtatctgggctctcggacatcggagaaggtgaagaacaagatcttggagctcctctacagctggacagtgggcctgcccgaggaggtgaaaatcgcagaggcctaccagatgctaaagaagcaggggattgtaaagtccgaccccaagcttccagatgacactacctttccccttcctcctccacggccgaagaatgtgatctttgaagatgaggagaaatccaagatgctggcccgcctgctgaagagctcccatcccgaagacctccgcgcagccaataagctcatcaaagagatggtgcaggaggaccagaagcggatggagaagatctcgaagagggtgaatgccatcgaggaggtgaacaacaatgtgaaactgctcacggagatggtgatgagccacagccagggcggcgcagcagctggcagcagcgaggacctcatgaaggaactgtaccagcgctgtgagcggatgcggcccacgctcttccgactggcgagtgacacagaggacaatgatgaggccttagcggagatcctgcaggccaatgacaacctcacccaggtgatcaacctgtataagcagctggtgcggggtgaggaggtcaacggtgatgccacagccggctccatccctgggagcacctcggccctgctggatctctcaggcctggatctcccgcctgcgggcaccacctacccagctatgcccacccgccctggcgagcaggccagccctgagcagcccagtgcctcagtttccctgcttgacgacgagctcatgtctctgggcctcagtgaccccacacccccttcaggcccaagcctggatggtaccggatggaacagcttccagtcgtcggatgccactgagcccccagcccctgctctggcccaggcccccagtatggaaagccgacccccagcgcagacatccctgccagcaagcagcggtctggacgacctagacctcctggggaagaccctcctgcagcagtcgctgcccccggaatcccagcaagtgcggtgggagaagcagcagccaaccccccggctcacactccgggacctgcagaataagagcagcagctgcagctcccccagctccagcgccaccagccttctccacaccgtgtccccagagccccccaggcctccgcagcagcccgtaccaaccgagctctcactggccagcatcactgtgcccctggagtccatcaaacccagcaacatcctgcccgtgactgtgtatgaccagcacggcttccgcatcctcttccattttgcccgggacccactgccagggcgctccgacgtgctggtggtggtggtttccatgctgagcaccgccccccagcccatccgcaacatcgtgttccagtcagctgtccccaaggttatgaaggtgaagctgcagccaccctcgggcacggagctgccagcttttaaccccatcgtccacccctcagcaatcacccaggtcctgctgcttgccaacccccagaaggagaaggttcgcctccgctacaagctcaccttcaccatgggtgaccagacctacaacgagatgggggatgtggaccagttccccccacctgaaacctggggtagcctctagaacagaggggctggggagaggaaggggcagagggaccggtcactgtccagcctggagggaggcattggtggccaaggacaccctttgttgcccatggccattcacccccaggcctggtgcttctccccacacccctgtaggcctcaagtgactcttccccctcctgctccggccccgcccctgctgagccaaacccagtaggaggctgggcctgggtttgtgccgctggggtctccatcaccgggacctggagagggaggggctgtgtagccttggaagaacttgggtcatggggaggaagcacagctgttggggaagggccaggacctcaggcccagccccaaccccagctggggtggggtcttccccacctgtctcttatgccttatgggaaggcccagccataactcgggggccatgctggagctggggaccagcttaggcctcctccataggaacccagtgactggggggtgacgcctacacccccagctatttgcactctggtgtgtggtttgactctgcttttcttccggattggccctgtggtcacagcctcagggggccaggctgggggaacctcacctggcccgtactcctgggggtttccctttgccattgggccccctgagggactgtgggggctcaagggtaatgccagaggcccatggccccagcgaggggctgtggggcacctagagttctcggtgtgtctccttcattcattggcctctgctggggcctcctatgggtgtcttacgtctgtccatccatctgtccgtggtcagaagtggggtcagtgtgtgagtgagagcaggagtatttatgaaaataaaacgtcgtttttcctgga

SEQ ID NO: 447224 - DNA, 3127 bp, Homo sapiens
gggcggggtacgggtcgccccctcctcacgccccgcccccggcccgggaggggcggtgtcctcagtcggcccctcagaccctggagcgatggaggaccccggccccggcgcggtccagcggtgggagcgggcgccgcccacctgtcggatccctgggccatgacccctgggacggcgagggagacaggtgtggacatgagtggctgggatgcagtgccgtagcaggctgggggacacaaaagagaactgacccagcactgctaccctgggcaggagtagaggattagagaaggggacaccggagccactcccaagggaatgaaggctttctgaacctggtgtgatgatagagccacgaaccccctgaacaaggagctcgactgggccagcatcaacggcttctgcgagcagctcaacgaggactttgaggggcctccactcgccacccggctgctggcccacaagatccagtccccacaggagtgggaggcgatccaggccttgacggtgagaaggggagaggccaccatccgtcccccgccatgtgacgacaccaaggtgctggaaacatgcatgaagagctgcggcaagcggttccacgacgaagtgggcaagttccgctttctcaacgagctcatcaaggtcgtgtctcccaagtatctgggctctcggacatcggagaaggtgaagaacaagatcttggagctcctctacagctggacagtgggcctgcccgaggaggtgaaaatcgcagaggcctaccagatgctaaagaagcaggggattgtaaagtccgaccccaagcttccagatgacactacctttccccttcctcctccacggccgaagaatgtgatctttgaagatgaggagaaatccaagatgctggcccgcctgctgaagagctcccatcccgaagacctccgcgcagccaataagctcatcaaagagatggtgcaggaggaccagaagcggatggagaagatctcgaagagggtgaatgccatcgaggaggtgaacaacaatgtgaaactgctcacggagatggtgatgagccacagccagggcggcgcagcagctggcagcagcgaggacctcatgaaggaactgtaccagcgctgtgagcggatgcggcccacgctcttccgactggcgagtgacacagaggacaatgatgaggccttagcggagatcctgcaggccaatgacaacctcacccaggtgatcaacctgtataagcagctggtgcggggtgaggaggtcaacggtgatgccacagccggctccatccctgggagcacctcggccctgctggatctctcaggcctggatctcccgcctgcgggcaccacctacccagctatgcccacccgccctggcgagcaggccagccctgagcagcccagtgcctcagtttccctgcttgacgacgagctcatgtctctgggcctcagtgaccccacacccccttcaggcccaagcctggatggtaccggatggaacagcttccagtcgtcggatgccactgagcccccagcccctgctctggcccaggcccccagtatggaaagccgacccccagcgcagacatccctgccagcaagcagcggtctggacgacctagacctcctggggaagaccctcctgcagcagtcgctgcccccggaatcccagcaagtgcggtgggagaagcagcagccaaccccccggctcacactccgggacctgcagaataagagcagcagctgcagctcccccagctccagcgccaccagccttctccacaccgtgtccccagagccccccaggcctccgcagcagcccgtaccaaccgagctctcactggccagcatcactgtgcccctggagtccatcaaacccagcaacatcctgcccgtgactgtgtatgaccagcacggcttccgcatcctcttccattttgcccgggacccactgccagggcgctccgacgtgctggtggtggtggtttccatgctgagcaccgccccccagcccatccgcaacatcgtgttccagtcagctgtccccaaggttatgaaggtgaagctgcagccaccctcgggcacggagctgccagcttttaaccccatcgtccacccctcagcaatcacccaggtcctgctgcttgccaacccccagaaggagaaggttcgcctccgctacaagctcaccttcaccatgggtgaccagacctacaacgagatgggggatgtggaccagttccccccacctgaaacctggggtagcctctagaacagaggggctggggagaggaaggggcagagggaccggtcactgtccagcctggagggaggcattggtggccaaggacaccctttgttgcccatggccattcacccccaggcctggtgcttctccccacacccctgtaggcctcaagtgactcttccccctcctgctccggccccgcccctgctgagccaaacccagtaggaggctgggcctgggtttgtgccgctggggtctccatcaccgggacctggagagggaggggctgtgtagccttggaagaacttgggtcatggggaggaagcacagctgttggggaagggccaggacctcaggcccagccccaaccccagctggggtggggtcttccccacctgtctcttatgccttatgggaaggcccagccataactcgggggccatgctggagctggggaccagcttaggcctcctccataggaacccagtgactggggggtgacgcctacacccccagctatttgcactctggtgtgtggtttgactctgcttttcttccggattggccctgtggtcacagcctcagggggccaggctgggggaacctcacctggcccgtactcctgggggtttccctttgccattgggccccctgagggactgtgggggctcaagggtaatgccagaggcccatggccccagcgaggggctgtggggcacctagagttctcggtgtgtctccttcattcattggcctctgctggggcctcctatgggtgtcttacgtctgtccatccatctgtccgtggtcagaagtggggtcagtgtgtgagtgagagcaggagtatttatgaaaataaaacgtcgtttttcctgga

SEQ ID NO: 447225 - DNA, 3045 bp, Homo sapiens
aatgcccagaatactgtaagcactcaagaaactgatttattttcgtcattttcacagcggccaaggtacatgaggatgtagcttatcgcccttttaagggactctcccacgttcgactctaagcggaagtacccgctcagggctccggaagtggcctcagagcccctcagcaacatgcccgcagagaattcttccggaggcggtcacagacatctccgtgacgcagaacgagttagagcgtcccttggggtttccatggtgctgcccttagcctgcagtatctccacttcctctcccgcctgagcgccgggaacggaaaagcaggcggccggtcccagctgcgacgtagacgccgcgtgggggtggggttgggcgagtaggtgacgctctaggcgagctcgttggcctctctatggtgccgagcgcgcccgttcggacgttgcccctttaatcggcagagggcggtgcccaggaggtcccgcgagagctgcggggggcgggggggcggtgccgaggctgggggccggtggcggatggagcccgcgatggagccggagactctggaggcgcgaatcaatagagccacgaaccccctgaacaaggagctcgactgggccagcatcaacggcttctgcgagcagctcaacgaggactttgaggggcctccactcgccacccggctgctggcccacaagatccagtccccacaggagtgggaggcgatccaggccttgacggtgctggaaacatgcatgaagagctgcggcaagcggttccacgacgaagtgggcaagttccgctttctcaacgagctcatcaaggtcgtgtctcccaagtatctgggctctcggacatcggagaaggtgaagaacaagatcttggagctcctctacagctggacagtgggcctgcccgaggaggtgaaaatcgcagaggcctaccagatgctaaagaagcaggggattgtaaagtccgaccccaagcttccagatgacactacctttccccttcctcctccacggccgaagaatgtgatctttgaagatgaggagaaatccaagatgctggcccgcctgctgaagagctcccatcccgaagacctccgcgcagccaataagctcatcaaagagatggtgcaggaggaccagaagcggatggagaagatctcgaagagggtgaatgccatcgaggaggtgaacaacaatgtgaaactgctcacggagatggtgatgagccacagccagggcggcgcagcagctggcagcagcgaggacctcatgaaggaactgtaccagcgctgtgagcggatgcggcccacgctcttccgactggcgagtgacacagaggacaatgatgaggccttaggcctcagtgaccccacacccccttcaggcccaagcctggatggtaccggatggaacagcttccagtcgtcggatgccactgagcccccagcccctgctctggcccaggcccccagtatggaaagccgacccccagcgcagacatccctgccagcaagcagcggtctggacgacctagacctcctggggaagaccctcctgcagcagtcgctgcccccggaatcccagcaagtgcggtgggagaagcagcagccaaccccccggctcacactccgggacctgcagaataagagcagcagctgcagctcccccagctccagcgccaccagccttctccacaccgtgtccccagagccccccaggcctccgcagcagcccgtaccaaccgagctctcactggccagcatcactgtgcccctggagtccatcaaacccagcaacatcctgcccgtgactgtgtatgaccagcacggcttccgcatcctcttccattttgcccgggacccactgccagggcgctccgacgtgctggtggtggtggtttccatgctgagcaccgccccccagcccatccgcaacatcgtgttccagtcagctgtccccaaggttatgaaggtgaagctgcagccaccctcgggcacggagctgccagcttttaaccccatcgtccacccctcagcaatcacccaggtcctgctgcttgccaacccccagaaggagaaggttcgcctccgctacaagctcaccttcaccatgggtgaccagacctacaacgagatgggggatgtggaccagttccccccacctgaaacctggggtagcctctagaacagaggggctggggagaggaaggggcagagggaccggtcactgtccagcctggagggaggcattggtggccaaggacaccctttgttgcccatggccattcacccccaggcctggtgcttctccccacacccctgtaggcctcaagtgactcttccccctcctgctccggccccgcccctgctgagccaaacccagtaggaggctgggcctgggtttgtgccgctggggtctccatcaccgggacctggagagggaggggctgtgtagccttggaagaacttgggtcatggggaggaagcacagctgttggggaagggccaggacctcaggcccagccccaaccccagctggggtggggtcttccccacctgtctcttatgccttatgggaaggcccagccataactcgggggccatgctggagctggggaccagcttaggcctcctccataggaacccagtgactggggggtgacgcctacacccccagctatttgcactctggtgtgtggtttgactctgcttttcttccggattggccctgtggtcacagcctcagggggccaggctgggggaacctcacctggcccgtactcctgggggtttccctttgccattgggccccctgagggactgtgggggctcaagggtaatgccagaggcccatggccccagcgaggggctgtggggcacctagagttctcggtgtgtctccttcattcattggcctctgctggggcctcctatgggtgtcttacgtctgtccatccatctgtccgtggtcagaagtggggtcagtgtgtgagtgagagcaggagtatttatgaaaataaaacgtcgtttttcctgga

SEQ ID NO: 447226 - DNA, 2879 bp, Homo sapiens
aatgcccagaatactgtaagcactcaagaaactgatttattttcgtcattttcacagcggccaaggtacatgaggatgtagcttatcgcccttttaagggactctcccacgttcgactctaagcggaagtacccgctcagggctccggaagtggcctcagagcccctcagcaacatgcccgcagagaattcttccggaggcggtcacagacatctccgtgacgcagaacgagttagagcgtcccttggggtttccatggtgctgcccttagcctgcagtatctccacttcctctcccgcctgagcgccgggaacggaaaagcaggcggccggtcccagctgcgacgtagacgccgcgtgggggtggggttgggcgagtaggtgacgctctaggcgagctcgttggcctctctatggtgccgagcgcgcccgttcggacgttgcccctttaatcggcagagggcggtgcccaggaggtcccgcgagagctgcggggggcgggggggcggtgccgaggctgggggccggtggcggatggagcccgcgatggagccggagactctggaggcgcgaatcaatagagccacgaaccccctgaacaaggagctcgactgggccagcatcaacggcttctgcgagcagctcaacgaggactttgaggggcctccactcgccacccggctgctggcccacaagatccagtccccacaggagtgggaggcgatccaggccttgacggtgctggaaacatgcatgaagagctgcggcaagcggttccacgacgaagtgggcaagttccgctttctcaacgagctcatcaaggtcgtgtctcccaagtatctgggctctcggacatcggagaaggtgaagaacaagatcttggagctcctctacagctggacagtgggcctgcccgaggaggtgaaaatcgcagaggcctaccagatgctaaagaagcaggggattgtaaagtccgaccccaagcttccagatgacactacctttccccttcctcctccacggccgaagaatgtgatctttgaagatgaggagaaatccaagatgctggcccgcctgctgaagagctcccatcccgaagacctccgcgcagccaataagctcatcaaagagatggtgcaggaggaccagaagcggatggagaagatctcgaagagggtgaatgccatcgaggaggtgaacaacaatgtgaaactgctcacggagatggtgatgagccacagccagggcggcgcagcagctggcagcagcgaggacctcatgaaggaactgtaccagcgctgtgagcggatgcggcccacgctcttccgactggcgagtgacacagaggacaatgatgaggccttagcggagatcctgcaggccaatgacaacctcacccaggtgatcaacctgtataagcagctggtgcggggtgaggaggtcaacggtgatgccacagccggctccatccctgggagcacctcggccctgctggatctctcaggcctggatctcccgcctgcgggcaccacctacccagctatgcccacccgccctggcgagcaggccagccctgagcagcccagtgcctcagtttccctgcttgacgacgagctcatgtctctgggcctcagtgaccccacacccccttcaggcccaagcctggatggtaccggatggaacagcttccagtcgtcggatgccactgagcccccagcccctgctctggcccaggcccccagtatggaaagccgacccccagcgcagccatccgcaacatcgtgttccagtcagctgtccccaaggttatgaaggtgaagctgcagccaccctcgggcacggagctgccagcttttaaccccatcgtccacccctcagcaatcacccaggtcctgctgcttgccaacccccagaaggagaaggttcgcctccgctacaagctcaccttcaccatgggtgaccagacctacaacgagatgggggatgtggaccagttccccccacctgaaacctggggtagcctctagaacagaggggctggggagaggaaggggcagagggaccggtcactgtccagcctggagggaggcattggtggccaaggacaccctttgttgcccatggccattcacccccaggcctggtgcttctccccacacccctgtaggcctcaagtgactcttccccctcctgctccggccccgcccctgctgagccaaacccagtaggaggctgggcctgggtttgtgccgctggggtctccatcaccgggacctggagagggaggggctgtgtagccttggaagaacttgggtcatggggaggaagcacagctgttggggaagggccaggacctcaggcccagccccaaccccagctggggtggggtcttccccacctgtctcttatgccttatgggaaggcccagccataactcgggggccatgctggagctggggaccagcttaggcctcctccataggaacccagtgactggggggtgacgcctacacccccagctatttgcactctggtgtgtggtttgactctgcttttcttccggattggccctgtggtcacagcctcagggggccaggctgggggaacctcacctggcccgtactcctgggggtttccctttgccattgggccccctgagggactgtgggggctcaagggtaatgccagaggcccatggccccagcgaggggctgtggggcacctagagttctcggtgtgtctccttcattcattggcctctgctggggcctcctatgggtgtcttacgtctgtccatccatctgtccgtggtcagaagtggggtcagtgtgtgagtgagagcaggagtatttatgaaaataaaacgtcgtttttcctgga

SEQ ID NO: 447227 - DNA, 2108 bp, Homo sapiens
tgcctgcggttagtgatctagaggatcccttcgggctccattcaggacgggcgcagcagctggcagcagcgaggacctcatgaaggaactgtaccagcgctgtgagcggatgcggcccacgctcttccgactggcgagtgacacagaggacaatgatgaggccttagcggagatcctgcaggccaatgacaacctcacccaggtgatcaacctgtataagcagctggtgcggggtgaggaggtcaacggtgatgccacagccggctccatccctgggagcacctcggccctgctggatctctcaggcctggatctcccgcctgcgggcaccacctacccagctatgcccacccgccctggcgagcaggccagccctgagcagcccagtgcctcagtttccctgcttgacgacgagctcatgtctctgggcctcagtgaccccacacccccttcaggcccaagcctggatggtaccggatggaacagcttccagtcgtcggatgccactgagcccccagcccctgctctggcccaggcccccagtatggaaagccgacccccagcgcagacatccctgccagcaagcagcggtctggacgacctagacctcctggggaagaccctcctgcagcagtcgctgcccccggaatcccagcaagtgcggtgggagaagcagcagccaaccccccggctcacactccgggacctgcagaataagagcagcagctgcagctcccccagctccagcgccaccagccttctccacaccgtgtccccagagccccccaggcctccgcagcagcccgtaccaaccgagctctcactggccagcatcactgtgcccctggagtccatcaaacccagcaacatcctgcccgtgactgtgtatgaccagcacggcttccgcatcctcttccattttgcccgggacccactgccagggcgctccgacgtgctggtggtggtggtttccatgctgagcaccgccccccagcccatccgcaacatcgtgttccagtcagctgtccccaaggttatgaaggtgaagctgcagccaccctcgggcacggagctgccagcttttaaccccatcgtccacccctcagcaatcacccaggtcctgctgcttgccaacccccagaaggagaaggttcgcctccgctacaagctcaccttcaccatgggtgaccagacctacaacgagatgggggatgtggaccagttccccccacctgaaacctggggtagcctctagaacagaggggctggggagaggaaggggcagagggaccggtcactgtccagcctggagggaggcattggtggccaaggacaccctttgttgcccatggccattcacccccaggcctggtgcttctccccacacccctgtaggcctcaagtgactcttccccctcctgctccggccccgcccctgctgagccaaacccagtaggaggctgggcctgggtttgtgccgctggggtctccatcaccgggacctggagagggaggggctgtgtagccttggaagaacttgggtcatggggaggaagcacagctgttggggaagggccaggacctcaggcccagccccaaccccagctggggtggggtcttccccacctgtctcttatgccttatgggaaggcccagccataactcgggggccatgctggagctggggaccagcttaggcctcctccataggaacccagtgactggggggtgacgcctacacccccagctatttgcactctggtgtgtggtttgactctgcttttcttccggattggccctgtggtcacagcctcagggggccaggctgggggaacctcacctggcccgtactcctgggggtttccctttgccattgggccccctgagggactgtgggggctcaagggtaatgccagaggcccatggccccagcgaggggctgtggggcacctagagttctcggtgtgtctccttcattcattggcctctgctggggcctcctatgggtgtcttacgtctgtccatccatctgtccgtggtcagaagtggggtcagtgtgtgagtgagagcaggagtatttatgaaaataaaacgtcgtttttcctgga

SEQ ID NO: 447228 - DNA, 2191 bp, Homo sapiens
aatgcccagaatactgtaagcactcaagaaactgatttattttcgtcattttcacagcggccaaggtacatgaggatgtagcttatcgcccttttaagggactctcccacgttcgactctaagcggaagtacccgctcagggctccggaagtggcctcagagcccctcagcaacatgcccgcagagaattcttccggaggcggtcacagacatctccgtgacgcagaacgagttagagcgtcccttggggtttccatggtgctgcccttagcctgcagtatctccacttcctctcccgcctgagcgccgggaacggaaaagcaggcggccggtcccagctgcgacgtagacgccgcgtgggggtggggttgggcgagtaggtgacgctctaggcgagctcgttggcctctctatggtgccgagcgcgcccgttcggacgttgcccctttaatcggcagagggcggtgcccaggaggtcccgcgagagctgcggggggcgggggggcggtgccgaggctgggggccggtggcggatggagcccgcgatggagccggagactctggaggcgcgaatcatcgtcggatgccactgagcccccagcccctgctctggcccaggcccccagtatggaaagccgacccccagcgcagacatccctgccagcaagcagcggtctggacgacctagacctcctggggaagaccctcctgcagcagtcgctgcccccggaatcccagcaagtgcggtgggagaagcagcagccaaccccccggctcacactccgggacctgcagaataagagcagcagctgcagctcccccagctccagcgccaccagccttctccacaccgtgtccccagagccccccaggcctccgcagcagcccgtaccaaccgagctctcactggccagcatcactgtgcccctggagtccatcaaacccagcaacatcctgcccgtgactgtgtatgaccagcacggcttccgcatcctcttccattttgcccgggacccactgccagggcgctccgacgtgctggtggtggtggtttccatgctgagcaccgccccccagcccatccgcaacatcgtgttccagtcagctgtccccaaggttatgaaggtgaagctgcagccaccctcgggcacggagctgccagcttttaaccccatcgtccacccctcagcaatcacccaggtcctgctgcttgccaacccccagaaggagaaggttcgcctccgctacaagctcaccttcaccatgggtgaccagacctacaacgagatgggggatgtggaccagttccccccacctgaaacctggggtagcctctagaacagaggggctggggagaggaaggggcagagggaccggtcactgtccagcctggagggaggcattggtggccaaggacaccctttgttgcccatggccattcacccccaggcctggtgcttctccccacacccctgtaggcctcaagtgactcttccccctcctgctccggccccgcccctgctgagccaaacccagtaggaggctgggcctgggtttgtgccgctggggtctccatcaccgggacctggagagggaggggctgtgtagccttggaagaacttgggtcatggggaggaagcacagctgttggggaagggccaggacctcaggcccagccccaaccccagctggggtggggtcttccccacctgtctcttatgccttatgggaaggcccagccataactcgggggccatgctggagctggggaccagcttaggcctcctccataggaacccagtgactggggggtgacgcctacacccccagctatttgcactctggtgtgtggtttgactctgcttttcttccggattggccctgtggtcacagcctcagggggccaggctgggggaacctcacctggcccgtactcctgggggtttccctttgccattgggccccctgagggactgtgggggctcaagggtaatgccagaggcccatggccccagcgaggggctgtggggcacctagagttctcggtgtgtctccttcattcattggcctctgctggggcctcctatgggtgtcttacgtctgtccatccatctgtccgtggtcagaagtggggtcagtgtgtgagtgagagcaggagtatttatgaaaataaaacgtcgtttttcctgga

SEQ ID NO: 447229 - DNA, 1513 bp, Homo sapiens
tgttggaattacaggggtgagctaccacgctggccaagaatcacttcttaatgcactgtcccccgattaagggagaagcagcagccaaccccccggctcacactccgggacctgcagaataagagcagcagctgcagctcccccagctccagcgccaccagccttctccacaccgtgtccccagagccccccaggcctccgcagcagcccgtaccaaccgagctctcactggccagcatcactgtgcccctggagtccatcaaacccagcaacatcctgcccgtgactgtgtatgaccagcacggcttccgcatcctcttccattttgcccgggacccactgccagggcgctccgacgtgctggtggtggtggtttccatgctgagcaccgccccccagcccatccgcaacatcgtgttccagtcagctgtccccaaggttatgaaggtgaagctgcagccaccctcgggcacggagctgccagcttttaaccccatcgtccacccctcagcaatcacccaggtcctgctgcttgccaacccccagaaggagaaggttcgcctccgctacaagctcaccttcaccatgggtgaccagacctacaacgagatgggggatgtggaccagttccccccacctgaaacctggggtagcctctagaacagaggggctggggagaggaaggggcagagggaccggtcactgtccagcctggagggaggcattggtggccaaggacaccctttgttgcccatggccattcacccccaggcctggtgcttctccccacacccctgtaggcctcaagtgactcttccccctcctgctccggccccgcccctgctgagccaaacccagtaggaggctgggcctgggtttgtgccgctggggtctccatcaccgggacctggagagggaggggctgtgtagccttggaagaacttgggtcatggggaggaagcacagctgttggggaagggccaggacctcaggcccagccccaaccccagctggggtggggtcttccccacctgtctcttatgccttatgggaaggcccagccataactcgggggccatgctggagctggggaccagcttaggcctcctccataggaacccagtgactggggggtgacgcctacacccccagctatttgcactctggtgtgtggtttgactctgcttttcttccggattggccctgtggtcacagcctcagggggccaggctgggggaacctcacctggcccgtactcctgggggtttccctttgccattgggccccctgagggactgtgggggctcaagggtaatgccagaggcccatggccccagcgaggggctgtggggcacctagagttctcggtgtgtctccttcattcattggcctctgctggggcctcctatgggtgtcttacgtctgtccatccatctgtccgtggtcagaagtggggtcagtgtgtgagtgagagcaggagtatttatgaaaataaaacgtcgtttttcctgga

SEQ ID NO: 447230 - DNA, 1993 bp, Homo sapiens
aatgcccagaatactgtaagcactcaagaaactgatttattttcgtcattttcacagcggccaaggtacatgaggatgtagcttatcgcccttttaagggactctcccacgttcgactctaagcggaagtacccgctcagggctccggaagtggcctcagagcccctcagcaacatgcccgcagagaattcttccggaggcggtcacagacatctccgtgacgcagaacgagttagagcgtcccttggggtttccatggtgctgcccttagcctgcagtatctccacttcctctcccgcctgagcgccgggaacggaaaagcaggcggccggtcccagctgcgacgtagacgccgcgtgggggtggggttgggcgagtaggtgacgctctaggcgagctcgttggcctctctatggtgccgagcgcgcccgttcggacgttgcccctttaatcggcagagggcggtgcccaggaggtcccgcgagagctgcggggggcgggggggcggtgccgaggctgggggccggtggcggatggagcccgcgatggagccggagactctggaggcgcgaatcaatagagccacgaaccccctgaacaaggagctcgactgggccagcatcaacggcttctgcgagcagctcaacgaggactttgaggggcctccactcgccacccggctgctggcccacaagatccagtccccacaggagtgggaggcgatccaggccttgacggtgctggaaacatgcatgaagagctgcggcaagcggttccacgacgaagtgggcaagttccgctttctcaacgagctcatcaaggtcgtgtctcccaagtatctgggctctcggacatcggagaaggtgaagaacaagatcttggagctcctctacagctggacagtgggcctgcccgaggaggtgaaaatcgcagaggcctaccagatgctaaagaagcaggggattgtaaagtccgaccccaagcttccagatgacactacctttccccttcctcctccacggccgaagaatgtgatctttgaagatgaggagaaatccaagatgctggcccgcctgctgaagagctcccatcccgaagacctccgcgcagccaataagctcatcaaagagatggtgcaggaggaccagaagcggatggagaagatctcgaagagggtgaatgccatcgaggaggtgaacaacaatgtgaaactgctcacggagatggtgatgagccacagccagggcggcgcagcagctggcagcagcgaggacctcatgaaggaactgtaccagcgctgtgagcggatgcggcccacgctcttccgactggcgagtgacacagaggacaatgatgaggccttagcggagatcctgcaggccaatgacaacctcacccaggtgatcaacctgtataagcagctggtgcggggtgaggaggtcaacggtgatgccacagccggctccatccctgggagcacctcggccctgctggatctctcaggcctggatctcccgcctgcgggcaccacctacccagctatgcccacccgccctggcgagcaggccagccctgagcagcccagtgcctcagtttccctgcttgacgacgagctcatgtctctgggcctcagtgaccccacacccccttcaggcccaagcctggatggtaccggatggaacagcttccagtcgtcggatgccactgagcccccagcccctgctctggcccaggcccccagtatggaaagccgacccccagcgcagacatccctgccagcaagcagcggtctggacgacctagacctcctggggaagaccctcctgcagcagtcgctgcccccggaatcccagcaagtgcggtggtgagggcccaccatggctggcatggggtggggagcactccctgttcccacaaaccagcaacttctcctgggcttgtccaggcccagcagggagaggctcgttgctgtcttgttttgtaagcagcagat

SEQ ID NO: 447231 - DNA, 1650 bp, Homo sapiens
aatgcccagaatactgtaagcactcaagaaactgatttattttcgtcattttcacagcggccaaggtacatgaggatgtagcttatcgcccttttaagggactctcccacgttcgactctaagcggaagtacccgctcagggctccggaagtggcctcagagcccctcagcaacatgcccgcagagaattcttccggaggcggtcacagacatctccgtgacgcagaacgagttagagcgtcccttggggtttccatggtgctgcccttagcctgcagtatctccacttcctctcccgcctgagcgccgggaacggaaaagcaggcggccggtcccagctgcgacgtagacgccgcgtgggggtggggttgggcgagtaggtgacgctctaggcgagctcgttggcctctctatggtgccgagcgcgcccgttcggacgttgcccctttaatcggcagagggcggtgcccaggaggtcccgcgagagctgcggggggcgggggggcggtgccgaggctgggggccggtggcggatggagcccgcgatggagccggagactctggaggcgcgaatcaatagagccacgaaccccctgaacaaggagctcgactgggccagcatcaacggcttctgcgagcagctcaacgaggactttgaggggcctccactcgccacccggctgctggcccacaagatccagtccccacaggagtgggaggcgatccaggccttgacggtgctggaaacatgcatgaagagctgcggcaagcggttccacgacgaagtgggcaagttccgctttctcaacgagctcatcaaggtcgtgtctcccaagtatctgggctctcggacatcggagaaggtgaagaacaagatcttggagctcctctacagctggacagtgggcctgcccgaggaggtgaaaatcgcagaggcctaccagatgctaaagaagcaggggattgtaaagtccgaccccaagcttccagatgacactacctttccccttcctcctccacggccgaagaatgtgatctttgaagatgaggagaaatccaagatgctggcccgcctgctgaagagctcccatcccgaagacctccgcgcagccaataagctcatcaaagagatggtgcaggaggaccagaagcggatggagaagatctcgaagagggtgaatgccatcgaggaggtgaacaacaatgtgaaactgctcacggagatggtgatgagccacagccagggcggcgcagcagctggcagcagcgaggacctcatgaaggaactgtaccagcgctgtgagcggatgcggcccacgctcttccgactggcgagtgacacagaggacaatgatgaggccttaggtgagcccagggcaggtgctgaggtcaggtccccccctcttccttcacctcctgcccccacctcccccaggccctgctaagtatctgcagttggaaggagccaccaccagggggcccccttctccagcaccgaccttgggtttctcctctctgaggacacagagcaggggccggccccctgttgagaggccctgtgggccaacccccttaacaggcatcttatttactacccgcagctggacaggaggcagacccatccccttttcacaactggggcttgggggg

SEQ ID NO: 447232 - DNA, 1862 bp, Homo sapiens
  misc_feature (1542)..(1542): n is a, c, g, or t
  misc_feature (1861)..(1861): n is a, c, g, or t
aatgcccagaatactgtaagcactcaagaaactgatttattttcgtcattttcacagcggccaaggtacatgaggatgtagcttatcgcccttttaagggactctcccacgttcgactctaagcggaagtacccgctcagggctccggaagtggcctcagagcccctcagcaacatgcccgcagagaattcttccggaggcggtcacagacatctccgtgacgcagaacgagttagagcgtcccttggggtttccatggtgctgcccttagcctgcagtatctccacttcctctcccgcctgagcgccgggaacggaaaagcaggcggccggtcccagctgcgacgtagacgccgcgtgggggtggggttgggcgagtaggtgacgctctaggcgagctcgttggcctctctatggtgccgagcgcgcccgttcggacgttgcccctttaatcggcagagggcggtgcccaggaggtcccgcgagagctgcggggggcgggggggcggtgccgaggctgggggccggtggcggatggagcccgcgatggagccggagactctggaggcgcgaatcaatagagccacgaaccccctgaacaaggagctcgactgggccagcatcaacggcttctgcgagcagctcaacgaggactttgaggggcctccactcgccacccggctgctggcccacaagatccagtccccacaggagtgggaggcgatccaggccttgacggtgagaaggggagaggccaccatccgtcccccgccatgtgacgacaccaagggaggccaagactgaggttcttggggtccataaggctcttcagagcccaagagagttgtgctaagatggcccaggatggaggtccgggcctgccccaagggtcccaccacagccagcgggctggcctcccaccccagcatccatacacgtaggcctgttgctgagggaaggccctctagggtcatctggtccaggggttctttgcttcagctgcacatcggctgcctctccaggaagcgtgttcaacacatggaatcagggctccacccagacctgccgaggccacactcctggagtatctgcatccagagatctgcacgtttgtaaagctaaggggtggtgcttgggctcaggcctgaggttttgcatctgttcaatagcagaggagagaggggtgtactgtctgtggcccccagcatgggccacataccaacccaccatggagcaaagctgattttaagtggtggtagagatacagtttctcttttaatacttacgtgtttagttgggtgcagtggcttatacctgtaatttcagcacttggggaggccaaggcaggaggcttgcttgaggcaaggagttcaaggctacagtgagctatgattgtgccactgtactccagactggacaacagagtgagaccccatctctaaataataatcattattgttacatatttgttttaacatttttttctcaagtataactagtcctatgatttcatagatgtagcttaggataaggccaaggtagntgttgcctatataaggtttttttaaaaaaggaaaaataggccgggctggtggctcacgcctgtaatcccagcactttggcaggctgaggcgggcagatcacctgagatcaggagttcaagatcagcctgaccaacatggagaagccccatgtctactaaaaataaaaaattagcgaggcgtggtgggcgggcgcctgtaatcccagctacttgggaggctgaggcagaagaatcatttgaacccaggaggcagaggttacagtgagccgagatcgtgctactgcattccaacctgggcaacaagagtgaaactctgtcnc

SEQ ID NO: 447233 - DNA, 272 bp, Homo sapiens
ctagagcattgctacaggttgggcattgctgggcactgtatgtaggtcgcctgaccctatctcccatgggagtgatgaccagtcccagaggcctgtgtgactctgaatcttccaacctcacaggccattccctcccttctgaaagcccacccatgggcttctggcccctgtccaaggcgtgggagggaggccacggcctctgatgcacctgggcgtcccctcccatcccccctccctgcacaggtgctggaaacatgcatgaagagctgcgg

SEQ ID NO: 447234 - DNA, 578 bp, Homo sapiens
acagagctttggagtggcctggccaggaagaggggaagcgtgtgtggggtcagcacaaggggttgccgggatcttggttactggttctgctctgctgctggttccctctgaaaatgtgggtttctcccctccgtgctgagcctcagaaaggggtagggagccccatgccagcacacatggcccctcggctctctggcctctgcagggtcagcccagctccttcacctctctcctgctttcccctcaggcctcagtgaccccacacccccttcaggcccaagcctggatggtaccggatggaacagcttccaggtaggaggggaccacaaactagtctggcctgtcccagtcccagggtcagggcagctgggacaagtggcctggagaaactaaaaggatggatgggctctactcaagagcccagggccagggggtggcccaggggcctggagacacccacccagggtacagggcctccccttacctccagctgtatcttccccaagtctcagccttggggctgcagcccagcctttgggattgggattgagatgggcaatccctcttcctttcccttg

SEQ ID NO: 447235 - DNA, 210 bp, Homo sapiens
cccacagtccttcagcctggcctctcccctcctgcctgttccagcggagatcctgcaggccaatgacaacctcacccaggtgatcaacctgtataagcagctggtgcggggtgaggaggtcaacggtgatgccacagccggctccatccctggtgaggaggtggcaggagagctgggagggcacccatcaggctggaggggcacagagag

SEQ ID NO: 447236 - DNA, 1206 bp, Homo sapiens
gggcggggtacgggtcgccccctcctcacgccccgcccccggcccgggaggggcggtgtcctcagtcggcccctcagaccctggagcgatggaggaccccggccccggcgcggtccagcggtgggagcgggcgccgcccacctgtcggatccctgggccatgacccctgggacggcgagtgagctgcgccgggaacccccgggacggagagagcagcctccaacccccaaggctcacattgcttcacggagtagcggcccggggaaggagcacgcgagcggttccccggggttgcatctcacacccgggagggagggaccctactattttcaggccccgaatcctccactctctggccctgcatggcgttcctggagcccgcaagtagtcacatttgctcattaccccgtcctggaagggaggacccactgccccatttgattcctcccgccgctcctagtctctagccacatagtgagaaacccccgcaccctacaggcttgggagagtcttagactccagaagtattaataattccaagctccctgtcactcccttcagcctaacccctcagtctccaagatgcctttcccagctcttgctgaacttccttcaaaggcttctacacccctttttttcttgtttctcctcagacgtagcttcctattgcttaggcttcctagcccgcaaaccctccacctgagctccttaacccacagccctgatgatcccctgctctcacagccccgctcctggactctgcctctgaaagccgtggctggcttctccctggtctagtgagggttctctcccaaggctttaactgctgttgggaccccgtcgttgccagggcctcagggaaccctcttggacccgggcacaccggcaactgtctagcgtggtttggggtcatggccggccccttttaagccaggcttgagcagagttgaaccatgaggttggccccagaaccaaacctctagggatgtttcagagtcatcctagccaccagaggggcagggggtggaaaaggggcactcagcagcccttgaccgttgtgaacgccggaagtgtccgcctgggtctcagcagcaactgggctggggggatgggtgggcccctggctaactgatctcagacacaggtcttgagctgtgggtcatacaaaacattctcaggtttagaaacagtgggggttttctgaga

SEQ ID NO: 447237 - DNA, 892 bp, Homo sapiens
gggcggggtacgggtcgccccctcctcacgccccgcccccggcccgggaggggcggtgtcctcagtcggcccctcagaccctggagcgatggaggaccccggccccggcgcggtccagcggtgggagcgggcgccgcccacctgtcggatccctgggccatgacccctgggacggcgagtgagctgcgccgggaacccccgggacggagagagcagcctccaacccccaaggctcacattgcttcacggagtagcggcccggggaaggagcacgcgagcggttccccggggttgcatctcacacccgggagggagggaccctactattttcaggccccgaatcctccactctctggccctgcatggcgttcctggagcccgcaagtagtcacatttgctcattaccccgtcctggaagggaggacccactgccccatttgattcctcccgccgctcctagtctctagccacatagtgagaaacccccgcaccctacaggcttgggagagtcttagactccagaagtattaataattccaagctccctgtcactcccttcagcctaacccctcagtctccaagatgcctttcccagctcttgctgaacttccttcaaaggcttctacacccctttttttcttgtttctcctcagacgtagcttcctattgcttaggcttcctagcccgcaaacctccagcctgggcaacaaagcaagactctttctcaaaaaaaaataaaaataaaaaaatacaggccggacgcagtggctcacgcctgtaattccagtactttgggaggccgaggcaggtggatcacgaggttaggagatcaagaccatcctggctaacacggtgaaaccccgtctctactaaaaatacaaaaaaaaaaaaa

SEQ ID NO: 447238 - DNA, 3522 bp, Homo sapiens
aatgcccagaatactgtaagcactcaagaaactgatttattttcgtcattttcacagcggccaaggtacatgaggatgtagcttatcgcccttttaagggactctcccacgttcgactctaagcggaagtacccgctcagggctccggaagtggcctcagagcccctcagcaacatgcccgcagagaattcttccggaggcggtcacagacatctccgtgacgcagaacgagttagagcgtcccttggggtttccatggtgctgcccttagcctgcagtatctccacttcctctcccgcctgagcgccgggaacggaaaagcaggcagcagcgaggacctcatgaaggaactgtaccagcgctgtgagcggatgcgtcccacgctcttccgactggcgagtgacacagaggacaatgatgaggccttagcggagatccttgcaggccaatgacaagctcacccaggtgatcaacctgtataagcagctggtgcggggttgaggaggtcaaccgggtgatgccacagccggtctccatcccttgggagcacctcgtgcctgctgtatctcttcagtgccttggatctcccgcctgctgggcacacctacccagctatgcccaacctgcctggcgagcaggccagccctgagcagcccagtgcctcagtttccctggcttgacgacgagctcatgtctctgggcctcagtgaccccaaagccccttcaggcccaagcctggattgtaccggatggagcccgcgatggagccggagactctggaggcgcgaatcaatagagccacgaaccccctgaacaaggagctcgactgggccagcatcaacggcttctgcgagcagctcaacgaggactttgaggggcctccactcgccacccggctgctggcccacaagatccagtccccacaggagtgggaggcgatccaggccttgacggtgctggaaacatgcatgaagagctgcggcaagcggttccacgacgaagtgggcaagttccgctttctcaacgagctcatcaaggtcgtgtctcccaagtatctgggctctcggacatcggagaaggtgaagaacaagatcttggagctcctctacagctggacagtgggcctgcccgaggaggtgaaaatcgcagaggcctaccagatgctaaagaagcaggggattgtaaagtccgaccccaagcttccagatgacactacctttccccttcctcctccacggccgaagaatgtgatctttgaagatgaggagaaatccaagatgctggcccgcctgctgaagagctcccatcccgaagacctccgcgcagccaataagctcatcaaagagatggtgcaggaggaccagaagcggatggagaagatctcgaagagggtgaatgccatcgaggaggtgaacaacaatgtgaaactgctcacggagatggtgatgagccacagccagggcggcgcagcagctggcagcagcgaggacctcatgaaggaactgtaccagcgctgtgagcggatgcggcccacgctcttccgactggcgagtgacacagaggacaatgatgaggccttagcggagatcctgcaggccaatgacaacctcacccaggtgatcaacctgtataagcagctggtgcggggtgaggaggtcaacggtgatgccacagccggctccatccctgggagcacctcggccctgctggatctctcaggcctggatctcccgcctgcgggcaccacctacccagctatgcccacccgccctggcgagcaggccagccctgagcagcccagtgcctcagtttccctgcttgacgacgagctcatgtctctgggcctcagtgaccccacacccccttcaggcccaagcctggatggtaccggatggaacagcttccagtcgtcggatgccactgagcccccagcccctgctctggcccaggcccccagtatggaaagccgacccccagcgcagacatccctgccagcaagcagcggtctggacgacctagacctcctggggaagaccctcctgcagcagtcgctgcccccggaatcccagcaagtgcggtgggagaagcagcagccaaccccccggctcacactccgggacctgcagaataagagcagcagctgcagctcccccagctccagcgccaccagccttctccacaccgtgtccccagagccccccaggcctccgcagcagcccgtaccaaccgagctctcactggccagcatcactgtgcccctggagtccatcaaacccagcaacatcctgcccgtgactgtgtatgaccagcacggcttccgcatcctcttccattttgcccgggacccactgccagggcgctccgacgtgctggtggtggtggtttccatgctgagcaccgccccccagcccatccgcaacatcgtgttccagtcagctgtccccaaggttatgaaggtgaagctgcagccaccctcgggcacggagctgccagcttttaaccccatcgtccacccctcagcaatcacccaggtcctgctgcttgccaacccccagaaggagaaggttcgcctccgctacaagctcaccttcaccatgggtgaccagacctacaacgagatgggggatgtggaccagttccccccacctgaaacctggggtagcctctagaacagaggggctggggagaggaaggggcagagggaccggtcactgtccagcctggagggaggcattggtggccaaggacaccctttgttgcccatggccattcacccccaggcctggtgcttctccccacacccctgtaggcctcaagtgactcttccccctcctgctccggccccgcccctgctgagccaaacccagtaggaggctgggcctgggtttgtgccgctggggtctccatcaccgggacctggagagggaggggctgtgtagccttggaagaacttgggtcatggggaggaagcacagctgttggggaagggccaggacctcaggcccagccccaaccccagctggggtggggtcttccccacctgtctcttatgccttatgggaaggcccagccataactcgggggccatgctggagctggggaccagcttaggcctcctccataggaacccagtgactggggggtgacgcctacacccccagctatttgcactctggtgtgtggtttgactctgcttttcttccggattggccctgtggtcacagcctcagggggccaggctgggggaacctcacctggcccgtactcctgggggtttccctttgccattgggccccctgagggactgtgggggctcaagggtaatgccagaggcccatggccccagcgaggggctgtggggcacctagagttctcggtgtgtctccttcattcattggcctctgctggggcctcctatgggtgtcttacgtctgtccatccatctgtccgtggtcagaagtggggtcagtgtgtgagtgagagcaggagtatttatgaaaataaaacgtcgtttttcctgga

SEQ ID NO: 447239 - DNA, 2793 bp, Homo sapiens
  misc_feature (59)..(59): n is a, c, g, or t
gaaattaatggctaggtacgaggctgggtttaaattcggccgaggctctggaggcgcgnatcaatagagccacgaaccccctgaacaaggagctcgactgggccagcatcaacggcttctgcgagcagctcaacgaggactttgaggggcctccactcgccacccggctgctggcccacaagatccagtccccacaggagtgggaggcgatccaggccttgacggtgctggaaacatgcatgaagagctgcggcaagcggttccacgacgaagtgggcaagttccgctttctcaacgagctcatcaaggtcgtgtctcccaagtatctgggctctcggacatcggagaaggtgaagaacaagatcttggagctcctctacagctggacagtgggcctgcccgaggaggtgaaaatcgcagaggcctaccagatgctaaagaagcaggggattgtaaagtccgaccccaagcttccagatgacactacctttccccttcctcctccacggccgaagaatgtgatctttgaagatgaggagaaatccaagatgctggcccgcctgctgaagagctcccatcccgaagacctccgcgcagccaataagctcatcaaagagatggtgcaggaggaccagaagcggatggagaagatctcgaagagggtgaatgccatcgaggaggtgaacaacaatgtgaaactgctcacggagatggtgatgagccacagccagggcggcgcagcagctggcagcagcgaggacctcatgaaggaactgtaccagcgctgtgagcggatgcggcccacgctcttccgactggcgagtgacacagaggacaatgatgaggccttagcggagatcctgcaggccaatgacaacctcacccaggtgatcaacctgtataagcagctggtgcggggtgaggaggtcaacggtgatgccacagccggctccatccctgggagcacctcggccctgctggatctctcaggcctggatctcccgcctgcgggcaccacctacccagctatgcccacccgccctggcgagcaggccagccctgagcagcccagtgcctcagtttccctgcttgacgacgagctcatgtctctgggcctcagtgaccccacacccccttcaggcccaagcctggatggtaccggatggaacagcttccagtcgtcggatgccactgagcccccagcccctgctctggcccaggcccccagtatggaaagccgacccccagcgcagacatccctgccagcaagcagcggtctggacgacctagacctcctggggaagaccctcctgcagcagtcgctgcccccggaatcccagcaagtgcggtgggagaagcagcagccaaccccccggctcacactccgggacctgcagaataagagcagcagctgcagctcccccagctccagcgccaccagccttctccacaccgtgtccccagagccccccaggcctccgcagcagcccgtaccaaccgagctctcactggccagcatcactgtgcccctggagtccatcaaacccagcaacatcctgcccgtgactgtgtatgaccagcacggcttccgcatcctcttccattttgcccgggacccactgccagggcgctccgacgtgctggtggtggtggtttccatgctgagcaccgccccccagcccatccgcaacatcgtgttccagtcagctgtccccaaggttatgaaggtgaagctgcagccaccctcgggcacggagctgccagcttttaaccccatcgtccacccctcagcaatcacccaggtcctgctgcttgccaacccccagaaggagaaggttcgcctccgctacaagctcaccttcaccatgggtgaccagacctacaacgagatgggggatgtggaccagttccccccacctgaaacctggggtagcctctagaacagaggggctggggagaggaaggggcagagggaccggtcactgtccagcctggagggaggcattggtggccaaggacaccctttgttgcccatggccattcacccccaggcctggtgcttctccccacacccctgtaggcctcaagtgactcttccccctcctgctccggccccgcccctgctgagccaaacccagtaggaggctgggcctgggtttgtgccgctggggtctccatcaccgggacctggagagggaggggctgtgtagccttggaagaacttgggtcatggggaggaagcacagctgttggggaagggccaggacctcaggcccagccccaaccccagctggggtggggtcttccccacctgtctcttatgccttatgggaaggcccagccataactcgggggccatgctggagctggggaccagcttaggcctcctccataggaacccagtgactggggggtgacgcctacacccccagctatttgcactctggtgtgtggtttgactctgcttttcttccggattggccctgtggtcacagcctcagggggccaggctgggggaacctcacctggcccgtactcctgggggtttccctttgccattgggccccctgagggactgtgggggctcaagggtaatgccagaggcccatggccccagcgaggggctgtggggcacctagagttctcggtgtgtctccttcattcattggcctctgctggggcctcctatgggtgtcttacgtctgtccatccatctgtccgtggtcagaagtggggtcagtgtgtgagtgagagcaggagtatttatgaaaataaaacgtcgtttttcctgga

SEQ ID NO: 447240 - DNA, 3032 bp, Homo sapiens
gggcggggtacgggtcgccccctcctcacgccccgcccccggcccgggaggggcggtgtcctcagtcggcccctcagaccctggagcgatggaggaccccggccccggcgcggtccagcggtgggagcgggcgccgcccacctgtcggatccctgggccatgacccctgggacggcgagagtagaggattagagaaggggacaccggagccactcccaagggaatgaaggctttctgaacctggtgtgatgatagagccacgaaccccctgaacaaggagctcgactgggccagcatcaacggcttctgcgagcagctcaacgaggactttgaggggcctccactcgccacccggctgctggcccacaagatccagtccccacaggagtgggaggcgatccaggccttgacggtgagaaggggagaggccaccatccgtcccccgccatgtgacgacaccaaggtgctggaaacatgcatgaagagctgcggcaagcggttccacgacgaagtgggcaagttccgctttctcaacgagctcatcaaggtcgtgtctcccaagtatctgggctctcggacatcggagaaggtgaagaacaagatcttggagctcctctacagctggacagtgggcctgcccgaggaggtgaaaatcgcagaggcctaccagatgctaaagaagcaggggattgtaaagtccgaccccaagcttccagatgacactacctttccccttcctcctccacggccgaagaatgtgatctttgaagatgaggagaaatccaagatgctggcccgcctgctgaagagctcccatcccgaagacctccgcgcagccaataagctcatcaaagagatggtgcaggaggaccagaagcggatggagaagatctcgaagagggtgaatgccatcgaggaggtgaacaacaatgtgaaactgctcacggagatggtgatgagccacagccagggcggcgcagcagctggcagcagcgaggacctcatgaaggaactgtaccagcgctgtgagcggatgcggcccacgctcttccgactggcgagtgacacagaggacaatgatgaggccttagcggagatcctgcaggccaatgacaacctcacccaggtgatcaacctgtataagcagctggtgcggggtgaggaggtcaacggtgatgccacagccggctccatccctgggagcacctcggccctgctggatctctcaggcctggatctcccgcctgcgggcaccacctacccagctatgcccacccgccctggcgagcaggccagccctgagcagcccagtgcctcagtttccctgcttgacgacgagctcatgtctctgggcctcagtgaccccacacccccttcaggcccaagcctggatggtaccggatggaacagcttccagtcgtcggatgccactgagcccccagcccctgctctggcccaggcccccagtatggaaagccgacccccagcgcagacatccctgccagcaagcagcggtctggacgacctagacctcctggggaagaccctcctgcagcagtcgctgcccccggaatcccagcaagtgcggtgggagaagcagcagccaaccccccggctcacactccgggacctgcagaataagagcagcagctgcagctcccccagctccagcgccaccagccttctccacaccgtgtccccagagccccccaggcctccgcagcagcccgtaccaaccgagctctcactggccagcatcactgtgcccctggagtccatcaaacccagcaacatcctgcccgtgactgtgtatgaccagcacggcttccgcatcctcttccattttgcccgggacccactgccagggcgctccgacgtgctggtggtggtggtttccatgctgagcaccgccccccagcccatccgcaacatcgtgttccagtcagctgtccccaaggttatgaaggtgaagctgcagccaccctcgggcacggagctgccagcttttaaccccatcgtccacccctcagcaatcacccaggtcctgctgcttgccaacccccagaaggagaaggttcgcctccgctacaagctcaccttcaccatgggtgaccagacctacaacgagatgggggatgtggaccagttccccccacctgaaacctggggtagcctctagaacagaggggctggggagaggaaggggcagagggaccggtcactgtccagcctggagggaggcattggtggccaaggacaccctttgttgcccatggccattcacccccaggcctggtgcttctccccacacccctgtaggcctcaagtgactcttccccctcctgctccggccccgcccctgctgagccaaacccagtaggaggctgggcctgggtttgtgccgctggggtctccatcaccgggacctggagagggaggggctgtgtagccttggaagaacttgggtcatggggaggaagcacagctgttggggaagggccaggacctcaggcccagccccaaccccagctggggtggggtcttccccacctgtctcttatgccttatgggaaggcccagccataactcgggggccatgctggagctggggaccagcttaggcctcctccataggaacccagtgactggggggtgacgcctacacccccagctatttgcactctggtgtgtggtttgactctgcttttcttccggattggccctgtggtcacagcctcagggggccaggctgggggaacctcacctggcccgtactcctgggggtttccctttgccattgggccccctgagggactgtgggggctcaagggtaatgccagaggcccatggccccagcgaggggctgtggggcacctagagttctcggtgtgtctccttcattcattggcctctgctggggcctcctatgggtgtcttacgtctgtccatccatctgtccgtggtcagaagtggggtcagtgtgtgagtgagagcaggagtatttatgaaaataaaacgtcgtttttcctgga

SEQ ID NO: 447241 - DNA, 3150 bp, Homo sapiens
aatgcccagaatactgtaagcactcaagaaactgatttattttcgtcattttcacagcggccaaggtacatgaggatgtagcttatcgcccttttaagggactctcccacgttcgactctaagcggaagtacccgctcagggctccggaagtggcctcagagcccctcagcaacatgcccgcagagaattcttccggaggcggtcacagacatctccgtgacgcagaacgagttagagcgtcccttggggtttccatggtgctgcccttagcctgcagtatctccacttcctctcccgcctgagcgccgggaacggaaaagcaggcggccggtcccagctgcgacgtagacgccgcgtgggggtggggttgggcgagtaggtgacgctctaggcgagctcgttggcctctctatggtgccgagcgcgcccgttcggacgttgcccctttaatcggcagagggcggtgcccaggaggtcccgcgagagctgcggggggcgggggggcggtgccgaggctgggggccggtggcggatggagcccgcgatggagccggagactctggaggcgcgaatcaatagagccacgaaccccctgaacaaggagctcgactgggccagcatcaacggcttctgcgagcagctcaacgaggactttgaggggcctccactcgccacccggctgctggcccacaagatccagtccccacaggagtgggaggcgatccaggccttgacggtgctggaaacatgcatgaagagctgcggcaagcggttccacgacgaagtgggcaagttccgctttctcaacgagctcatcaaggtcgtgtctcccaagtatctgggctctcggacatcggagaaggtgaagaacaagatcttggagctcctctacagctggacagtgggcctgcccgaggaggtgaaaatcgcagaggcctaccagatgctaaagaagcaggggattgtaaagtccgaccccaagcttccagatgacactacctttccccttcctcctccacggccgaagaatgtgatctttgaagatgaggagaaatccaagatgctggcccgcctgctgaagagctcccatcccgaagacctccgcgcagccaataagctcatcaaagagatggtgcaggaggaccagaagcggatggagaagatctcgaagagggtgaatgccatcgaggaggtgaacaacaatgtgaaactgctcacggagatggtgatgagccacagccagggcggcgcagcagctggcagcagcgaggacctcatgaaggaactgtaccagcgctgtgagcggatgcggcccacgctcttccgactggcgagtgacacagaggacaatgatgaggccttagcggagatcctgcaggccaatgacaacctcacccaggtgatcaacctgtataagcagctggtgcggggtgaggaggtcaacggtgatgccacagccggctccatccctgggagcacctcggccctgctggatctctcaggcctggatctcccgcctgcgggcaccacctactcgtcggatgccactgagcccccagcccctgctctggcccaggcccccagtatggaaagccgacccccagcgcagacatccctgccagcaagcagcggtctggacgacctagacctcctggggaagaccctcctgcagcagtcgctgcccccggaatcccagcaagtgcggtgggagaagcagcagccaaccccccggctcacactccgggacctgcagaataagagcagcagctgcagctcccccagctccagcgccaccagccttctccacaccgtgtccccagagccccccaggcctccgcagcagcccgtaccaaccgagctctcactggccagcatcactgtgcccctggagtccatcaaacccagcaacatcctgcccgtgactgtgtatgaccagcacggcttccgcatcctcttccattttgcccgggacccactgccagggcgctccgacgtgctggtggtggtggtttccatgctgagcaccgccccccagcccatccgcaacatcgtgttccagtcagctgtccccaaggttatgaaggtgaagctgcagccaccctcgggcacggagctgccagcttttaaccccatcgtccacccctcagcaatcacccaggtcctgctgcttgccaacccccagaaggagaaggttcgcctccgctacaagctcaccttcaccatgggtgaccagacctacaacgagatgggggatgtggaccagttccccccacctgaaacctggggtagcctctagaacagaggggctggggagaggaaggggcagagggaccggtcactgtccagcctggagggaggcattggtggccaaggacaccctttgttgcccatggccattcacccccaggcctggtgcttctccccacacccctgtaggcctcaagtgactcttccccctcctgctccggccccgcccctgctgagccaaacccagtaggaggctgggcctgggtttgtgccgctggggtctccatcaccgggacctggagagggaggggctgtgtagccttggaagaacttgggtcatggggaggaagcacagctgttggggaagggccaggacctcaggcccagccccaaccccagctggggtggggtcttccccacctgtctcttatgccttatgggaaggcccagccataactcgggggccatgctggagctggggaccagcttaggcctcctccataggaacccagtgactggggggtgacgcctacacccccagctatttgcactctggtgtgtggtttgactctgcttttcttccggattggccctgtggtcacagcctcagggggccaggctgggggaacctcacctggcccgtactcctgggggtttccctttgccattgggccccctgagggactgtgggggctcaagggtaatgccagaggcccatggccccagcgaggggctgtggggcacctagagttctcggtgtgtctccttcattcattggcctctgctggggcctcctatgggtgtcttacgtctgtccatccatctgtccgtggtcagaagtggggtcagtgtgtgagtgagagcaggagtatttatgaaaataaaacgtcgtttttcctgga

SEQ ID NO: 447242 - DNA, 2170 bp, Homo sapiens
tcgcctccagtccagccctgtcctcgtattcttggggacactgtggctcagccagcacagtgcctagcccacagtcacccagcaggcgtccctcgagtgggccagtggcaggcacagagctgctctccccttgcctggatgcgtgaggaaaggaacctcttctccctgcagcccagccctgcaggctctctgctgccagatgacgagtgaagatgaaagtcctgatgtctattgtctgtgtgcacagagctttggagtggcctggccaggaagaggggaagcgtgtgtggggtcagcacaaggggttgccgggatcttggttactggttctgctctgctgctggttccctctgaaaatgtgggtttctcccctccgtgctgagcctcagaaaggggtagggagccccatgccagcacacatggcccctcggctctctggcctctgcagggtcagcccagctccttcacctctctcctgctttcccctcaggcctcagtgaccccacacccccttcaggcccaagcctggatggtaccggatggaacagcttccagtcgtcggatgccactgagcccccagcccctgctctggcccaggcccccagtatggaaagccgacccccagcgcagacatccctgccagcaagcagcggtctggacgacctagacctcctggggaagaccctcctgcagcagtcgctgcccccggaatcccagcaagtgcggtgggagaagcagcagccaaccccccggctcacactccgggacctgcagaataagagcagcagctgcagctcccccagctccagcgccaccagccttctccacaccgtgtccccagagccccccaggcctccgcagcagcccgtaccaaccgagctctcactggccagcatcactgtgcccctggagtccatcaaacccagcaacatcctgcccgtgactgtgtatgaccagcacggcttccgcatcctcttccattttgcccgggacccactgccagggcgctccgacgtgctggtggtggtggtttccatgctgagcaccgccccccagcccatccgcaacatcgtgttccagtcagctgtccccaaggttatgaaggtgaagctgcagccaccctcgggcacggagctgccagcttttaaccccatcgtccacccctcagcaatcacccaggtcctgctgcttgccaacccccagaaggagaaggttcgcctccgctacaagctcaccttcaccatgggtgaccagacctacaacgagatgggggatgtggaccagttccccccacctgaaacctggggtagcctctagaacagaggggctggggagaggaaggggcagagggaccggtcactgtccagcctggagggaggcattggtggccaaggacaccctttgttgcccatggccattcacccccaggcctggtgcttctccccacacccctgtaggcctcaagtgactcttccccctcctgctccggccccgcccctgctgagccaaacccagtaggaggctgggcctgggtttgtgccgctggggtctccatcaccgggacctggagagggaggggctgtgtagccttggaagaacttgggtcatggggaggaagcacagctgttggggaagggccaggacctcaggcccagccccaaccccagctggggtggggtcttccccacctgtctcttatgccttatgggaaggcccagccataactcgggggccatgctggagctggggaccagcttaggcctcctccataggaacccagtgactggggggtgacgcctacacccccagctatttgcactctggtgtgtggtttgactctgcttttcttccggattggccctgtggtcacagcctcagggggccaggctgggggaacctcacctggcccgtactcctgggggtttccctttgccattgggccccctgagggactgtgggggctcaagggtaatgccagaggcccatggccccagcgaggggctgtggggcacctagagttctcggtgtgtctccttcattcattggcctctgctggggcctcctatgggtgtcttacgtctgtccatccatctgtccgtggtcagaagtggggtcagtgtgtgagtgagagcaggagtatttatgaaaataaaacgtcgtttttcctgga

SEQ ID NO: 447243 - DNA, 1670 bp, Homo sapiens
tatatgagctcggtaccggggttcagagactggatggtaccggatggaacagctctcgtcggatgccactgagcccccagcccctgctctggcccaggcccccagtatggaaagccgacccccagcgcagacatccctgccagcaagcagcggtctggacgacctagacctcctggggaagaccctcctgcagcagtcgctgcccccggaatcccagcaagtgcggtgggagaagcagcagccaaccccccggctcacactccgggacctgcagaataagagcagcagctgcagctcccccagctccagcgccaccagccttctccacaccgtgtccccagagccccccaggcctccgcagcagcccgtaccaaccgagctctcactggccagcatcactgtgcccctggagtccatcaaacccagcaacatcctgcccgtgactgtgtatgaccagcacggcttccgcatcctcttccattttgcccgggacccactgccagggcgctccgacgtgctggtggtggtggtttccatgctgagcaccgccccccagcccatccgcaacatcgtgttccagtcagctgtccccaaggttatgaaggtgaagctgcagccaccctcgggcacggagctgccagcttttaaccccatcgtccacccctcagcaatcacccaggtcctgctgcttgccaacccccagaaggagaaggttcgcctccgctacaagctcaccttcaccatgggtgaccagacctacaacgagatgggggatgtggaccagttccccccacctgaaacctggggtagcctctagaacagaggggctggggagaggaaggggcagagggaccggtcactgtccagcctggagggaggcattggtggccaaggacaccctttgttgcccatggccattcacccccaggcctggtgcttctccccacacccctgtaggcctcaagtgactcttccccctcctgctccggccccgcccctgctgagccaaacccagtaggaggctgggcctgggtttgtgccgctggggtctccatcaccgggacctggagagggaggggctgtgtagccttggaagaacttgggtcatggggaggaagcacagctgttggggaagggccaggacctcaggcccagccccaaccccagctggggtggggtcttccccacctgtctcttatgccttatgggaaggcccagccataactcgggggccatgctggagctggggaccagcttaggcctcctccataggaacccagtgactggggggtgacgcctacacccccagctatttgcactctggtgtgtggtttgactctgcttttcttccggattggccctgtggtcacagcctcagggggccaggctgggggaacctcacctggcccgtactcctgggggtttccctttgccattgggccccctgagggactgtgggggctcaagggtaatgccagaggcccatggccccagcgaggggctgtggggcacctagagttctcggtgtgtctccttcattcattggcctctgctggggcctcctatgggtgtcttacgtctgtccatccatctgtccgtggtcagaagtggggtcagtgtgtgagtgagagcaggagtatttatgaaaataaaacgtcgtttttcctgga

SEQ ID NO: 447244 - DNA, 1924 bp, Homo sapiens
aatgcccagaatactgtaagcactcaagaaactgatttattttcgtcattttcacagcggccaaggtacatgaggatgtagcttatcgcccttttaagggactctcccacgttcgactctaagcggaagtacccgctcagggctccggaagtggcctcagagcccctcagcaacatgcccgcagagaattcttccggaggcggtcacagacatctccgtgacgcagaacgagttagagcgtcccttggggtttccatggtgctgcccttagcctgcagtatctccacttcctctcccgcctgagcgccgggaacggaaaagcaggcggccggtcccagctgcgacgtagacgccgcgtgggggtggggttgggcgagtaggtgacgctctaggcgagctcgttggcctctctatggtgccgagcgcgcccgttcggacgttgcccctttaatcggcagagggcggtgcccaggaggtcccgcgagagctgcggggggcgggggggcggtgccgaggctgggggccggtggcggatggagcccgcgatggagccggagactctggaggcgcgaatcaatagagccacgaaccccctgaacaaggagctcgactgggccagcatcaacggcttctgcgagcagctcaacgaggactttgaggggcctccactcgccacccggctgctggcccacaagatccagtccccacaggagtgggaggcgatccaggccttgacggtgctggaaacatgcatgaagagctgcggcaagcggttccacgacgaagtgggcaagttccgctttctcaacgagctcatcaaggtcgtgtctcccaagtatctgggctctcggacatcggagaaggtgaagaacaagatcttggagctcctctacagctggacagtgggcctgcccgaggaggtgaaaatcgcagaggcctaccagatgctaaagaagcaggggattgtaaagtccgaccccaagcttccagatgacactacctttccccttcctcctccacggccgaagaatgtgatctttgaagatgaggagaaatccaagatgctggcccgcctgctgaagagctcccatcccgaagacctccgcgcagccaataagctcatcaaagagatggtgcaggaggaccagaagcggatggagaagatctcgaagagggtgaatgccatcgaggaggtgaacaacaatgtgaaactgctcacggagatggtgatgagccacagccagggcggcgcagcagctggcagcagcgaggacctcatgaaggaactgtaccagcgctgtgagcggatgcggcccacgctcttccgactggcgagtgacacagaggacaatgatgaggccttagcggagatcctgcaggccaatgacaacctcacccaggtgatcaacctgtataagcagctggtgcggggtgaggaggtcaacggtgatgccacagccggctccatccctgggagcacctcggccctgctggatctctcaggcctggatctcccgcctgcgggcaccacctacccagctatgcccacccgccctggcgagcaggccagccctgagcagcccagtgcctcagtttccctgcttgacgacgagctcatgtctctgggcctcagtgaccccacacccccttcaggcccaagcctggatggtaccggatggaacagcttccagtcgtcggatgccactgagcccccagcccctgctctggcccaggcccccagtatggaaagccgacccccagcgcagacatccctgccagcaagcagcggtctggacgacctagacctcctggggaagaccctcctgcagcagtcgctgcccccggaatcccagcaagtgcggtgggagaagcagcaagcaaaacacacacaacaggcatcacatctccgggagcaagcagcacc

SEQ ID NO: 447245 - DNA, 662 bp, Homo sapiens
gggcggggtacgggtcgccccctcctcacgccccgcccccggcccgggaggggcggtgtcctcagtcggcccctcagaccctggagcgatggaggaccccggccccggcgcggtccagcggtgggagcgggcgccgcccacctgtcggatccctgggccatgacccctgggacggcgagtgagctgcgccgggaacccccgggacggagagagcagcctccaacccccaaggctcacattgcttcacggagtagcggcccggggaaggagcacgcgagcggttccccggggttgcatctcacacccgggagggagggaccctactattttcaggccccgaatcctccactctctggccctgcatggcgttcctggagcccgcaagtagtcacatttgctcattaccccgtcctggaagggaggacccactgccccatttgattcctcccgccgctcctagtcttccagcctgggcaacaaagcaagactctttctcaaaaaaaaataaaaataaaaaaatacaggccggacgcagtggctcacgcctgtaattccagtactttgggaggccgaggcaggtggatcacgaggttaggagatcaagaccatcctggctaacacggtgaaaccccgtctctactaaaaatacaaaaaaaaaaaaa

SEQ ID NO: 447246 - DNA, 3608 bp, Homo sapiens
ctcccgcggacgcgggcatatgaggaggcggaggcggcggccgccgcagcctctgtgcggtgggaccaacggacggacggacggacgcgcgcacctaccgaggcgcgggcgctgcagaggctcccagcccaagcctgagcctgagcccgccccgaggtccccgccccgcccgcctggctctctcgccgcggagccgccaagatgggggacaagaaagatgacaaggactcacccaagaagaacaagggcaaggagcgccgggacctggatgacctcaagaaggaggtggctatgacagagcacaagatgtcagtggaagaggtctgccggaaatacaacacagactgtgtgcagggtttgacccacagcaaagcccaggagatcctggcccgggatgggcctaacgcactcacgccaccgcctaccaccccagagtgggtcaagttttgccggcagctcttcgggggcttctccatcctgctgtggatcggggctatcctctgcttcctggcctacggtatccaggcgggcaccgaggacgacccctctggtgacaacctgtacctgggcatcgtgctggcggccgtggtgatcatcactggctgcttctcctactaccaggaggccaagagctccaagatcatggagtccttcaagaacatggtgccccagcaagccctggtgatccgggaaggtgagaagatgcaggtgaacgctgaggaggtggtggtcggggacctggtggagatcaagggtggagaccgagtgccagctgacctgcggatcatctcagcccacggctgcaaggtggacaactcctccctgactggcgaatccgagccccagactcgctctcccgactgcacgcacgacaaccccttggagactcggaacatcaccttcttttccaccaactgtgtggaaggcacggctcggggcgtggtggtggccacgggcgaccgcactgtcatgggccgtatcgccaccctggcatcagggctggaggtgggcaagacgcccatcgccatcgagattgagcacttcatccagctcatcaccggcgtggctgtcttcctgggtgtctccttcttcatcctctccctcattctcggatacacctggcttgaggctgtcatcttcctcatcggcatcatcgtggccaatgtcccagagggtctgctggccactgtcactgtgtgtctgacgctgaccgccaagcgcatggcccggaagaactgcctggtgaagaacctggaggctgtagaaaccctgggctccacgtccaccatctgctcagataagacagggaccctcactcagaaccgcatgacagtcgcccacatgtggtttgacaaccagatccacgaggctgacaccactgaggaccagtcagggacctcatttgacaagagttcgcacacctgggtggccctgtctcacatcgctgggctctgcaatcgcgctgtcttcaagggtggtcaggacaacatccctgtgctcaagagggatgtggctggggatgcgtctgagtctgccctgctcaagtgcatcgagctgtcctctggctccgtgaagctgatgcgtgaacgcaacaagaaagtggctgagattcccttcaattccaccaacaaataccagctctccatccatgagaccgaggaccccaacgacaaccgatacctgctggtgatgaagggtgcccccgagcgcatcctggaccgctgctccaccatcctgctacagggcaaggagcagcctctggacgaggaaatgaaggaggccttccagaatgcctaccttgagctcggtggcctgggcgagcgcgtgcttggtttctgccattattacctgcccgaggagcagttccccaagggctttgccttcgactgtgatgacgtgaacttcaccacggacaacctctgctttgtgggcctcatgtccatgatcgacccaccccgggcagccgtccctgacgcggtgggcaagtgtcgcagcgcaggcatcaaggtcatcatggtcaccggcgatcaccccatcacggccaaggccattgccaagggtgtgggcatcatctctgagggcaacgagactgtggaggacatcgccgcccggctcaacattcccgtcagccaggttaacccccgggatgccaaggcctgcgtgatccacggcaccgacctcaaggacttcacctccgagcaaatcgacgagatcctgcagaatcacaccgagatcgtcttcgcccgcacatccccccagcagaagctcatcattgtggagggctgtcagagacagggtgcaattgtggctgtgaccggggatggtgtgaacgactcccccgctctgaagaaggccgacattggggtggccatgggcatcgctggctctgacgtctccaagcaggcagctgacatgatcctgctggacgacaactttgcctccatcgtcacaggggtggaggagggccgcctgatcttcgacaacctaaagaagtccattgcctacaccctgaccagcaatatcccggagatcacgcccttcctgctgttcatcatggccaacatcccgctgcccctgggcaccatcaccatcctctgcatcgatctgggcactgacatggtccctgccatctcactggcgtacgaggctgccgaaagcgacatcatgaagagacagcccaggaacccgcggacggacaaattggtcaatgagagactcatcagcatggcctacgggcagattggaatgatccaggctctcggtggcttcttctcttactttgtgatcctggcagaaaatggcttcttgcccggcaacctggtgggcatccggctgaactgggatgaccgcaccgtcaatgacctggaagacagttacgggcagcagtggacatacgagcagaggaaggtggtggagttcacctgccacacggccttctttgtgagcatcgttgtcgtccagtgggccgatctgatcatctgcaagacccggaggaactcggtcttccagcagggcatgaagaacaagatcctgatcttcgggctgtttgaggagacggccctggctgccttcctgtcctactgccccggcatggacgtggccctgcgcatgtaccctctcaagcccagctggtggttctgtgccttcccctacagtttcctcatcttcgtctacgacgaaatccgcaaactcatcctgcgcaggaacccagggggttgggtggagaaggaaacctactactgacctcagccccaccacatcgcccatctcttccccgtcccgcaggcccaggaccgcccctgtcagtccccccaattttgtattctggggggaggagccctctcttcctgtggccccaccttggcccccaccccctccactatctcctgccgcccccactctggctggcttctctcccctgccccaaacctctctcctctctcttttctgtgtcagtttctctccctctcctcacccctctatccattcctcccgccccagccacctccctgggctcttttttactccccttcagccccccggctgatgccatctctggttctggacaattatcaaatatatcagtggggagagagaagcggtgtgtg

SEQ ID NO: 447247 - DNA, 3452 bp, Homo sapiens
gagaagactggagaaagaatagagggctgagaccagaggtgaagcgggagggacaagaaagatgacaaggactcacccaagaagaacaagggcaaggagcgccgggacctggatgacctcaagaaggaggtggctatgacagagcacaagatgtcagtggaagaggtctgccggaaatacaacacagactgtgtgcagggtttgacccacagcaaagcccaggagatcctggcccgggatgggcctaacgcactcacgccaccgcctaccaccccagagtgggtcaagttttgccggcagctcttcgggggcttctccatcctgctgtggatcggggctatcctctgcttcctggcctacggtatccaggcgggcaccgaggacgacccctctggtgacaacctgtacctgggcatcgtgctggcggccgtggtgatcatcactggctgcttctcctactaccaggaggccaagagctccaagatcatggagtccttcaagaacatggtgccccagcaagccctggtgatccgggaaggtgagaagatgcaggtgaacgctgaggaggtggtggtcggggacctggtggagatcaagggtggagaccgagtgccagctgacctgcggatcatctcagcccacggctgcaaggtggacaactcctccctgactggcgaatccgagccccagactcgctctcccgactgcacgcacgacaaccccttggagactcggaacatcaccttcttttccaccaactgtgtggaaggcacggctcggggcgtggtggtggccacgggcgaccgcactgtcatgggccgtatcgccaccctggcatcagggctggaggtgggcaagacgcccatcgccatcgagattgagcacttcatccagctcatcaccggcgtggctgtcttcctgggtgtctccttcttcatcctctccctcattctcggatacacctggcttgaggctgtcatcttcctcatcggcatcatcgtggccaatgtcccagagggtctgctggccactgtcactgtgtgtctgacgctgaccgccaagcgcatggcccggaagaactgcctggtgaagaacctggaggctgtagaaaccctgggctccacgtccaccatctgctcagataagacagggaccctcactcagaaccgcatgacagtcgcccacatgtggtttgacaaccagatccacgaggctgacaccactgaggaccagtcagggacctcatttgacaagagttcgcacacctgggtggccctgtctcacatcgctgggctctgcaatcgcgctgtcttcaagggtggtcaggacaacatccctgtgctcaagagggatgtggctggggatgcgtctgagtctgccctgctcaagtgcatcgagctgtcctctggctccgtgaagctgatgcgtgaacgcaacaagaaagtggctgagattcccttcaattccaccaacaaataccagctctccatccatgagaccgaggaccccaacgacaaccgatacctgctggtgatgaagggtgcccccgagcgcatcctggaccgctgctccaccatcctgctacagggcaaggagcagcctctggacgaggaaatgaaggaggccttccagaatgcctaccttgagctcggtggcctgggcgagcgcgtgcttggtttctgccattattacctgcccgaggagcagttccccaagggctttgccttcgactgtgatgacgtgaacttcaccacggacaacctctgctttgtgggcctcatgtccatgatcgacccaccccgggcagccgtccctgacgcggtgggcaagtgtcgcagcgcaggcatcaaggtcatcatggtcaccggcgatcaccccatcacggccaaggccattgccaagggtgtgggcatcatctctgagggcaacgagactgtggaggacatcgccgcccggctcaacattcccgtcagccaggttaacccccgggatgccaaggcctgcgtgatccacggcaccgacctcaaggacttcacctccgagcaaatcgacgagatcctgcagaatcacaccgagatcgtcttcgcccgcacatccccccagcagaagctcatcattgtggagggctgtcagagacagggtgcaattgtggctgtgaccggggatggtgtgaacgactcccccgctctgaagaaggccgacattggggtggccatgggcatcgctggctctgacgtctccaagcaggcagctgacatgatcctgctggacgacaactttgcctccatcgtcacaggggtggaggagggccgcctgatcttcgacaacctaaagaagtccattgcctacaccctgaccagcaatatcccggagatcacgcccttcctgctgttcatcatggccaacatcccgctgcccctgggcaccatcaccatcctctgcatcgatctgggcactgacatggtccctgccatctcactggcgtacgaggctgccgaaagcgacatcatgaagagacagcccaggaacccgcggacggacaaattggtcaatgagagactcatcagcatggcctacgggcagattggaatgatccaggctctcggtggcttcttctcttactttgtgatcctggcagaaaatggcttcttgcccggcaacctggtgggcatccggctgaactgggatgaccgcaccgtcaatgacctggaagacagttacgggcagcagtggacatacgagcagaggaaggtggtggagttcacctgccacacggccttctttgtgagcatcgttgtcgtccagtgggccgatctgatcatctgcaagacccggaggaactcggtcttccagcagggcatgaagaacaagatcctgatcttcgggctgtttgaggagacggccctggctgccttcctgtcctactgccccggcatggacgtggccctgcgcatgtaccctctcaagcccagctggtggttctgtgccttcccctacagtttcctcatcttcgtctacgacgaaatccgcaaactcatcctgcgcaggaacccagggggttgggtggagaaggaaacctactactgacctcagccccaccacatcgcccatctcttccccgtcccgcaggcccaggaccgcccctgtcagtccccccaattttgtattctggggggaggagccctctcttcctgtggccccaccttggcccccaccccctccactatctcctgccgcccccactctggctggcttctctcccctgccccaaacctctctcctctctcttttctgtgtcagtttctctccctctcctcacccctctatccattcctcccgccccagccacctccctgggctcttttttactccccttcagccccccggctgatgccatctctggttctggacaattatcaaatatatcagtggggagagagaagcggtgtgtg

SEQ ID NO: 447248 - DNA, 3053 bp, Homo sapiens
gcattggggcgcgcacagatgggttgaatctaatccaacagtgggcttggcttctcctactaccaggaggccaagagctccaagatcatggagtccttcaagaacatggtgccccagcaagccctggtgatccgggaaggtgagaagatgcaggtgaacgctgaggaggtggtggtcggggacctggtggagatcaagggtggagaccgagtgccagctgacctgcggatcatctcagcccacggctgcaaggtggacaactcctccctgactggcgaatccgagccccagactcgctctcccgactgcacgcacgacaaccccttggagactcggaacatcaccttcttttccaccaactgtgtggaaggcacggctcggggcgtggtggtggccacgggcgaccgcactgtcatgggccgtatcgccaccctggcatcagggctggaggtgggcaagacgcccatcgccatcgagattgagcacttcatccagctcatcaccggcgtggctgtcttcctgggtgtctccttcttcatcctctccctcattctcggatacacctggcttgaggctgtcatcttcctcatcggcatcatcgtggccaatgtcccagagggtctgctggccactgtcactgtgtgtctgacgctgaccgccaagcgcatggcccggaagaactgcctggtgaagaacctggaggctgtagaaaccctgggctccacgtccaccatctgctcagataagacagggaccctcactcagaaccgcatgacagtcgcccacatgtggtttgacaaccagatccacgaggctgacaccactgaggaccagtcagggacctcatttgacaagagttcgcacacctgggtggccctgtctcacatcgctgggctctgcaatcgcgctgtcttcaagggtggtcaggacaacatccctgtgctcaagagggatgtggctggggatgcgtctgagtctgccctgctcaagtgcatcgagctgtcctctggctccgtgaagctgatgcgtgaacgcaacaagaaagtggctgagattcccttcaattccaccaacaaataccagctctccatccatgagaccgaggaccccaacgacaaccgatacctgctggtgatgaagggtgcccccgagcgcatcctggaccgctgctccaccatcctgctacagggcaaggagcagcctctggacgaggaaatgaaggaggccttccagaatgcctaccttgagctcggtggcctgggcgagcgcgtgcttggtttctgccattattacctgcccgaggagcagttccccaagggctttgccttcgactgtgatgacgtgaacttcaccacggacaacctctgctttgtgggcctcatgtccatgatcgacccaccccgggcagccgtccctgacgcggtgggcaagtgtcgcagcgcaggcatcaaggtcatcatggtcaccggcgatcaccccatcacggccaaggccattgccaagggtgtgggcatcatctctgagggcaacgagactgtggaggacatcgccgcccggctcaacattcccgtcagccaggttaacccccgggatgccaaggcctgcgtgatccacggcaccgacctcaaggacttcacctccgagcaaatcgacgagatcctgcagaatcacaccgagatcgtcttcgcccgcacatccccccagcagaagctcatcattgtggagggctgtcagagacagggtgcaattgtggctgtgaccggggatggtgtgaacgactcccccgctctgaagaaggccgacattggggtggccatgggcatcgctggctctgacgtctccaagcaggcagctgacatgatcctgctggacgacaactttgcctccatcgtcacaggggtggaggagggccgcctgatcttcgacaacctaaagaagtccattgcctacaccctgaccagcaatatcccggagatcacgcccttcctgctgttcatcatggccaacatcccgctgcccctgggcaccatcaccatcctctgcatcgatctgggcactgacatggtccctgccatctcactggcgtacgaggctgccgaaagcgacatcatgaagagacagcccaggaacccgcggacggacaaattggtcaatgagagactcatcagcatggcctacgggcagattggaatgatccaggctctcggtggcttcttctcttactttgtgatcctggcagaaaatggcttcttgcccggcaacctggtgggcatccggctgaactgggatgaccgcaccgtcaatgacctggaagacagttacgggcagcagtggacatacgagcagaggaaggtggtggagttcacctgccacacggccttctttgtgagcatcgttgtcgtccagtgggccgatctgatcatctgcaagacccggaggaactcggtcttccagcagggcatgaagaacaagatcctgatcttcgggctgtttgaggagacggccctggctgccttcctgtcctactgccccggcatggacgtggccctgcgcatgtaccctctcaagcccagctggtggttctgtgccttcccctacagtttcctcatcttcgtctacgacgaaatccgcaaactcatcctgcgcaggaacccagggggttgggtggagaaggaaacctactactgacctcagccccaccacatcgcccatctcttccccgtcccgcaggcccaggaccgcccctgtcagtccccccaattttgtattctggggggaggagccctctcttcctgtggccccaccttggcccccaccccctccactatctcctgccgcccccactctggctggcttctctcccctgccccaaacctctctcctctctcttttctgtgtcagtttctctccctctcctcacccctctatccattcctcccgccccagccacctccctgggctcttttttactccccttcagccccccggctgatgccatctctggttctggacaattatcaaatatatcagtggggagagagaagcggtgtgtg

SEQ ID NO: 447249 - DNA, 3013 bp, Homo sapiens
ctcccgcggacgcgggcatatgaggaggcggaggcggcggccgccgcagcctctgtgcggtgggaccaacggacggacggacggacgcgcgcacctaccgaggcgcgggcgctgcagaggctcccagcccaagcctgagcctgagcccgccccgaggtccccgccccgcccgcctggctctctcgccgcggagccgccaagatgggggacaagaaagatgacaaggactcacccaagaagaacaagggcaaggagcgccgggacctggatgacctcaagaaggaggtggctatgacagagcacaagatgtcagtggaagaggtctgccggaaatacaacacagactgtgtgcagggtttgacccacagcaaagcccaggagatcctggcccgggatgggcctaacgcactcacgccaccgcctaccaccccagagtgggtcaagttttgccggcagctcttcgggggcttctccatcctgctgtggatcggggctatcctctgcttcctggcctacggtatccaggcgggcaccgaggacgacccctctggtgacaacctgtacctgggcatcgtgctggcggccgtggtgatcatcactggctgcttctcctactaccaggaggccaagagctccaagatcatggagtccttcaagaacatggtgccccagcaagccctggtgatccgggaaggtgagaagatgcaggtgaacgctgaggaggtggtggtcggggacctggtggagatcaagggtggagaccgagtgccagctgacctgcggatcatctcagcccacggctgcaaggtggacaactcctccctgactggcgaatccgagccccagactcgctctcccgactgcacgcacgacaaccccttggagactcggaacatcaccttcttttccaccaactgtgtggaaggcacggctcggggcgtggtggtggccacgggcgaccgcactgtcatgggccgtatcgccaccctggcatcagggctggaggtgggcaagacgcccatcgccatcgagattgagcacttcatccagctcatcaccggcgtggctgtcttcctgggtgtctccttcttcatcctctccctcattctcggatacacctggcttgaggctgtcatcttcctcatcggcatcatcgtggccaatgtcccagagggtctgctggccactgtcactgtgtgtctgacgctgaccgccaagcgcatggcccggaagaactgcctggtgaagaacctggaggctgtagaaaccctgggctccacgtccaccatctgctcagataagacagggaccctcactcagaaccgcatgacagtcgcccacatgtggtttgacaaccagatccacgaggctgacaccactgaggaccagtcagggacctcatttgacaagagttcgcacacctgggtggccctgtctcacatcgctgggctctgcaatcgcgctgtcttcaagggtggtcaggacaacatccctgtgctcaagagggatgtggctggggatgcgtctgagtctgccctgctcaagtgcatcgagctgtcctctggctccgtgaagctgatgcgtgaacgcaacaagaaagtggctgagattcccttcaattccaccaacaaataccagctctccatccatgagaccgaggaccccaacgacaaccgatacctgctggtgatgaagggtgcccccgagcgcatcctggaccgctgctccaccatcctgctacagggcaaggagcagcctctggacgaggaaatgaaggaggccttccagaatgcctaccttgagctcggtggcctgggcgagcgcgtgcttggtttctgccattattacctgcccgaggagcagttccccaagggctttgccttcgactgtgatgacgtgaacttcaccacggacaacctctgctttgtgggcctcatgtccatgatcgacccaccccgggcagccgtccctgacgcggtgggcaagtgtcgcagcgcaggcatcaaggtcatcatggtcaccggcgatcaccccatcacggccaaggccattgccaagggtgtgggcatcatctctgagggcaacgagactgtggaggacatcgccgcccggctcaacattcccgtcagccaggttaacccccgggatgccaaggcctgcgtgatccacggcaccgacctcaaggacttcacctccgagcaaatcgacgagatcctgcagaatcacaccgagatcgtcttcgcccgcacatccccccagcagaagctcatcattgtggagggctgtcagagacagggtgcaattgtggctgtgaccggggatggtgtgaacgactcccccgctctgaagaaggccgacattggggtggccatgggcatcgctggctctgacgtctccaagcaggcagctgacatgatcctgctggacgacaactttgcctccatcgtcacaggggtggaggagggccgcctgatcttcgacaacctaaagaagtccattgcctacaccctgaccagcaatatcccggagatcacgcccttcctgctgttcatcatggccaacatcccgctgcccgcccagctggtggttctgtgccttcccctacagtttcctcatcttcgtctacgacgaaatccgcaaactcatcctgcgcaggaacccagggggttgggtggagaaggaaacctactactgacctcagccccaccacatcgcccatattttgtattctggggggaggagccctctcttcctgtggccccaccttggcccccaccccctccactatctcctgccgcccccactctggctggcttctctcccctgccccaaacctctctcctctctcttttctgtgtcagtttctctccctctcctcacccctctatccattcctcccgccccagccacctccctgggctcttttttactccccttcagccccccggctgatgccatctctggttctggacaattatcaaatatatcagtggggagagagaagcggtgtgtg

SEQ ID NO: 447250 - DNA, 1375 bp, Homo sapiens
gagtgatgtaggaggccaggcaccggttgttaattgtcagtgacgcgggcgggcgcttggctgcgatcagtgactggggcgtcggggatggtgtgaacgactcccccgctctgaagaaggccgacattggggtggccatgggcatcgctggctctgacgtctccaagcaggcagctgacatgatcctgctggacgacaactttgcctccatcgtcacaggggtggaggagggccgcctgatcttcgacaacctaaagaagtccattgcctacaccctgaccagcaatatcccggagatcacgcccttcctgctgttcatcatggccaacatcccgctgcccctgggcaccatcaccatcctctgcatcgatctgggcactgacatggtccctgccatctcactggcgtacgaggctgccgaaagcgacatcatgaagagacagcccaggaacccgcggacggacaaattggtcaatgagagactcatcagcatggcctacgggcagattggaatgatccaggctctcggtggcttcttctcttactttgtgatcctggcagaaaatggcttcttgcccggcaacctggtgggcatccggctgaactgggatgaccgcaccgtcaatgacctggaagacagttacgggcagcagtggacatacgagcagaggaaggtggtggagttcacctgccacacggccttctttgtgagcatcgttgtcgtccagtgggccgatctgatcatctgcaagacccggaggaactcggtcttccagcagggcatgaagaacaagatcctgatcttcgggctgtttgaggagacggccctggctgccttcctgtcctactgccccggcatggacgtggccctgcgcatgtaccctctcaagcccagctggtggttctgtgccttcccctacagtttcctcatcttcgtctacgacgaaatccgcaaactcatcctgcgcaggaacccagggggttgggtggagaaggaaacctactactgacctcagccccaccacatcgcccatctcttccccgtcccgcaggcccaggaccgcccctgtcagtccccccaattttgtattctggggggaggagccctctcttcctgtggccccaccttggcccccaccccctccactatctcctgccgcccccactctggctggcttctctcccctgccccaaacctctctcctctctcttttctgtgtcagtttctctccctctcctcacccctctatccattcctcccgccccagccacctccctgggctcttttttactccccttcagccccccggctgatgccatctctggttctggacaattatcaaatatatcagtggggagagagaagcggtgtgtg

SEQ ID NO: 447251 - DNA, 3891 bp, Homo sapiens
ctcccgcggacgcgggcatatgaggaggcggaggcggcggccgccgcagcctctgtgcggtgggaccaacggacggacggacggacgcgcgcacctaccgaggcgcgggcgctgcagaggctcccagcccaagcctgagcctgagcccgccccgaggtccccgccccgcccgcctggctctctcgccgcggagccgccaagatgggggacaagaaagatgacaaggactcacccaagaagaacaagggcaaggagcgccgggacctggatgacctcaagaaggaggtggctatgacagagcacaagatgtcagtggaagaggtctgccggaaatacaacacagactgtgtgcagggtttgacccacagcaaagcccaggagatcctggcccgggatgggcctaacgcactcacgccaccgcctaccaccccagagtgggtcaagttttgccggcagctcttcgggggcttctccatcctgctgtggatcggggctatcctctgcttcctggcctacggtatccaggcgggcaccgaggacgacccctctggtgacaacctgtacctgggcatcgtgctggcggccgtggtgatcatcactggctgcttctcctactaccaggaggccaagagctccaagatcatggagtccttcaagaacatggtgccccagcaagccctggtgatccgggaaggtgagaagatgcaggtgaacgctgaggaggtggtggtcggggacctggtggagatcaagggtggagaccgagtgccagctgacctgcggatcatctcagcccacggctgcaaggtggacaactcctccctgactggcgaatccgagccccagactcgctctcccgactgcacgcacgacaaccccttggagactcggaacatcaccttcttttccaccaactgtgtggaaggcacggctcggggcgtggtggtggccacgggcgaccgcactgtcatgggccgtatcgccaccctggcatcagggctggaggtgggcaagacgcccatcgccatcgagattgagcacttcatccagctcatcaccggcgtggctgtcttcctgggtgtctccttcttcatcctctccctcattctcggatacacctggcttgaggctgtcatcttcctcatcggcatcatcgtggccaatgtcccagagggtctgctggccactgtcactgtgtgtctgacgctgaccgccaagcgcatggcccggaagaactgcctggtgaagaacctggaggctgtagaaaccctgggctccacgtccaccatctgctcagataagacagggaccctcactcagaaccgcatgacagtcgcccacatgtggtttgacaaccagatccacgaggctgacaccactgaggaccagtcagggacctcatttgacaagagttcgcacacctgggtggccctgtctcacatcgctgggctctgcaatcgcgctgtcttcaagggtggtcaggacaacatccctgtgctcaagagggatgtggctggggatgcgtctgagtctgccctgctcaagtgcatcgagctgtcctctggctccgtgaagctgatgcgtgaacgcaacaagaaagtggctgagattcccttcaattccaccaacaaataccagctctccatccatgagaccgaggaccccaacgacaaccgatacctgctggtgatgaagggtgcccccgagcgcatcctggaccgctgctccaccatcctgctacagggcaaggagcagcctctggacgaggaaatgaaggaggccttccagaatgcctaccttgagctcggtggcctgggcgagcgcgtgcttggtttctgccattattacctgcccgaggagcagttccccaagggctttgccttcgactgtgatgacgtgaacttcaccacggacaacctctgctttgtgggcctcatgtccatgatcgacccaccccgggcagccgtccctgacgcggtgggcaagtgtcgcagcgcaggcatcaaggtcatcatggtcaccggcgatcaccccatcacggccaaggccattgccaagggtgtgggcatcatctctgagggcaacgagactgtggaggacatcgccgcccggctcaacattcccgtcagccaggttaacccccgggatgccaaggcctgcgtgatccacggcaccgacctcaaggacttcacctccgagcaaatcgacgagatcctgcagaatcacaccgagatcgtcttcgcccgcacatccccccagcagaagctcatcattgtggagggctgtcagagacagggtgcaattgtggctgtgaccggggatggtgtgaacgactcccccgctctgaagaaggccgacattggggtggccatgggcatcgctggctctgacgtctccaagcaggcagctgacatgatcctgctggacgacaactttgcctccatcgtcacaggggtggaggagggccgcctgatcttcgacaacctaaagaagtccattgcctacaccctgaccagcaatatcccggagatcacgcccttcctgctgttcatcatggccaacatcccgctgcccctgggcaccatcaccatcctctgcatcgatctgggcactgacatggtccctgccatctcactggcgtacgaggctgccgaaagcgacatcatgaagagacagcccaggaacccgcggacggacaaattggtcaatgagagactcatcagcatggcctacgggcagattggaatgatccaggctctcggtggcttcttctcttactttgtgatcctggcagaaaatggcttcttgcccggcaacctggtgggcatccggctgaactgggatgaccgcaccgtcaatgacctggaagacagttacgggcagcagtggacatacgagcagaggaaggtggtggagttcacctgccacacggccttctttgtgagcatcgttgtcgtccagtgggccgatctgatcatctgcaagacccggaggaactcggtcttccagcagggcatgaagaacaagatcctgatcttcgggctgtttgaggagacggccctggctgccttcctgtcctactgccccggcatggacgtggccctgcgcatgtaccctctcaagcccagctggtggttctgtgccttcccctacagtttcctcatcttcgtctacgacgaaatccgcaaactcatcctgcgcaggaacccagggggtgagggagctcggcaaggcagccgaggggggcggggggcagcagggtctcaggcagctggtcccaggctcccctcgccctgctggatggctctgccacctggttcccactcttctctctcttcccatctctccgggcacccactctgtcttctcacgggtctctgtctgtgtggtttccttgtctctctccctctctgtccctctctctgctgggcggctcgccttgcctgtctctctccatctcttactctgtctctttctttccttctttgtctctccaggttgggtggagaaggaaacctactactgacctcagccccaccacatcgcccatctcttccccgtcccgcaggcccaggaccgcccctgtcagtccccccaattttgtattctggggggaggagccctctcttcctgtggccccaccttggcccccaccccctccactatctcctgccgcccccactctggctggcttctctcccctgccccaaacctctctcctctctcttttctgtgtcagtttctctccctctcctcacccctctatccattcctcccgccccagccacctccctgggctcttttttactccccttcagccccccggctgatgccatctctggttctggacaattatcaaatatatcagtggggagagagaagcggtgtgtg

SEQ ID NO: 447252 - DNA, 3164 bp, Homo sapiens
taattcaagtacgatggcgtggcttcattgctgatgttgtgtgagcgtggccgctgctgtacactggcctacggtatccaggcgggcaccgaggacgacccctctggtgacaacctgtacctgggcatcgtgctggcggccgtggtgatcatcactggctgcttctcctactaccaggaggccaagagctccaagatcatggagtccttcaagaacatggtgccccagcaagccctggtgatccgggaaggtgagaagatgcaggtgaacgctgaggaggtggtggtcggggacctggtggagatcaagggtggagaccgagtgccagctgacctgcggatcatctcagcccacggctgcaaggtggacaactcctccctgactggcgaatccgagccccagactcgctctcccgactgcacgcacgacaaccccttggagactcggaacatcaccttcttttccaccaactgtgtggaaggcacggctcggggcgtggtggtggccacgggcgaccgcactgtcatgggccgtatcgccaccctggcatcagggctggaggtgggcaagacgcccatcgccatcgagattgagcacttcatccagctcatcaccggcgtggctgtcttcctgggtgtctccttcttcatcctctccctcattctcggatacacctggcttgaggctgtcatcttcctcatcggcatcatcgtggccaatgtcccagagggtctgctggccactgtcactgtgtgtctgacgctgaccgccaagcgcatggcccggaagaactgcctggtgaagaacctggaggctgtagaaaccctgggctccacgtccaccatctgctcagataagacagggaccctcactcagaaccgcatgacagtcgcccacatgtggtttgacaaccagatccacgaggctgacaccactgaggaccagtcagggacctcatttgacaagagttcgcacacctgggtggccctgtctcacatcgctgggctctgcaatcgcgctgtcttcaagggtggtcaggacaacatccctgtgctcaagagggatgtggctggggatgcgtctgagtctgccctgctcaagtgcatcgagctgtcctctggctccgtgaagctgatgcgtgaacgcaacaagaaagtggctgagattcccttcaattccaccaacaaataccagctctccatccatgagaccgaggaccccaacgacaaccgatacctgctggtgatgaagggtgcccccgagcgcatcctggaccgctgctccaccatcctgctacagggcaaggagcagcctctggacgaggaaatgaaggaggccttccagaatgcctaccttgagctcggtggcctgggcgagcgcgtgcttggtttctgccattattacctgcccgaggagcagttccccaagggctttgccttcgactgtgatgacgtgaacttcaccacggacaacctctgctttgtgggcctcatgtccatgatcgacccaccccgggcagccgtccctgacgcggtgggcaagtgtcgcagcgcaggcatcaaggtcatcatggtcaccggcgatcaccccatcacggccaaggccattgccaagggtgtgggcatcatctctgagggcaacgagactgtggaggacatcgccgcccggctcaacattcccgtcagccaggttaacccccgggatgccaaggcctgcgtgatccacggcaccgacctcaaggacttcacctccgagcaaatcgacgagatcctgcagaatcacaccgagatcgtcttcgcccgcacatccccccagcagaagctcatcattgtggagggctgtcagagacagggtgcaattgtggctgtgaccggggatggtgtgaacgactcccccgctctgaagaaggccgacattggggtggccatgggcatcgctggctctgacgtctccaagcaggcagctgacatgatcctgctggacgacaactttgcctccatcgtcacaggggtggaggagggccgcctgatcttcgacaacctaaagaagtccattgcctacaccctgaccagcaatatcccggagatcacgcccttcctgctgttcatcatggccaacatcccgctgcccctgggcaccatcaccatcctctgcatcgatctgggcactgacatggtccctgccatctcactggcgtacgaggctgccgaaagcgacatcatgaagagacagcccaggaacccgcggacggacaaattggtcaatgagagactcatcagcatggcctacgggcagattggaatgatccaggctctcggtggcttcttctcttactttgtgatcctggcagaaaatggcttcttgcccggcaacctggtgggcatccggctgaactgggatgaccgcaccgtcaatgacctggaagacagttacgggcagcagtggacatacgagcagaggaaggtggtggagttcacctgccacacggccttctttgtgagcatcgttgtcgtccagtgggccgatctgatcatctgcaagacccggaggaactcggtcttccagcagggcatgaagaacaagatcctgatcttcgggctgtttgaggagacggccctggctgccttcctgtcctactgccccggcatggacgtggccctgcgcatgtaccctctcaagcccagctggtggttctgtgccttcccctacagtttcctcatcttcgtctacgacgaaatccgcaaactcatcctgcgcaggaacccagggggttgggtggagaaggaaacctactactgacctcagccccaccacatcgcccatctcttccccgtcccgcaggcccaggaccgcccctgtcagtccccccaattttgtattctggggggaggagccctctcttcctgtggccccaccttggcccccaccccctccactatctcctgccgcccccactctggctggcttctctcccctgccccaaacctctctcctctctcttttctgtgtcagtttctctccctctcctcacccctctatccattcctcccgccccagccacctccctgggctcttttttactccccttcagccccccggctgatgccatctctggttctggacaattatcaaatatatcagtggggagagagaagcggtgtgtg

SEQ ID NO: 447253 - DNA, 1482 bp, Homo sapiens
ctcccgcggacgcgggcatatgaggaggcggaggcggcggccgccgcagcctctgtgcggtgggaccaacggacggacggacggacgcgcgcacctaccgaggcgcgggcgctgcagaggctcccagcccaagcctgagcctgagcccgccccgaggtccccgccccgcccgcctggctctctcgccgcggagccgccaagatgggggacaagaaagatgacaaggactcacccaagaagaacaagggcaaggagcgccgggacctggatgacctcaagaaggaggtggctatgacagagcacaagatgtcagtggaagaggtctgccggaaatacaacacagactgtgtgcagggtttgacccacagcaaagcccaggagatcctggcccgggatgggcctaacgcactcacgccaccgcctaccaccccagagtgggtcaagttttgccggcagctcttcgggggcttctccatcctgctgtggatcggggctatcctctgcttcctggcctacggtatccaggcgggcaccgaggacgacccctctggtgacaacctgtacctgggcatcgtgctggcggccgtggtgatcatcactggctgcttctcctactaccaggaggccaagagctccaagatcatggagtccttcaagaacatggtgccccagcaagccctggtgatccgggaaggtgagaagatgcaggtgaacgctgaggaggtggtggtcggggacctggtggagatcaagggtggagaccgagtgccagctgacctgcggatcatctcagcccacggctgcaaggtggacaactcctccctgactggcgaatccgagccccagactcgctctcccgactgcacgcacgacaaccccttggagactcggaacatcaccttcttttccaccaactgtgtggaaggcacggctcggggcgtggtggtggccacgggcgaccgcactgtcatgggccgtatcgccaccctggcatcagggctggaggtgggcaagacgcccatcgccatcgagattgagcacttcatccagctcatcaccggcgtggctgtcttcctgggtgtctccttcttcatcctctccctcattctcggatacacctggcttgaggctgtcatcttcctcatcggcatcatcgtggccaatgtcccagagggtctgctggccactgtcactgtgtgtctgacgctgaccgccaagcgcatggcccggaagaactgcctggtgaagaacctggaggctgtagaaaccctgggctccacgtccaccatctgctcagataagacagggaccctcactcagaaccgcatgacagtcgcccacatgtggtttgacaaccagatccacgaggctgacaccactgaggaccagtcaggactcattgcagagttctggcacctgggggcctgttccatcgtggggtcggaacgcgcgcttcacggggcgggacatcggggccagggg

SEQ ID NO: 447254 - DNA, 752 bp, Homo sapiens
accggttccacttcttcaggctcaggattttcactcttctcgaatgggggtggccctcccccaatcttctgagtcgcaacagcatctccctccctccaggacctcagagccagagctgggcgagaggccctgacctccggggtagggtggaagcgtccctgtgaaggtgcagtcctgcctcccatccccaggcgccgggcctctcccaccctcagcgccctgctcacctccagctgaagatgccagggcacctctgcttcctccctgccctctctgcagtaccgccgagtgtgcataaaagggtttaatataggctttgccgggcgcggggactcccacctgtaatcccagtacgttgagagaccaaggcgggaggatcacttgaggccaggagttcaaaaccagcctgggcaacaaagtgaggcccgtctctgaaaaaaaaaaaaaaaaaaaaaaaagaataaaagaggtccctttttctgggagattgatataggggagtgtgagttagaagggaggcatcgaggatcagtcatttaaagcagcatccaagggtgttcaaggctagagatccacaggtgtattttcagaaactgaatttcctggcggggcacagtgactcatgcctgtaatcccagcactttgggaggccaaggtgagcggatcacttgaggtcaggagttcaagactagcctggccaacatggtgaaactgtttttagaaaaaaaaaaaaaaaaaaaattggccgggca

SEQ ID NO: 447255 - DNA, 865 bp, Homo sapiens
tgagactctatctcaaaatataataaaataaaaataaaatacactctgatgatggctgcttcccccaagggtgcctcaagctctctccttttctttcagtgccatctgccattatcgtgccctcgttctcttccagtgctctggcggagcaggtggcgcccaggcccacagtgccctctccaagttctgtcctccatgtgctcaagttatcccctaaacttgtcacatgggtcatcctggaactttgcttaactgcttcctgggttggggcctttatttcctggctcccttctcttcttgcttaatttcccctccctttgctgcagcacatacccagttaatccctttctaacattaaaaaaagaaaaagagaatagttcttggacctcctcatgatagaaattatatctttaggccgggtgtggtggctcacttgtgtaatcccagcagtttgggaggccgaggcaggtggatcacttgagctcaggagttcaaaaccagcctgagcaacatggtaaaaccctatctctacaaaaaaaaaaaacaacaacaaacaaaaaaaaattgtgtgtggggcgcgcgcttgggccctggaaaaggcttttttagaaacccttgcgcgtgggggcgcgcgcggggccccatgggtagggtgggcacccgtgggtccaaaaagcgcggttcccaaaggagaaccggggccatggacaaagcggtggggatttccttcccaataaaaaaaagcgcccgggggaagcacggacggcgttccggaaccaatcccagaagggagtccgaaggccctagcggggcgtctatacccgggagctccaggaagccgatataaattgcgcgcctgggaggc

SEQ ID NO: 447256 - DNA, 699 bp, Homo sapiens
tgagactctatctcaaaatataataaaataaaaataaaatacactctgatgatggctgcttcccccaagggtgcctcaagctctctccttttctttcagtgccatctgccattatcgtgccctcgttctcttccagtgctctggcggagcaggtggcgcccaggcccacagtgccctctccaagttctgtcctccatgtgctcaagttatcccctaaacttgtcacatgggtcatcctggaactttgcttaactgcttcctgggttggggcctttatttcctggctcccttctcttcttgcttaatttcccctccctttgctgcagcacatacccagttaatccctttctaacattaaaaaaagaaaaagagaatagttcttggacctcctcatgatagaaattatatctttaggccgggtgtggtggctcacttgtgtaatcccagcagtttgggaggccgaggatcagtcatttaaagcagcatccaagggtgttcaaggctagagatccacaggtgtattttcagaaactgaatttcctggcggggcacagtgactcatgcctgtaatcccagcactttgggaggccaaggtgagcggatcacttgagcccggaaggcggtaactcaaccccagcagaatcccagggagcgaaggtggctcatcccaaaagaaaacaagaagaattctataccgga

SEQ ID NO: 447257 - DNA, 393 bp, Homo sapiens
tcttcccatgccctcctctcctaccctcccctacctcccgtttaattgtcatgccatttccaggtcctcctgaggctttgttggaaaatcgtgttgaaattgtaactaggccagacatggtggctcacacctataattccagcactttaggaggctgaggcggacagatcacttgaggccaggcattcaagaccagcctggccaacatggtgaaaccctatctctactaaaaataaaaaaaaattagccaggcgtggtggtgcgtgcctgtaatcccagctactcaggaggctgaggcacgagaatcgcttgaacctgggaggcagaggttgcagtgagctgagatagtgccactgcactacagtgtgggcaatagagtgagactgtctcaca

SEQ ID NO: 447258 - DNA, 291 bp, Homo sapiens
accaaaagccagttttcaaagcccttctgagttttccctctatttattaatctctttaagctgataacacaaagaaaacatgtcaacgagtactaccaagagaagaagacaagaggtcaacacagactcattttctactccgtgtgaatgatagctacagcaggggaaagtttcatagtctatcagtgggtcagaaaatggaggtaatcagcagtgtggcgggagggttcttctttccctcctagggtacgttacctgctttatacatattttttaagaaacaggctttga

SEQ ID NO: 447259 - DNA, 8514 bp, Homo sapiens
  misc_feature (908)..(908): n is a, c, g, or t
  misc_feature (931)..(932): n is a, c, g, or t
  misc_feature (934)..(937): n is a, c, g, or t
  misc_feature (940)..(940): n is a, c, g, or t
  misc_feature (944)..(944): n is a, c, g, or t
  misc_feature (946)..(947): n is a, c, g, or t
  misc_feature (950)..(950): n is a, c, g, or t
  misc_feature (952)..(952): n is a, c, g, or t
  misc_feature (3891)..(3891): n is a, c, g, or t
  misc_feature (3893)..(3893): n is a, c, g, or t
cgggatggcaactgcggtcaccctgctaaagtcggggcggggcggcggtcctccccctcaccccccccagtccgagcgccgccgccgccgccgccgccgccgccggccgctcagtaacacgtccccaggagactcgcaggagcaacacgtgatgtgtctacttatcagggttgctccgactgtgtgttccaggagtggtggctctgaggtgtgaccctgcccacgtttgggcccagccaggttcagccccccaataaggagggcagcttgataacacaaagaaaacagtgtcaacgagtactaccaagagaagaagacaagaggtcaacacagactcattttctactccgtgtgaatgatagctacagcaggggaaagtttcatagtctatcagtgggtcagaaaatggagttttatagcagaggcttcttagaagcttaaacccctgtcccaatgacgtcaagttcgcccgctggcttggaaggttcagacctatcttccatcaacaccatgatgtcggcggtcatgagtgtagggaaggtcacagagaatggcgggagcccccaggggatcaagtccccctcgaagcctccaggaccaaatcggattggcagaaggaaccaggaaacgaaagaggagaagtcttcctataactgccccctgtgtgagaagatttgcactacccagcaccagctgaccatgcacattcgccagcacaacacagacactggaggagccgaccactcatgcagcatctgcggaaagtcactgagctcggccagctccctcgatcgccacatgctggtgcactctggcgagaggccttacaagtgcactgtgtgtggccagtcatttaccaccaatgggaacatgcacagacatatgaagatccatgagaaggaccctancagtgccacagccacagccccanntnnnnganacgnanncgntngtcctccaagaggaaactgagtcacgatgccgagtcagagagagaagacccagcaccagctaaaaagatggtagaagacgggcagtcaggtgacttggagaagaaagctgatgaagtctttcactgcccagtatgtttcaaggagtttgtttgcaagtatggactggagacccacatggagacccattcagataacccactaagatgtgacatttgttgtgtcacctttcgaacacatcgaggactgctgcgtcacaacgcgcttgtccacaaacaacttcccagggatgcaatgggcagacctttcatacagaacaacccttcaattcctgctggcttccacgacttaggattcacggacttctcctgtaggaagtttcctcgcatttctcaggcctggtgcgaaacaaacctgcggaggtgcatcagcgagcaacaccgttttgtctgcgacacctgtgacaaggcgttccccatgctctgctcactggctctgcacaagcagacccatgtggcggcagaccagggtcaagaaaagccgcaggccacgcccctgcctggtgacgccctggaccagaagggcttcctggccttgcttggcctgcagcacaccaaagacgtcaggcctgcccccgccgaggagcccctgccggatgacaaccaggcaattcagctccagacactcaagtgtcagctacctcaggaccccggctgcaccaacctgctgagcctgtcacctttcgaagctgcttccctaggcggttctctcacagttctccccgcgaccaaggacagcataaagcacctgtccctgcagcccttccagaagggcttcatcatccagcctgacagcagcattgtggtcaagcccatctctggcgagtcggccatcgagctggcagacatccagcaaattctgaagatggcagcctcggctccccctcagatcagtcttccgcccttctccaaggcccctgccgccccactgcaggcgatcttcaagcacatgccccctctgaagccaaagcccctggtcacaccacggacggtggtggccacctccacgcccccgcctctcatcaacgcccagcaggcttccccgggctgtatcagccccagcctgccgccaccgcccctgaagctcctcaaaggctcagtggaggcggcctccaacgcccacctgctgcagtccaagtccgggacccagccccacgcggccacgcggctctccctgcagcagccgcgggcggagctgccgggccagcctgagatgaagacgcagctggagcaggacagcatcatcgaggccctgctgccgctgagcatggaggccaagatcaagcaggagatcacagagggggaactcaaggccttcatgacagcgcccggcggcaagaagacgcccgccatgcgcaaggtgctctacccctgccgcttctgcaaccaggtgtttgccttctcgggggtcttgcgtgcccacgtgcgctcccacctgggcatctcgccataccagtgcaacatctgcgactacatcgccgccgacaaggccgcgctcatccgccacctgcgcacgcacagtggggagcggccctacatttgcaagatctgccactaccccttcactgtcaaagccaactgcgagcggcacctgcgcaagaagcacctcaaggccacccgcaaggatatcgagaagaacatcgagtatgtgagtagcagcgcggccgagctggtggacgccttctgcgccccggacaccgtgtgccggctgtgcggcgaggacctcaagcactatcgtgccctgcgcatccacatgcgcacgcactgcggccgcggcctgggcgggggccacaagggccgcaagcccttcgagtgcaaggagtgcagcgccgcgttcgcggccaagcgcaactgcatccaccacatcctcaagcagcacctgcacgtgcccgagcaggacatcgagagctacgtgctggccgccgacggcctgggccccgcagaggcgccggccgctgaggcgtcggggcgcggggaggacagtggctgcgctgcccttggtgactgcaagcccctcactgccttcctggaaccccagaacggctttcttcacaggggccccacccagcctccacctccccatgtctcgatcaagttggagcccgccagtagctttgcggtggacttcaatgagcccctggacttctcgcagaagggcctggccctggtccaagtgaagcaggaaaacatctcctttctgagcccttcttccctggtcccctatgactgctccatggagcccatcgacctgtccatccccaagaacttcaggaaaggggacaaggatttggccactcccagcgaagccaagaagcctgaggaggaggcggggagcagcgagcagccctctccctgcccagcacccggcccttctcttcctgtaactttggggcccagcggaatcctggaaagccccatggcccctgctccggcggccaccccggaacccccagcacagcccctgcagggccctgttcagctggcggtcccaatctactcctcagccctggtcagcagccctccactcgtgggcagctcagccctcctgagtggcacagccttgctgcgtccactgcggcccaagcccccgctgcttttgccaaagccccccgtgacagaagagctgcccccgctggcctccattgcccagatcatctcatctgtatcctcggcccccaccctgctgaaaaccaaggtggcggacccagggcccgcaagcactggcagtaacaccacggcttcagacagcttaggaggttctgtccccaaagccgccaccaccgccacccccgctgccaccaccagcccaaaagagtctagtgagcctcccgctccagccagcagcccagaggctgcctctcccaccgagcagggcccagcgngnacgtcgaagaagaggggccggaaaagggggatgaggagccgaccccgcgccaacagcggcggggtggacctggactccagcggggagtttgccagcatcgagaagatgctggccaccacagacaccaacaagttcagtccgtttctgcagacagcggaggacaacactcaggatgaggtggccggagcccctgccgaccaccatgggcccagtgatgaagagcagggcagtcccccagaagacaagctgctgagggccaagcggaactcgtacaccaactgcctgcagaagatcacctgtccccactgtccccgggttttcccttgggccagctccctacagaggcacatgctcacacacactgacagtcagtcggatgcggagactgcagccgccgcgggcgaagtgctagacctcacctcacgggacagagagcagccgtcggagggcgccactgagctccgccaggtcgcaggggatgcgcctgtggagcaggccacggcggaaacggcctcgccggtgcaccgggaagagcacgggcgtggggagagccatgagccggaggaggagcatggcactgaggagagcactggggacgccgacggcggaagaggacgcgtcgagcaaccagagcctggacctggacttcgccaccaagctcatggacttcaagctggcggagggcgacggcgaggcaggcccgggggcgcggcctcgcaggagcagaagctcgcctgcgacacctgtgggaagagcttcaagttcctgggcaccctgagccgccaccggaaggcgcacggccgccaggagcccaaggacgagaagggagatggcgccagcactgcagaggaggggccccagcccgcccctgaacaggaggagaagccccccgagaccccggcagaggtggtggagtcggccccgggtgccggggaggccccggcggaaaagctcgcggaggagacggagggcccctccgacggggagagcgcggccgagaaaaggtcctcagagaagagcgacgatgacaagaaaccaaagacagactcccccaaaagcgtggccagcaaggcagacaagaggaagaaggtctgcagcgtgtgcaacaagcggttctggtcgctgcaggacctgacccggcacatgcgctcccacacaggggaaaggccatacaaatgtcagacctgcgagcgaaccttcaccttgaagcacagcctggttcgccaccagcggatccaccagaaagccaggcatgccaaacaccacgggaaggacagcgacaaggaagagcggggtgaggaggacagcgagaatgagtccacccacagcggcaacaacgccgtctcagagaacgaggctgagctggctcccaatgccagcaaccacatggctgtcacccggagccggaaggagggcttggccagtgccaccaaggactgcagccacagggaggagaaggtcacggcagggtggccgtctgagcctggccagggtgaccttaacccagagagcccggcggccctggggcaggacctgctggagccgcgcagcaagaggcctgcccacccaatcctggccacagctgatggcgcctcccagctcgtggggatggagtgacagcctcagtccccctcagcacagacaaaagccagcagagcaaagcgtctatacttcatggggtttcctcagtgccctttggctgttgaggagtgagagagagagagagagagagagagagagagagagacaagcaggagcgtggctgctcgctcagtgccatagccttaccgcagcctgcgcgggaggccacagcccgtgccgattccagtgccttaactacttaccggatccctccatattatcatgggtgttgtatttttccaaaatgacttcttaaacaaaacaaatattataatgaattgtctggagaggacctcttcatttgagcattagcgttattttgtattggtgtgtgtgagcttgttcttgtgaatctgtgatagcaccgtttgttctgtgagctggaaacagaaggaaaaaacatacccttgggtacccatagccaataactggaagaaaatgatgtgaatttcatgtaaatgaccagaggaaagatggataagatgataatttcttaaatagacattttccttttttctttgtgcttcatggtggagctgtcatctggtccttggtattacaggatgtggttgatgaaggtttccaatatggtttcaggccaaaaccagggaagattctagcttcagcctcatgtccatttccagtctgtcagcattagacatggtcactgttcaagtttcaagacatccattcttaactatagagaagagttactcccctggcgtcttaacctatggaaaacatgcacggataggatatatttgattgcctcctcttccctttcagtatatgtattattaatattattattattattattattattagttcatcagtttgctgttctctgcagtgagcagaatcaaatgggcaatatttgtcctgggagacctgtgccgcacccaggtccccgtgttaacgtgtgcctgcggttgtggttggcaccctcgggtggtagctcttctactgtaatgagacaagcctttcttctgtcactgcagaatttagaaggggccgtgagcagtcttcccaagcatggtccaggagcagctcagagagggtggagtgaggatgcatgcatccagggaacaggcatcaagaagccagggccgtgcctggagcactgcagagatgactttggagaaagcaaagcagtgacccagtgaccaggcacattactcgtgagcgaggtattcccagtcttcctgctaagcctaatccaagccttacccagctgtgctactgtcatttgcaaagcaaggaaatactactactggtaataaaactacacatgcaagatgtcagataagaaataggtttatatttaccttcctgcgatgtggggttggtgcttgaagataaatgtgctgtttctagtttcttaaatagcccacacccctggatgcaaaaaggcagggttatttttacccatgagcatcctgtgcaggcaatagacttccctcactgtctccgcctgcagggaggagaatgtaccccactgcacctgagctcctggtccctcagccaagacctcaggggtccccagccagcctgctgctggggacccctgtgcttgctgcagtgtatggagcctcttgccttcccctggggaggcacccctgtaccccagcttccttcccctggccttttctggccccagtgctcctcctttacatagacttgttcacacagaaacgtgcacgcccccttttctccgccacttcaccagtttctgaaatccaacctcccagacttcacaggaagatagatattcttgagataatgaaaagtgatatcttcgcatacgaaaggaaaaaaggttgaggtatatatgatttttaactgtattaggggtgtatgaaccagtttaaaaacgaggttttatttactgtagagatgaatgcaaatcagaaccaatgatcccttggcctacttagttaaaaccagttcatacatcccttagggtttttattattattattattattattacagttgttattgttgtttttgttgttattattatttggggtttcttgtgttttttctttgcgactctccacactaaacttgcaatattgtggggagaagctgtgactaaactctacgctgcggtgagatgtagcagtaatcagctcccagcgacgtgtgtagctggggctgccgctcgcaataatcactattgatttaaagctttacttagccttgatctgtaccctcgtagtcaataaggtcttgccacattttattagtgaggtggagaaacgtattatttgtttgttgtttttgcccttcccccaccccccaatattaaactgtgaaatttgtgatttgtttaaactctgggtgaatcatagcttagtttgcatgtccagctaatttgtttctatacattttgtttgattctctttctccttctctcagggcttttacaaaaaaatatatatatatggatcttctgaaaagttttttgaggtgcaagttttttctcttgtttttttttttttttttctcattgattaatggacatgatgctgagattcaatcactacatgaaacacctggctgtgaaaacaaaacaacccagagggctgtgttccaagcagcgctggggaagctacgtaacagtcggatgccagttttggaagattcaccatgcgttctgaccctctgttcgtctctttcctctcctctttcttcaagaaggaaattgatcctagtgatttcagcccatgcattaaacaggaaacaataataaatttgtagaattcatatttttctaaagggaacttaaaaactgctgctacatgttatgtacaaaactggtttatgccacatgaacagagaatcacaagtttggttttggtactttttgttcctctttgtattcagttgtatagaacttccaaattcagaatgagaagaaagctgttctgtatcaaaccatttaagcaataaatgttatattttaaaagctgca

SEQ ID NO: 447260 - DNA, 8480 bp, Homo sapiens
  misc_feature (908)..(908): n is a, c, g, or t
  misc_feature (931)..(932): n is a, c, g, or t
  misc_feature (934)..(937): n is a, c, g, or t
  misc_feature (940)..(940): n is a, c, g, or t
  misc_feature (944)..(944): n is a, c, g, or t
  misc_feature (946)..(947): n is a, c, g, or t
  misc_feature (950)..(950): n is a, c, g, or t
  misc_feature (952)..(952): n is a, c, g, or t
  misc_feature (3891)..(3891): n is a, c, g, or t
  misc_feature (3893)..(3893): n is a, c, g, or t
cgggatggcaactgcggtcaccctgctaaagtcggggcggggcggcggtcctccccctcaccccccccagtccgagcgccgccgccgccgccgccgccgccgccggccgctcagtaacacgtccccaggagactcgcaggagcaacacgtgatgtgtctacttatcagggttgctccgactgtgtgttccaggagtggtggctctgaggtgtgaccctgcccacgtttgggcccagccaggttcagccccccaataaggagggcagcttgataacacaaagaaaacagtgtcaacgagtactaccaagagaagaagacaagaggtcaacacagactcattttctactccgtgtgaatgatagctacagcaggggaaagtttcatagtctatcagtgggtcagaaaatggagttttatagcagaggcttcttagaagcttaaacccctgtcccaatgacgtcaagttcgcccgctggcttggaaggttcagacctatcttccatcaacaccatgatgtcggcggtcatgagtgtagggaaggtcacagagaatggcgggagcccccaggggatcaagtccccctcgaagcctccaggaccaaatcggattggcagaaggaaccaggaaacgaaagaggagaagtcttcctataactgccccctgtgtgagaagatttgcactacccagcaccagctgaccatgcacattcgccagcacaacacagacactggaggagccgaccactcatgcagcatctgcggaaagtcactgagctcggccagctccctcgatcgccacatgctggtgcactctggcgagaggccttacaagtgcactgtgtgtggccagtcatttaccaccaatgggaacatgcacagacatatgaagatccatgagaaggaccctancagtgccacagccacagccccanntnnnnganacgnanncgntngtcctccaagaggaaactgagtcacgatgccgagtcagagagagaagacccagcaccagctaaaaagatggtagaagacgggcagtcaggtgacttggagaagaaagctgatgaagtctttcactgcccagtatgtttcaaggagtttgtttgcaagtatggactggagacccacatggagacccattcagataacccactaagatgtgacatttgttgtgtcacctttcgaacacatcgaggactgctgcgtcacaacgcgcttgtccacaaacaacttcccagggatgcaatgggcagacctttcatacagaacaacccttcaattcctgctggcttccacgacttaggattcacggacttctcctgtaggaagtttcctcgcatttctcaggcctggtgcgaaacaaacctgcggaggtgcatcagcgagcaacaccgttttgtctgcgacacctgtgacaaggcgttccccatgctctgctcactggctctgcacaagcagacccatgtggcggcagaccagggtcaagaaaagccgcaggccacgcccctgcctggtgacgccctggaccagaagggcttcctggccttgcttggcctgcagcacaccaaagacgtcaggcctgcccccgccgaggagcccctgccggatgacaaccaggcaattcagctccagacactcaagtgtcagctacctcaggaccccggctgcaccaacctgctgagcctgtcacctttcgaagctgcttccctaggcggttctctcacagttctccccgcgaccaaggacagcataaagcacctgtccctgcagcccttccagaagggcttcatcatccagcctgacagcagcattgtggtcaagcccatctctggcgagtcggccatcgagctggcagacatccagcaaattctgaagatggcagcctcggctccccctcagatcagtcttccgcccttctccaaggcccctgccgccccactgcaggcgatcttcaagcacatgccccctctgaagccaaagcccctggtcacaccacggacggtggtggccacctccacgcccccgcctctcatcaacgcccagcaggcttccccgggctgtatcagccccagcctgccgccaccgcccctgaagctcctcaaaggctcagtggaggcggcctccaacgcccacctgctgcagtccaagtccgggacccagccccacgcggccacgcggctctccctgcagcagccgcgggcggagctgccgggccagcctgagatgaagacgcagctggagcaggacagcatcatcgaggccctgctgccgctgagcatggaggccaagatcaagcaggagatcacagagggggaactcaaggccttcatgacagcgcccggcggcaagaagacgcccgccatgcgcaaggtgctctacccctgccgcttctgcaaccaggtgtttgccttctcgggggtcttgcgtgcccacgtgcgctcccacctgggcatctcgccataccagtgcaacatctgcgactacatcgccgccgacaaggccgcgctcatccgccacctgcgcacgcacagtggggagcggccctacatttgcaagatctgccactaccccttcactgtcaaagccaactgcgagcggcacctgcgcaagaagcacctcaaggccacccgcaaggatatcgagaagaacatcgagtatgtgagtagcagcgcggccgagctggtggacgccttctgcgccccggacaccgtgtgccggctgtgcggcgaggacctcaagcactatcgtgccctgcgcatccacatgcgcacgcactgcggccgcggcctgggcgggggccacaagggccgcaagcccttcgagtgcaaggagtgcagcgccgcgttcgcggccaagcgcaactgcatccaccacatcctcaagcagcacctgcacgtgcccgagcaggacatcgagagctacgtgctggccgccgacggcctgggccccgcagaggcgccggccgctgaggcgtcggggcgcggggaggacagtggctgcgctgcccttggtgactgcaagcccctcactgccttcctggaaccccagaacggctttcttcacaggggccccacccagcctccacctccccatgtctcgatcaagttggagcccgccagtagctttgcggtggacttcaatgagcccctggacttctcgcagaagggcctggccctggtccaagtgaagcaggaaaacatctcctttctgagcccttcttccctggtcccctatgactgctccatggagcccatcgacctgtccatccccaagaacttcaggaaaggggacaaggatttggccactcccagcgaagccaagaagcctgaggaggaggcggggagcagcgagcagccctctccctgcccagcacccggcccttctcttcctgtaactttggggcccagcggaatcctggaaagccccatggcccctgctccggcggccaccccggaacccccagcacagcccctgcagggccctgttcagctggcggtcccaatctactcctcagccctggtcagcagccctccactcgtgggcagctcagccctcctgagtggcacagccttgctgcgtccactgcggcccaagcccccgctgcttttgccaaagccccccgtgacagaagagctgcccccgctggcctccattgcccagatcatctcatctgtatcctcggcccccaccctgctgaaaaccaaggtggcggacccagggcccgcaagcactggcagtaacaccacggcttcagacagcttaggaggttctgtccccaaagccgccaccaccgccacccccgctgccaccaccagcccaaaagagtctagtgagcctcccgctccagccagcagcccagaggctgcctctcccaccgagcagggcccagcgngnacgtcgaagaagaggggccggaaaagggggatgaggagccgaccccgcgccaacagcggcggggtggacctggactccagcggggagtttgccagcatcgagaagatgctggccaccacagacaccaacaagttcagtccgtttctgcagacagcggaggacaacactcaggatgaggtggccggagcccctgccgaccaccatgggcccagtgatgaagagcagggcagtcccccagaagacaagctgctgagggccaagcggaactcgtacaccaactgcctgcagaagatcacctgtccccactgtccccgggttttcccttgggccagctccctacagaggcacatgctcacacacactgacagtcagtcggatgcggagactgcagccgccgcgggcgaagtgctagacctcacctcacgggacagagagcagccgtcggagggcgccactgagctccgccaggtcgcaggggatgcgcctgtggagcaggccacggcggaaacggcctcgccggtgcaccgggaagagcacgggcgtggggagagccatgagccggaggaggagcatggcactgaggagagcactggggacgccgacggcggaagaggacgcgtcgagcaaccagagcctggacctggacttcgccaccaagctcatggacttcaagctggcggagggcgacggcgaggcaggcccgggggcgcggcctcgcaggagcagaagctcgcctgcgacacctgtgggaagagcttcaagttcctgggcaccctgagccgccaccggaaggcgcacggccgccaggagcccaaggacgagaagggagatggcgccagcactgcagaggaggggccccagcccgcccctgaacaggaggagaagccccccgagaccccggcagaggtggtggagtcggccccgggtgccggggaggccccggcggaaaagctcgcggaggagacggagggcccctccgacggggagagcgcggccgagaaaaggtcctcagagaagagcgacgatgacaagaaaccaaagacagactcccccaaaagcgtggccagcaaggcagacaagaggaagaaggtctgcagcgtgtgcaacaagcggttctggtcgctgcaggacctgacccggcacatgcgctcccacacaggggaaaggccatacaaatgtcagacctgcgagcgaaccttcaccttgaagcacagcctggttcgccaccagcggatccaccagaaagccaggcatgccaaacaccacgggaaggacagcgacaaggaagagcggggtgaggaggacagcgagaatgagtccacccacagcggcaacaacgccgtctcagagaacgaggctgagctggctcccaatgccagcaaccacatggctgtcacccggagccggaaggagggcttggccagtgccaccaaggactgcagccacagggaggagaaggtcacggcagggtggccgtctgagcctggccagggtgaccttaacccagagagcccggcggccctggggcaggacctgctggagccgcgcagcaagaggcctgcccacccaatcctggccacagctgatggcgcctcccagctcgtggggatggagtgacagcctcagtccccctcagcacagacaaaagccagcagagcaaagcgtctatacttcatggggtttcctcagtgccctttggctgttgaggagtgagagagagagagagagagagagagagagagagagacaagcaggagcgtggctgctcgctcagtgccatagccttaccgcagcctgcgcgggaggccacagcccgtgccgattccagtgccttaactacttaccggatccctccatattatcatgggtgttgtatttttccaaaatgacttcttaaacaaaacaaatattataatgaattgtctggagaggacctcttcatttgagcattagcgttattttgtattggtgtgtgtgagcttgttcttgtgaatctgtgatagcaccgtttgttctgtgagctggaaacagaaggaaaaaacatacccttgggtacccatagccaataactggaagaaaatgatgtgaatttcatgtaaatgaccagaggaaagatggataagatgataatttcttaaatagacattttccttttttctttgtgcttcatggtggagctgtcatctggtccttggtattacaggatgtggttgatgaaggtttccaatatggtttcaggccaaaaccagggaagattctagcttcagcctcatgtccatttccagtctgtcagcattagacatggtcactgttcaagtttcaagacatccattcttaactatagagaagagttactcccctggcgtcttaacctatggaaaacatgcacggataggatatatttgattgcctcctcttccctttcagtatatgtattattaatattattattattattattattattagttcatcagtttgctgttctctgcagtgagcagaatcaaatgggcaatatttgtcctgggagacctgtgccgcacccaggtccccgtgttaacgtgtgcctgcggttgtggttggcaccctcgggtggtagctcttctactgtaatgagacaagcctttcttctgtcactgcagaatttagaaggggccgtgagcagtcttcccaagcatggtccaggagcagctcagagagggtggagtgaggatgcatgcatccagggaacaggcatcaagaagccagggccgtgcctggagcactgcagagatgactttggagaaagcaaagcagtgacccagtgaccaggcacattactcgtgagcgaggtattcccagtcttcctgctaagcctaatccaagccttacccagctgtgctactgtcatttgcaaagcaaggaaatactactactggtaataaaactacacatgcaagatgtcagataagaaataggtttatatttaccttcctgcgatgtggggttggtgcttgaagataaatgtgctgtttctagtttcttaaatagcccacacccctggatgcaaaaaggcagggttatttttacccatgagcatcctgtgcaggcaatagacttccctcactgtctccgcctgcagggaggagaatgtaccccactgcacctgagctcctggtccctcagccaagacccctgtgcttgctgcagtgtatggagcctcttgccttcccctggggaggcacccctgtaccccagcttccttcccctggccttttctggccccagtgctcctcctttacatagacttgttcacacagaaacgtgcacgcccccttttctccgccacttcaccagtttctgaaatccaacctcccagacttcacaggaagatagatattcttgagataatgaaaagtgatatcttcgcatacgaaaggaaaaaaggttgaggtatatatgatttttaactgtattaggggtgtatgaaccagtttaaaaacgaggttttatttactgtagagatgaatgcaaatcagaaccaatgatcccttggcctacttagttaaaaccagttcatacatcccttagggtttttattattattattattattattacagttgttattgttgtttttgttgttattattatttggggtttcttgtgttttttctttgcgactctccacactaaacttgcaatattgtggggagaagctgtgactaaactctacgctgcggtgagatgtagcagtaatcagctcccagcgacgtgtgtagctggggctgccgctcgcaataatcactattgatttaaagctttacttagccttgatctgtaccctcgtagtcaataaggtcttgccacattttattagtgaggtggagaaacgtattatttgtttgttgtttttgcccttcccccaccccccaatattaaactgtgaaatttgtgatttgtttaaactctgggtgaatcatagcttagtttgcatgtccagctaatttgtttctatacattttgtttgattctctttctccttctctcagggcttttacaaaaaaatatatatatatggatcttctgaaaagttttttgaggtgcaagttttttctcttgtttttttttttttttttctcattgattaatggacatgatgctgagattcaatcactacatgaaacacctggctgtgaaaacaaaacaacccagagggctgtgttccaagcagcgctggggaagctacgtaacagtcggatgccagttttggaagattcaccatgcgttctgaccctctgttcgtctctttcctctcctctttcttcaagaaggaaattgatcctagtgatttcagcccatgcattaaacaggaaacaataataaatttgtagaattcatatttttctaaagggaacttaaaaactgctgctacatgttatgtacaaaactggtttatgccacatgaacagagaatcacaagtttggttttggtactttttgttcctctttgtattcagttgtatagaacttccaaattcagaatgagaagaaagctgttctgtatcaaaccatttaagcaataaatgttatattttaaaagctgca

SEQ ID NO: 447261 - DNA, 8460 bp, Homo sapiens
  misc_feature (908)..(908): n is a, c, g, or t
  misc_feature (931)..(932): n is a, c, g, or t
  misc_feature (934)..(937): n is a, c, g, or t
  misc_feature (940)..(940): n is a, c, g, or t
  misc_feature (944)..(944): n is a, c, g, or t
  misc_feature (946)..(947): n is a, c, g, or t
  misc_feature (950)..(950): n is a, c, g, or t
  misc_feature (952)..(952): n is a, c, g, or t
  misc_feature (3891)..(3891): n is a, c, g, or t
  misc_feature (3893)..(3893): n is a, c, g, or t
cgggatggcaactgcggtcaccctgctaaagtcggggcggggcggcggtcctccccctcaccccccccagtccgagcgccgccgccgccgccgccgccgccgccggccgctcagtaacacgtccccaggagactcgcaggagcaacacgtgatgtgtctacttatcagggttgctccgactgtgtgttccaggagtggtggctctgaggtgtgaccctgcccacgtttgggcccagccaggttcagccccccaataaggagggcagcttgataacacaaagaaaacagtgtcaacgagtactaccaagagaagaagacaagaggtcaacacagactcattttctactccgtgtgaatgatagctacagcaggggaaagtttcatagtctatcagtgggtcagaaaatggagttttatagcagaggcttcttagaagcttaaacccctgtcccaatgacgtcaagttcgcccgctggcttggaaggttcagacctatcttccatcaacaccatgatgtcggcggtcatgagtgtagggaaggtcacagagaatggcgggagcccccaggggatcaagtccccctcgaagcctccaggaccaaatcggattggcagaaggaaccaggaaacgaaagaggagaagtcttcctataactgccccctgtgtgagaagatttgcactacccagcaccagctgaccatgcacattcgccagcacaacacagacactggaggagccgaccactcatgcagcatctgcggaaagtcactgagctcggccagctccctcgatcgccacatgctggtgcactctggcgagaggccttacaagtgcactgtgtgtggccagtcatttaccaccaatgggaacatgcacagacatatgaagatccatgagaaggaccctancagtgccacagccacagccccanntnnnnganacgnanncgntngtcctccaagaggaaactgagtcacgatgccgagtcagagagagaagacccagcaccagctaaaaagatggtagaagacgggcagtcaggtgacttggagaagaaagctgatgaagtctttcactgcccagtatgtttcaaggagtttgtttgcaagtatggactggagacccacatggagacccattcagataacccactaagatgtgacatttgttgtgtcacctttcgaacacatcgaggactgctgcgtcacaacgcgcttgtccacaaacaacttcccagggatgcaatgggcagacctttcatacagaacaacccttcaattcctgctggcttccacgacttaggattcacggacttctcctgtaggaagtttcctcgcatttctcaggcctggtgcgaaacaaacctgcggaggtgcatcagcgagcaacaccgttttgtctgcgacacctgtgacaaggcgttccccatgctctgctcactggctctgcacaagcagacccatgtggcggcagaccagggtcaagaaaagccgcaggccacgcccctgcctggtgacgccctggaccagaagggcttcctggccttgcttggcctgcagcacaccaaagacgtcaggcctgcccccgccgaggagcccctgccggatgacaaccaggcaattcagctccagacactcaagtgtcagctacctcaggaccccggctgcaccaacctgctgagcctgtcacctttcgaagctgcttccctaggcggttctctcacagttctccccgcgaccaaggacagcataaagcacctgtccctgcagcccttccagaagggcttcatcatccagcctgacagcagcattgtggtcaagcccatctctggcgagtcggccatcgagctggcagacatccagcaaattctgaagatggcagcctcggctccccctcagatcagtcttccgcccttctccaaggcccctgccgccccactgcaggcgatcttcaagcacatgccccctctgaagccaaagcccctggtcacaccacggacggtggtggccacctccacgcccccgcctctcatcaacgcccagcaggcttccccgggctgtatcagccccagcctgccgccaccgcccctgaagctcctcaaaggctcagtggaggcggcctccaacgcccacctgctgcagtccaagtccgggacccagccccacgcggccacgcggctctccctgcagcagccgcgggcggagctgccgggccagcctgagatgaagacgcagctggagcaggacagcatcatcgaggccctgctgccgctgagcatggaggccaagatcaagcaggagatcacagagggggaactcaaggccttcatgacagcgcccggcggcaagaagacgcccgccatgcgcaaggtgctctacccctgccgcttctgcaaccaggtgtttgccttctcgggggtcttgcgtgcccacgtgcgctcccacctgggcatctcgccataccagtgcaacatctgcgactacatcgccgccgacaaggccgcgctcatccgccacctgcgcacgcacagtggggagcggccctacatttgcaagatctgccactaccccttcactgtcaaagccaactgcgagcggcacctgcgcaagaagcacctcaaggccacccgcaaggatatcgagaagaacatcgagtatgtgagtagcagcgcggccgagctggtggacgccttctgcgccccggacaccgtgtgccggctgtgcggcgaggacctcaagcactatcgtgccctgcgcatccacatgcgcacgcactgcggccgcggcctgggcgggggccacaagggccgcaagcccttcgagtgcaaggagtgcagcgccgcgttcgcggccaagcgcaactgcatccaccacatcctcaagcagcacctgcacgtgcccgagcaggacatcgagagctacgtgctggccgccgacggcctgggccccgcagaggcgccggccgctgaggcgtcggggcgcggggaggacagtggctgcgctgcccttggtgactgcaagcccctcactgccttcctggaaccccagaacggctttcttcacaggggccccacccagcctccacctccccatgtctcgatcaagttggagcccgccagtagctttgcggtggacttcaatgagcccctggacttctcgcagaagggcctggccctggtccaagtgaagcaggaaaacatctcctttctgagcccttcttccctggtcccctatgactgctccatggagcccatcgacctgtccatccccaagaacttcaggaaaggggacaaggatttggccactcccagcgaagccaagaagcctgaggaggaggcggggagcagcgagcagccctctccctgcccagcacccggcccttctcttcctgtaactttggggcccagcggaatcctggaaagccccatggcccctgctccggcggccaccccggaacccccagcacagcccctgcagggccctgttcagctggcggtcccaatctactcctcagccctggtcagcagccctccactcgtgggcagctcagccctcctgagtggcacagccttgctgcgtccactgcggcccaagcccccgctgcttttgccaaagccccccgtgacagaagagctgcccccgctggcctccattgcccagatcatctcatctgtatcctcggcccccaccctgctgaaaaccaaggtggcggacccagggcccgcaagcactggcagtaacaccacggcttcagacagcttaggaggttctgtccccaaagccgccaccaccgccacccccgctgccaccaccagcccaaaagagtctagtgagcctcccgctccagccagcagcccagaggctgcctctcccaccgagcagggcccagcgngnacgtcgaagaagaggggccggaaaagggggatgaggagccgaccccgcgccaacagcggcggggtggacctggactccagcggggagtttgccagcatcgagaagatgctggccaccacagacaccaacaagttcagtccgtttctgcagacagcggaggacaacactcaggatgaggtggccggagcccctgccgaccaccatgggcccagtgatgaagagcagggcagtcccccagaagacaagctgctgagggccaagcggaactcgtacaccaactgcctgcagaagatcacctgtccccactgtccccgggttttcccttgggccagctccctacagaggcacatgctcacacacactgacagtcagtcggatgcggagactgcagccgccgcgggcgaagtgctagacctcacctcacgggacagagagcagccgtcggagggcgccactgagctccgccaggtcgcaggggatgcgcctgtggagcaggccacggcggaaacggcctcgccggtgcaccgggaagagcacgggcgtggggagagccatgagccggaggaggagcatggcactgaggagagcactggggacgccgacggcggaagaggacgcgtcgagcaaccagagcctggacctggacttcgccaccaagctcatggacttcaagctggcggagggcgacggcgaggcaggcccgggggcgcggcctcgcaggagcagaagctcgcctgcgacacctgtgggaagagcttcaagttcctgggcaccctgagccgccaccggaaggcgcacggccgccaggagcccaaggacgagaagggagatggcgccagcactgcagaggaggggccccagcccgcccctgaacaggaggagaagccccccgagaccccggcagaggtggtggagtcggccccgggtgccggggaggccccggcggaaaagctcgcggaggagacggagggcccctccgacggggagagcgcggccgagaaaaggtcctcagagaagagcgacgatgacaagaaaccaaagacagactcccccaaaagcgtggccagcaaggcagacaagaggaagaaggtctgcagcgtgtgcaacaagcggttctggtcgctgcaggacctgacccggcacatgcgctcccacacaggggaaaggccatacaaatgtcagacctgcgagcgaaccttcaccttgaagcacagcctggttcgccaccagcggatccaccagaaagccaggcatgccaaacaccacgggaaggacagcgacaaggaagagcggggtgaggaggacagcgagaatgagtccacccacagcggcaacaacgccgtctcagagaacgaggctgagctggctcccaatgccagcaaccacatggctgtcacccggagccggaaggagggcttggccagtgccaccaaggactgcagccacagggaggagaaggtcacggcagggtggccgtctgagcctggccagggtgaccttaacccagagagcccggcggccctggggcaggacctgctggagccgcgcagcaagaggcctgcccacccaatcctggccacagctgatggcgcctcccagctcgtggggatggagtgacagcctcagtccccctcagcacagacaaaagccagcagagcaaagcgtctatacttcatggggtttcctcagtgccctttggctgttgaggagtgagagagagagagagagagagagagagagagagagacaagcaggagcgtggctgctcgctcagtgccatagccttaccgcagcctgcgcgggaggccacagcccgtgccgattccagtgccttaactacttaccggatccctccatattatcatgggtgttgtatttttccaaaatgacttcttaaacaaaacaaatattataatgaattgtctggagaggacctcttcatttgagcattagcgttattttgtattggtgtgtgtgagcttgttcttgtgaatctgtgatagcaccgtttgttctgtgagctggaaacagaaggaaaaaacatacccttgggtacccatagccaataactggaagaaaatgatgtgaatttcatgtaaatgaccagaggaaagatggataagatgataatttcttaaatagacattttccttttttctttgtgcttcatggtggagctgtcatctggtccttggtattacaggatgtggttgatgaaggtttccaatatggtttcaggccaaaaccagggaagattctagcttcagcctcatgtccatttccagtctgtcagcattagacatggtcactgttcaagtttcaagacatccattcttaactatagagaagagttactcccctggcgtcttaacctatggaaaacatgcacggataggatatatttgattgcctcctcttccctttcagtatatgtattattaatattattattattattattattattagttcatcagtttgctgttctctgcagtgagcagaatcaaatgggcaatatttgtcctgggagacctgtgccgcacccaggtccccgtgttaacgtgtgcctgcggttgtggttggcaccctcgggtggtagctcttctactgtaatgagacaagcctttcttctgtcactgcagaatttagaaggggccgtgagcagtcttcccaagcatggtccaggagcagctcagagagggtggagtgaggatgcatgcatccagggaacaggcatcaagaagccagggccgtgcctggagcactgcagagatgactttggagaaagcaaagcagtgacccagtgaccaggcacattactcgtgagcgaggtattcccagtcttcctgctaagcctaatccaagccttacccagctgtgctactgtcatttgcaaagcaaggaaatactactactggtaataaaactacacatgcaagatgtcagataagaaataggtttatatttaccttcctgcgatgtggggttggtgcttgaagataaatgtgctgtttctagtttcttaaatagcccacacccctggatgcaaaaaggcagggttatttttacccatgagcatcctgtgcaggcaatagacttccctcactgtctccgcctgcagggaggagaatgtaccccactgcacctgagctcctggtccctcagccaagacctcaggggtccccagccagcctgctgctggggacccctgtgcttgctgcagtgtatggagcctcttgccttcccctggggaggcacccctgtaccccagcttccttcccctggccttttctggccccagtgctcctcctttacatagacttgttcacacagaaacgtgcacgcccccttttctccgccacttcaccagtttctgaaatccaacctcccagacttcacaggaagatagatattcttgagataatgaaaagtgatatcttcgcatacgaaaggaaaaaaggttgaggtatatatgatttttaactgtattaggggtgtatgaaccagtttaaaaacgaggttttatttactgtagagatgaatgcaaatcagaaccaatgatcccttggcctacttagttagttgttattgttgtttttgttgttattattatttggggtttcttgtgttttttctttgcgactctccacactaaacttgcaatattgtggggagaagctgtgactaaactctacgctgcggtgagatgtagcagtaatcagctcccagcgacgtgtgtagctggggctgccgctcgcaataatcactattgatttaaagctttacttagccttgatctgtaccctcgtagtcaataaggtcttgccacattttattagtgaggtggagaaacgtattatttgtttgttgtttttgcccttcccccaccccccaatattaaactgtgaaatttgtgatttgtttaaactctgggtgaatcatagcttagtttgcatgtccagctaatttgtttctatacattttgtttgattctctttctccttctctcagggcttttacaaaaaaatatatatatatggatcttctgaaaagttttttgaggtgcaagttttttctcttgtttttttttttttttttctcattgattaatggacatgatgctgagattcaatcactacatgaaacacctggctgtgaaaacaaaacaacccagagggctgtgttccaagcagcgctggggaagctacgtaacagtcggatgccagttttggaagattcaccatgcgttctgaccctctgttcgtctctttcctctcctctttcttcaagaaggaaattgatcctagtgatttcagcccatgcattaaacaggaaacaataataaatttgtagaattcatatttttctaaagggaacttaaaaactgctgctacatgttatgtacaaaactggtttatgccacatgaacagagaatcacaagtttggttttggtactttttgttcctctttgtattcagttgtatagaacttccaaattcagaatgagaagaaagctgttctgtatcaaaccatttaagcaataaatgttatattttaaaagctgca

SEQ ID NO: 447262 - DNA, 8559 bp, Homo sapiens
  misc_feature (953)..(953): n is a, c, g, or t
  misc_feature (976)..(977): n is a, c, g, or t
  misc_feature (979)..(982): n is a, c, g, or t
  misc_feature (985)..(985): n is a, c, g, or t
  misc_feature (989)..(989): n is a, c, g, or t
  misc_feature (991)..(992): n is a, c, g, or t
  misc_feature (995)..(995): n is a, c, g, or t
  misc_feature (997)..(997): n is a, c, g, or t
  misc_feature (3936)..(3936): n is a, c, g, or t
  misc_feature (3938)..(3938): n is a, c, g, or t
ttcagacacctgagagcatcctgttctgggtacagtgtgtgtatgtatatgttgtttgaagccgctggtcctcgccttttactccttagctggacagcgggttcgggatctgccccatgactaaggctgaagtggaaagttgcgaagatagaacaagagttgttccttagggtggtgtccctaaacttgaaagtggacttggtcctgctcgcaggttgctccgactgtgtgttccaggagtggtggctctgaggtgtgaccctgcccacgtttgggcccagccaggttcagccccccaataaggagggcagcttgataacacaaagaaaacagtgtcaacgagtactaccaagagaagaagacaagaggtcaacacagactcattttctactccgtgtgaatgatagctacagcaggggaaagtttcatagtctatcagtgggtcagaaaatggagttttatagcagaggcttcttagaagcttaaacccctgtcccaatgacgtcaagttcgcccgctggcttggaaggttcagacctatcttccatcaacaccatgatgtcggcggtcatgagtgtagggaaggtcacagagaatggcgggagcccccaggggatcaagtccccctcgaagcctccaggaccaaatcggattggcagaaggaaccaggaaacgaaagaggagaagtcttcctataactgccccctgtgtgagaagatttgcactacccagcaccagctgaccatgcacattcgccagcacaacacagacactggaggagccgaccactcatgcagcatctgcggaaagtcactgagctcggccagctccctcgatcgccacatgctggtgcactctggcgagaggccttacaagtgcactgtgtgtggccagtcatttaccaccaatgggaacatgcacagacatatgaagatccatgagaaggaccctancagtgccacagccacagccccanntnnnnganacgnanncgntngtcctccaagaggaaactgagtcacgatgccgagtcagagagagaagacccagcaccagctaaaaagatggtagaagacgggcagtcaggtgacttggagaagaaagctgatgaagtctttcactgcccagtatgtttcaaggagtttgtttgcaagtatggactggagacccacatggagacccattcagataacccactaagatgtgacatttgttgtgtcacctttcgaacacatcgaggactgctgcgtcacaacgcgcttgtccacaaacaacttcccagggatgcaatgggcagacctttcatacagaacaacccttcaattcctgctggcttccacgacttaggattcacggacttctcctgtaggaagtttcctcgcatttctcaggcctggtgcgaaacaaacctgcggaggtgcatcagcgagcaacaccgttttgtctgcgacacctgtgacaaggcgttccccatgctctgctcactggctctgcacaagcagacccatgtggcggcagaccagggtcaagaaaagccgcaggccacgcccctgcctggtgacgccctggaccagaagggcttcctggccttgcttggcctgcagcacaccaaagacgtcaggcctgcccccgccgaggagcccctgccggatgacaaccaggcaattcagctccagacactcaagtgtcagctacctcaggaccccggctgcaccaacctgctgagcctgtcacctttcgaagctgcttccctaggcggttctctcacagttctccccgcgaccaaggacagcataaagcacctgtccctgcagcccttccagaagggcttcatcatccagcctgacagcagcattgtggtcaagcccatctctggcgagtcggccatcgagctggcagacatccagcaaattctgaagatggcagcctcggctccccctcagatcagtcttccgcccttctccaaggcccctgccgccccactgcaggcgatcttcaagcacatgccccctctgaagccaaagcccctggtcacaccacggacggtggtggccacctccacgcccccgcctctcatcaacgcccagcaggcttccccgggctgtatcagccccagcctgccgccaccgcccctgaagctcctcaaaggctcagtggaggcggcctccaacgcccacctgctgcagtccaagtccgggacccagccccacgcggccacgcggctctccctgcagcagccgcgggcggagctgccgggccagcctgagatgaagacgcagctggagcaggacagcatcatcgaggccctgctgccgctgagcatggaggccaagatcaagcaggagatcacagagggggaactcaaggccttcatgacagcgcccggcggcaagaagacgcccgccatgcgcaaggtgctctacccctgccgcttctgcaaccaggtgtttgccttctcgggggtcttgcgtgcccacgtgcgctcccacctgggcatctcgccataccagtgcaacatctgcgactacatcgccgccgacaaggccgcgctcatccgccacctgcgcacgcacagtggggagcggccctacatttgcaagatctgccactaccccttcactgtcaaagccaactgcgagcggcacctgcgcaagaagcacctcaaggccacccgcaaggatatcgagaagaacatcgagtatgtgagtagcagcgcggccgagctggtggacgccttctgcgccccggacaccgtgtgccggctgtgcggcgaggacctcaagcactatcgtgccctgcgcatccacatgcgcacgcactgcggccgcggcctgggcgggggccacaagggccgcaagcccttcgagtgcaaggagtgcagcgccgcgttcgcggccaagcgcaactgcatccaccacatcctcaagcagcacctgcacgtgcccgagcaggacatcgagagctacgtgctggccgccgacggcctgggccccgcagaggcgccggccgctgaggcgtcggggcgcggggaggacagtggctgcgctgcccttggtgactgcaagcccctcactgccttcctggaaccccagaacggctttcttcacaggggccccacccagcctccacctccccatgtctcgatcaagttggagcccgccagtagctttgcggtggacttcaatgagcccctggacttctcgcagaagggcctggccctggtccaagtgaagcaggaaaacatctcctttctgagcccttcttccctggtcccctatgactgctccatggagcccatcgacctgtccatccccaagaacttcaggaaaggggacaaggatttggccactcccagcgaagccaagaagcctgaggaggaggcggggagcagcgagcagccctctccctgcccagcacccggcccttctcttcctgtaactttggggcccagcggaatcctggaaagccccatggcccctgctccggcggccaccccggaacccccagcacagcccctgcagggccctgttcagctggcggtcccaatctactcctcagccctggtcagcagccctccactcgtgggcagctcagccctcctgagtggcacagccttgctgcgtccactgcggcccaagcccccgctgcttttgccaaagccccccgtgacagaagagctgcccccgctggcctccattgcccagatcatctcatctgtatcctcggcccccaccctgctgaaaaccaaggtggcggacccagggcccgcaagcactggcagtaacaccacggcttcagacagcttaggaggttctgtccccaaagccgccaccaccgccacccccgctgccaccaccagcccaaaagagtctagtgagcctcccgctccagccagcagcccagaggctgcctctcccaccgagcagggcccagcgngnacgtcgaagaagaggggccggaaaagggggatgaggagccgaccccgcgccaacagcggcggggtggacctggactccagcggggagtttgccagcatcgagaagatgctggccaccacagacaccaacaagttcagtccgtttctgcagacagcggaggacaacactcaggatgaggtggccggagcccctgccgaccaccatgggcccagtgatgaagagcagggcagtcccccagaagacaagctgctgagggccaagcggaactcgtacaccaactgcctgcagaagatcacctgtccccactgtccccgggttttcccttgggccagctccctacagaggcacatgctcacacacactgacagtcagtcggatgcggagactgcagccgccgcgggcgaagtgctagacctcacctcacgggacagagagcagccgtcggagggcgccactgagctccgccaggtcgcaggggatgcgcctgtggagcaggccacggcggaaacggcctcgccggtgcaccgggaagagcacgggcgtggggagagccatgagccggaggaggagcatggcactgaggagagcactggggacgccgacggcggaagaggacgcgtcgagcaaccagagcctggacctggacttcgccaccaagctcatggacttcaagctggcggagggcgacggcgaggcaggcccgggggcgcggcctcgcaggagcagaagctcgcctgcgacacctgtgggaagagcttcaagttcctgggcaccctgagccgccaccggaaggcgcacggccgccaggagcccaaggacgagaagggagatggcgccagcactgcagaggaggggccccagcccgcccctgaacaggaggagaagccccccgagaccccggcagaggtggtggagtcggccccgggtgccggggaggccccggcggaaaagctcgcggaggagacggagggcccctccgacggggagagcgcggccgagaaaaggtcctcagagaagagcgacgatgacaagaaaccaaagacagactcccccaaaagcgtggccagcaaggcagacaagaggaagaaggtctgcagcgtgtgcaacaagcggttctggtcgctgcaggacctgacccggcacatgcgctcccacacaggggaaaggccatacaaatgtcagacctgcgagcgaaccttcaccttgaagcacagcctggttcgccaccagcggatccaccagaaagccaggcatgccaaacaccacgggaaggacagcgacaaggaagagcggggtgaggaggacagcgagaatgagtccacccacagcggcaacaacgccgtctcagagaacgaggctgagctggctcccaatgccagcaaccacatggctgtcacccggagccggaaggagggcttggccagtgccaccaaggactgcagccacagggaggagaaggtcacggcagggtggccgtctgagcctggccagggtgaccttaacccagagagcccggcggccctggggcaggacctgctggagccgcgcagcaagaggcctgcccacccaatcctggccacagctgatggcgcctcccagctcgtggggatggagtgacagcctcagtccccctcagcacagacaaaagccagcagagcaaagcgtctatacttcatggggtttcctcagtgccctttggctgttgaggagtgagagagagagagagagagagagagagagagagagacaagcaggagcgtggctgctcgctcagtgccatagccttaccgcagcctgcgcgggaggccacagcccgtgccgattccagtgccttaactacttaccggatccctccatattatcatgggtgttgtatttttccaaaatgacttcttaaacaaaacaaatattataatgaattgtctggagaggacctcttcatttgagcattagcgttattttgtattggtgtgtgtgagcttgttcttgtgaatctgtgatagcaccgtttgttctgtgagctggaaacagaaggaaaaaacatacccttgggtacccatagccaataactggaagaaaatgatgtgaatttcatgtaaatgaccagaggaaagatggataagatgataatttcttaaatagacattttccttttttctttgtgcttcatggtggagctgtcatctggtccttggtattacaggatgtggttgatgaaggtttccaatatggtttcaggccaaaaccagggaagattctagcttcagcctcatgtccatttccagtctgtcagcattagacatggtcactgttcaagtttcaagacatccattcttaactatagagaagagttactcccctggcgtcttaacctatggaaaacatgcacggataggatatatttgattgcctcctcttccctttcagtatatgtattattaatattattattattattattattattagttcatcagtttgctgttctctgcagtgagcagaatcaaatgggcaatatttgtcctgggagacctgtgccgcacccaggtccccgtgttaacgtgtgcctgcggttgtggttggcaccctcgggtggtagctcttctactgtaatgagacaagcctttcttctgtcactgcagaatttagaaggggccgtgagcagtcttcccaagcatggtccaggagcagctcagagagggtggagtgaggatgcatgcatccagggaacaggcatcaagaagccagggccgtgcctggagcactgcagagatgactttggagaaagcaaagcagtgacccagtgaccaggcacattactcgtgagcgaggtattcccagtcttcctgctaagcctaatccaagccttacccagctgtgctactgtcatttgcaaagcaaggaaatactactactggtaataaaactacacatgcaagatgtcagataagaaataggtttatatttaccttcctgcgatgtggggttggtgcttgaagataaatgtgctgtttctagtttcttaaatagcccacacccctggatgcaaaaaggcagggttatttttacccatgagcatcctgtgcaggcaatagacttccctcactgtctccgcctgcagggaggagaatgtaccccactgcacctgagctcctggtccctcagccaagacctcaggggtccccagccagcctgctgctggggacccctgtgcttgctgcagtgtatggagcctcttgccttcccctggggaggcacccctgtaccccagcttccttcccctggccttttctggccccagtgctcctcctttacatagacttgttcacacagaaacgtgcacgcccccttttctccgccacttcaccagtttctgaaatccaacctcccagacttcacaggaagatagatattcttgagataatgaaaagtgatatcttcgcatacgaaaggaaaaaaggttgaggtatatatgatttttaactgtattaggggtgtatgaaccagtttaaaaacgaggttttatttactgtagagatgaatgcaaatcagaaccaatgatcccttggcctacttagttaaaaccagttcatacatcccttagggtttttattattattattattattattacagttgttattgttgtttttgttgttattattatttggggtttcttgtgttttttctttgcgactctccacactaaacttgcaatattgtggggagaagctgtgactaaactctacgctgcggtgagatgtagcagtaatcagctcccagcgacgtgtgtagctggggctgccgctcgcaataatcactattgatttaaagctttacttagccttgatctgtaccctcgtagtcaataaggtcttgccacattttattagtgaggtggagaaacgtattatttgtttgttgtttttgcccttcccccaccccccaatattaaactgtgaaatttgtgatttgtttaaactctgggtgaatcatagcttagtttgcatgtccagctaatttgtttctatacattttgtttgattctctttctccttctctcagggcttttacaaaaaaatatatatatatggatcttctgaaaagttttttgaggtgcaagttttttctcttgtttttttttttttttttctcattgattaatggacatgatgctgagattcaatcactacatgaaacacctggctgtgaaaacaaaacaacccagagggctgtgttccaagcagcgctggggaagctacgtaacagtcggatgccagttttggaagattcaccatgcgttctgaccctctgttcgtctctttcctctcctctttcttcaagaaggaaattgatcctagtgatttcagcccatgcattaaacaggaaacaataataaatttgtagaattcatatttttctaaagggaacttaaaaactgctgctacatgttatgtacaaaactggtttatgccacatgaacagagaatcacaagtttggttttggtactttttgttcctctttgtattcagttgtatagaacttccaaattcagaatgagaagaaagctgttctgtatcaaaccatttaagcaataaatgttatattttaaaagctgca

SEQ ID NO: 447263 - DNA, 9474 bp, Homo sapiens
  misc_feature (1703)..(1703): n is a, c, g, or t
  misc_feature (1726)..(1727): n is a, c, g, or t
  misc_feature (1729)..(1732): n is a, c, g, or t
  misc_feature (1735)..(1735): n is a, c, g, or t
  misc_feature (1739)..(1739): n is a, c, g, or t
  misc_feature (1741)..(1742): n is a, c, g, or t
  misc_feature (1745)..(1745): n is a, c, g, or t
  misc_feature (1747)..(1747): n is a, c, g, or t
  misc_feature (4686)..(4686): n is a, c, g, or t
  misc_feature (4688)..(4688): n is a, c, g, or t
tgggccgctctagagtatcccctcgtcttttgataggattgtacatagatgctgttaacagaactttgcctttttcattcctatcaggtttagtacagttcatgcgcaggtttcagtaaacattaactacttttatcagagcttgcagtgtgctgaatggttagcaaagagagtgtactgcaagagacagatgaaaatgagagagtccaaggtcacatggattttgaattttttttaattattgagaatttaggggaaagaccatcaggcttcacactttaaatctctttatgtgggcctgccacacagcgtctttgccagcttttgtatgtactgaagctaaaacatttgttcagatgctgattggcaaggcaagtgactttaaaacatggtttttttttctttcaattaaaaaaagttttattcagggctgccttctaggatgaaagattctcaaggccctatcaaaagacgtaatgcaacacttatcgtggtgattcttaagactcctttgaattttatagggatatcctttttctcaaagatttttcaggattgccttctgataatctatttcgtttctggagttagcacagtaactcgtaaaccaagtgctaaaagatgaaatctgaaacacagatatagaataaacgtgttttggatatcatgtaatgttccccaacttttgcctatcattttcgaaaacaggaatgtgatctgtacttatttttagagaaaaggacacgaacatttgagaaattactgacaaaaattattctcctcctgcccctccgatccaataggtttgaagccgctggtcctcgccttttactccttagctggacagcgggttcgggatctgccccatgactaaggctgaagtggaaagttgcgaagatagaacaagagttgttccttagggtggtgtccctaaacttgaaagtggacttggtcctgctcgcaggttgctccgactgtgtgttccaggagtggtggctctgaggtgtgaccctgcccacgtttgggcccagccaggttcagccccccaataaggagggcagcttgataacacaaagaaaacagtgtcaacgagtactaccaagagaagaagacaagaggtcaacacagactcattttctactccgtgtgaatgatagctacagcaggggaaagtttcatagtctatcagtgggtcagaaaatggagttttatagcagaggcttcttagaagcttaaacccctgtcccaatgacgtcaagttcgcccgctggcttggaaggttcagacctatcttccatcaacaccatgatgtcggcggtcatgagtgtagggaaggtcacagagaatggcgggagcccccaggggatcaagtccccctcgaagcctccaggaccaaatcggattggcagaaggaaccaggaaacgaaagaggagaagtcttcctataactgccccctgtgtgagaagatttgcactacccagcaccagctgaccatgcacattcgccagcacaacacagacactggaggagccgaccactcatgcagcatctgcggaaagtcactgagctcggccagctccctcgatcgccacatgctggtgcactctggcgagaggccttacaagtgcactgtgtgtggccagtcatttaccaccaatgggaacatgcacagacatatgaagatccatgagaaggaccctancagtgccacagccacagccccanntnnnnganacgnanncgntngtcctccaagaggaaactgagtcacgatgccgagtcagagagagaagacccagcaccagctaaaaagatggtagaagacgggcagtcaggtgacttggagaagaaagctgatgaagtctttcactgcccagtatgtttcaaggagtttgtttgcaagtatggactggagacccacatggagacccattcagataacccactaagatgtgacatttgttgtgtcacctttcgaacacatcgaggactgctgcgtcacaacgcgcttgtccacaaacaacttcccagggatgcaatgggcagacctttcatacagaacaacccttcaattcctgctggcttccacgacttaggattcacggacttctcctgtaggaagtttcctcgcatttctcaggcctggtgcgaaacaaacctgcggaggtgcatcagcgagcaacaccgttttgtctgcgacacctgtgacaaggcgttccccatgctctgctcactggctctgcacaagcagacccatgtggcggcagaccagggtcaagaaaagccgcaggccacgcccctgcctggtgacgccctggaccagaagggcttcctggccttgcttggcctgcagcacaccaaagacgtcaggcctgcccccgccgaggagcccctgccggatgacaaccaggcaattcagctccagacactcaagtgtcagctacctcaggaccccggctgcaccaacctgctgagcctgtcacctttcgaagctgcttccctaggcggttctctcacagttctccccgcgaccaaggacagcataaagcacctgtccctgcagcccttccagaagggcttcatcatccagcctgacagcagcattgtggtcaagcccatctctggcgagtcggccatcgagctggcagacatccagcaaattctgaagatggcagcctcggctccccctcagatcagtcttccgcccttctccaaggcccctgccgccccactgcaggcgatcttcaagcacatgccccctctgaagccaaagcccctggtcacaccacggacggtggtggccacctccacgcccccgcctctcatcaacgcccagcaggcttccccgggctgtatcagccccagcctgccgccaccgcccctgaagctcctcaaaggctcagtggaggcggcctccaacgcccacctgctgcagtccaagtccgggacccagccccacgcggccacgcggctctccctgcagcagccgcgggcggagctgccgggccagcctgagatgaagacgcagctggagcaggacagcatcatcgaggccctgctgccgctgagcatggaggccaagatcaagcaggagatcacagagggggaactcaaggccttcatgacagcgcccggcggcaagaagacgcccgccatgcgcaaggtgctctacccctgccgcttctgcaaccaggtgtttgccttctcgggggtcttgcgtgcccacgtgcgctcccacctgggcatctcgccataccagtgcaacatctgcgactacatcgccgccgacaaggccgcgctcatccgccacctgcgcacgcacagtggggagcggccctacatttgcaagatctgccactaccccttcactgtcaaagccaactgcgagcggcacctgcgcaagaagcacctcaaggccacccgcaaggatatcgagaagaacatcgagtatgtgagtagcagcgcggccgagctggtggacgccttctgcgccccggacaccgtgtgccggctgtgcggcgaggacctcaagcactatcgtgccctgcgcatccacatgcgcacgcactgcggccgcggcctgggcgggggccacaagggccgcaagcccttcgagtgcaaggagtgcagcgccgcgttcgcggccaagcgcaactgcatccaccacatcctcaagcagcacctgcacgtgcccgagcaggacatcgagagctacgtgctggccgccgacggcctgggccccgcagaggcgccggccgctgaggcgtcggggcgcggggaggacagtggctgcgctgcccttggtgactgcaagcccctcactgccttcctggaaccccagaacggctttcttcacaggggccccacccagcctccacctccccatgtctcgatcaagttggagcccgccagtagctttgcggtggacttcaatgagcccctggacttctcgcagaagggcctggccctggtccaagtgaagcaggaaaacatctcctttctgagcccttcttccctggtcccctatgactgctccatggagcccatcgacctgtccatccccaagaacttcaggaaaggggacaaggatttggccactcccagcgaagccaagaagcctgaggaggaggcggggagcagcgagcagccctctccctgcccagcacccggcccttctcttcctgtaactttggggcccagcggaatcctggaaagccccatggcccctgctccggcggccaccccggaacccccagcacagcccctgcagggccctgttcagctggcggtcccaatctactcctcagccctggtcagcagccctccactcgtgggcagctcagccctcctgagtggcacagccttgctgcgtccactgcggcccaagcccccgctgcttttgccaaagccccccgtgacagaagagctgcccccgctggcctccattgcccagatcatctcatctgtatcctcggcccccaccctgctgaaaaccaaggtggcggacccagggcccgcaagcactggcagtaacaccacggcttcagacagcttaggaggttctgtccccaaagccgccaccaccgccacccccgctgccaccaccagcccaaaagagtctagtgagcctcccgctccagccagcagcccagaggctgcctctcccaccgagcagggcccagcgngnacgtcgaagaagaggggccggaaaagggggatgaggagccgaccccgcgccaacagcggcggggtggacctggactccagcggggagtttgccagcatcgagaagatgctggccaccacagacaccaacaagttcagtccgtttctgcagacagcggaggacaacactcaggatgaggtggccggagcccctgccgaccaccatgggcccagtgatgaagagcagggcagtcccccagaagacaagctgctgagggccaagcggaactcgtacaccaactgcctgcagaagatcacctgtccccactgtccccgggttttcccttgggccagctccctacagaggcacatgctcacacacactggtcagaaacccttcccttgtcaaaaatgcgatgccttcttttctaccaaatctaactgtgaacgccaccagttgcgcaaacacggagttaccacctgttccctgagaagaaacgggcttatcccccagtcaaaagagagtgatgttggatcccatgatagcacagacagtcagtcggatgcggagactgcagccgccgcgggcgaagtgctagacctcacctcacgggacagagagcagccgtcggagggcgccactgagctccgccaggtcgcaggggatgcgcctgtggagcaggccacggcggaaacggcctcgccggtgcaccgggaagagcacgggcgtggggagagccatgagccggaggaggagcatggcactgaggagagcactggggacgccgacggcggaagaggacgcgtcgagcaaccagagcctggacctggacttcgccaccaagctcatggacttcaagctggcggagggcgacggcgaggcaggcccgggggcgcggcctcgcaggagcagaagctcgcctgcgacacctgtgggaagagcttcaagttcctgggcaccctgagccgccaccggaaggcgcacggccgccaggagcccaaggacgagaagggagatggcgccagcactgcagaggaggggccccagcccgcccctgaacaggaggagaagccccccgagaccccggcagaggtggtggagtcggccccgggtgccggggaggccccggcggaaaagctcgcggaggagacggagggcccctccgacggggagagcgcggccgagaaaaggtcctcagagaagagcgacgatgacaagaaaccaaagacagactcccccaaaagcgtggccagcaaggcagacaagaggaagaaggtctgcagcgtgtgcaacaagcggttctggtcgctgcaggacctgacccggcacatgcgctcccacacaggggaaaggccatacaaatgtcagacctgcgagcgaaccttcaccttgaagcacagcctggttcgccaccagcggatccaccagaaagccaggcatgccaaacaccacgggaaggacagcgacaaggaagagcggggtgaggaggacagcgagaatgagtccacccacagcggcaacaacgccgtctcagagaacgaggctgagctggctcccaatgccagcaaccacatggctgtcacccggagccggaaggagggcttggccagtgccaccaaggactgcagccacagggaggagaaggtcacggcagggtggccgtctgagcctggccagggtgaccttaacccagagagcccggcggccctggggcaggacctgctggagccgcgcagcaagaggcctgcccacccaatcctggccacagctgatggcgcctcccagctcgtggggatggagtgacagcctcagtccccctcagcacagacaaaagccagcagagcaaagcgtctatacttcatggggtttcctcagtgccctttggctgttgaggagtgagagagagagagagagagagagagagagagagagacaagcaggagcgtggctgctcgctcagtgccatagccttaccgcagcctgcgcgggaggccacagcccgtgccgattccagtgccttaactacttaccggatccctccatattatcatgggtgttgtatttttccaaaatgacttcttaaacaaaacaaatattataatgaattgtctggagaggacctcttcatttgagcattagcgttattttgtattggtgtgtgtgagcttgttcttgtgaatctgtgatagcaccgtttgttctgtgagctggaaacagaaggaaaaaacatacccttgggtacccatagccaataactggaagaaaatgatgtgaatttcatgtaaatgaccagaggaaagatggataagatgataatttcttaaatagacattttccttttttctttgtgcttcatggtggagctgtcatctggtccttggtattacaggatgtggttgatgaaggtttccaatatggtttcaggccaaaaccagggaagattctagcttcagcctcatgtccatttccagtctgtcagcattagacatggtcactgttcaagtttcaagacatccattcttaactatagagaagagttactcccctggcgtcttaacctatggaaaacatgcacggataggatatatttgattgcctcctcttccctttcagtatatgtattattaatattattattattattattattattagttcatcagtttgctgttctctgcagtgagcagaatcaaatgggcaatatttgtcctgggagacctgtgccgcacccaggtccccgtgttaacgtgtgcctgcggttgtggttggcaccctcgggtggtagctcttctactgtaatgagacaagcctttcttctgtcactgcagaatttagaaggggccgtgagcagtcttcccaagcatggtccaggagcagctcagagagggtggagtgaggatgcatgcatccagggaacaggcatcaagaagccagggccgtgcctggagcactgcagagatgactttggagaaagcaaagcagtgacccagtgaccaggcacattactcgtgagcgaggtattcccagtcttcctgctaagcctaatccaagccttacccagctgtgctactgtcatttgcaaagcaaggaaatactactactggtaataaaactacacatgcaagatgtcagataagaaataggtttatatttaccttcctgcgatgtggggttggtgcttgaagataaatgtgctgtttctagtttcttaaatagcccacacccctggatgcaaaaaggcagggttatttttacccatgagcatcctgtgcaggcaatagacttccctcactgtctccgcctgcagggaggagaatgtaccccactgcacctgagctcctggtccctcagccaagacctcaggggtccccagccagcctgctgctggggacccctgtgcttgctgcagtgtatggagcctcttgccttcccctggggaggcacccctgtaccccagcttccttcccctggccttttctggccccagtgctcctcctttacatagacttgttcacacagaaacgtgcacgcccccttttctccgccacttcaccagtttctgaaatccaacctcccagacttcacaggaagatagatattcttgagataatgaaaagtgatatcttcgcatacgaaaggaaaaaaggttgaggtatatatgatttttaactgtattaggggtgtatgaaccagtttaaaaacgaggttttatttactgtagagatgaatgcaaatcagaaccaatgatcccttggcctacttagttaaaaccagttcatacatcccttagggtttttattattattattattattattacagttgttattgttgtttttgttgttattattatttggggtttcttgtgttttttctttgcgactctccacactaaacttgcaatattgtggggagaagctgtgactaaactctacgctgcggtgagatgtagcagtaatcagctcccagcgacgtgtgtagctggggctgccgctcgcaataatcactattgatttaaagctttacttagccttgatctgtaccctcgtagtcaataaggtcttgccacattttattagtgaggtggagaaacgtattatttgtttgttgtttttgcccttcccccaccccccaatattaaactgtgaaatttgtgatttgtttaaactctgggtgaatcatagcttagtttgcatgtccagctaatttgtttctatacattttgtttgattctctttctccttctctcagggcttttacaaaaaaatatatatatatggatcttctgaaaagttttttgaggtgcaagttttttctcttgtttttttttttttttttctcattgattaatggacatgatgctgagattcaatcactacatgaaacacctggctgtgaaaacaaaacaacccagagggctgtgttccaagcagcgctggggaagctacgtaacagtcggatgccagttttggaagattcaccatgcgttctgaccctctgttcgtctctttcctctcctctttcttcaagaaggaaattgatcctagtgatttcagcccatgcattaaacaggaaacaataataaatttgtagaattcatatttttctaaagggaacttaaaaactgctgctacatgttatgtacaaaactggtttatgccacatgaacagagaatcacaagtttggttttggtactttttgttcctctttgtattcagttgtatagaacttccaaattcagaatgagaagaaagctgttctgtatcaaaccatttaagcaataaatgttatattttaaaagctgca

SEQ ID NO: 447264 - DNA, 4596 bp, Homo sapiens
agttcgacggagactctcctcagagccatgagccggaggaggagcatggcactgaggagagcactggggacgccgacggcgcggaagaggacgcgtcgagcaaccagagcctggacctgaggtgatgtggaggctgcttttgcctttcttcacgtccccagggtcatcttggtcctcctgggggatgtaacaggtggtgaggatttgggccgaaagaagtcctcactggtttggggttcaggctgctggcgtgggtctagcccattcccggcgacatccctggcatgggcgtacctggtggtgcccctctgagccctccccgctgtgcttgccccacagacagtcagtcggatgcggagactgcagccgccgcgggcgaagtgctagacctcacctcacgggacagagagcagccgtcggagggcgccactgagctccgccaggtcgcaggggatgcgcctgtggagcaggccacggcggaaacggcctcgccggtgcaccgggaagagcacgggcgtggggagagccatgagccggaggaggagcatggcactgaggagagcactggggacgccgacggcggaagaggacgcgtcgagcaaccagagcctggacctggacttcgccaccaagctcatggacttcaagctggcggagggcgacggcgaggcaggcccgggggcgcggcctcgcaggagcagaagctcgcctgcgacacctgtgggaagagcttcaagttcctgggcaccctgagccgccaccggaaggcgcacggccgccaggagcccaaggacgagaagggagatggcgccagcactgcagaggaggggccccagcccgcccctgaacaggaggagaagccccccgagaccccggcagaggtggtggagtcggccccgggtgccggggaggccccggcggaaaagctcgcggaggagacggagggcccctccgacggggagagcgcggccgagaaaaggtcctcagagaagagcgacgatgacaagaaaccaaagacagactcccccaaaagcgtggccagcaaggcagacaagaggaagaaggtctgcagcgtgtgcaacaagcggttctggtcgctgcaggacctgacccggcacatgcgctcccacacaggggaaaggccatacaaatgtcagacctgcgagcgaaccttcaccttgaagcacagcctggttcgccaccagcggatccaccagaaagccaggcatgccaaacaccacgggaaggacagcgacaaggaagagcggggtgaggaggacagcgagaatgagtccacccacagcggcaacaacgccgtctcagagaacgaggctgagctggctcccaatgccagcaaccacatggctgtcacccggagccggaaggagggcttggccagtgccaccaaggactgcagccacagggaggagaaggtcacggcagggtggccgtctgagcctggccagggtgaccttaacccagagagcccggcggccctggggcaggacctgctggagccgcgcagcaagaggcctgcccacccaatcctggccacagctgatggcgcctcccagctcgtggggatggagtgacagcctcagtccccctcagcacagacaaaagccagcagagcaaagcgtctatacttcatggggtttcctcagtgccctttggctgttgaggagtgagagagagagagagagagagagagagagagagagacaagcaggagcgtggctgctcgctcagtgccatagccttaccgcagcctgcgcgggaggccacagcccgtgccgattccagtgccttaactacttaccggatccctccatattatcatgggtgttgtatttttccaaaatgacttcttaaacaaaacaaatattataatgaattgtctggagaggacctcttcatttgagcattagcgttattttgtattggtgtgtgtgagcttgttcttgtgaatctgtgatagcaccgtttgttctgtgagctggaaacagaaggaaaaaacatacccttgggtacccatagccaataactggaagaaaatgatgtgaatttcatgtaaatgaccagaggaaagatggataagatgataatttcttaaatagacattttccttttttctttgtgcttcatggtggagctgtcatctggtccttggtattacaggatgtggttgatgaaggtttccaatatggtttcaggccaaaaccagggaagattctagcttcagcctcatgtccatttccagtctgtcagcattagacatggtcactgttcaagtttcaagacatccattcttaactatagagaagagttactcccctggcgtcttaacctatggaaaacatgcacggataggatatatttgattgcctcctcttccctttcagtatatgtattattaatattattattattattattattattagttcatcagtttgctgttctctgcagtgagcagaatcaaatgggcaatatttgtcctgggagacctgtgccgcacccaggtccccgtgttaacgtgtgcctgcggttgtggttggcaccctcgggtggtagctcttctactgtaatgagacaagcctttcttctgtcactgcagaatttagaaggggccgtgagcagtcttcccaagcatggtccaggagcagctcagagagggtggagtgaggatgcatgcatccagggaacaggcatcaagaagccagggccgtgcctggagcactgcagagatgactttggagaaagcaaagcagtgacccagtgaccaggcacattactcgtgagcgaggtattcccagtcttcctgctaagcctaatccaagccttacccagctgtgctactgtcatttgcaaagcaaggaaatactactactggtaataaaactacacatgcaagatgtcagataagaaataggtttatatttaccttcctgcgatgtggggttggtgcttgaagataaatgtgctgtttctagtttcttaaatagcccacacccctggatgcaaaaaggcagggttatttttacccatgagcatcctgtgcaggcaatagacttccctcactgtctccgcctgcagggaggagaatgtaccccactgcacctgagctcctggtccctcagccaagacctcaggggtccccagccagcctgctgctggggacccctgtgcttgctgcagtgtatggagcctcttgccttcccctggggaggcacccctgtaccccagcttccttcccctggccttttctggccccagtgctcctcctttacatagacttgttcacacagaaacgtgcacgcccccttttctccgccacttcaccagtttctgaaatccaacctcccagacttcacaggaagatagatattcttgagataatgaaaagtgatatcttcgcatacgaaaggaaaaaaggttgaggtatatatgatttttaactgtattaggggtgtatgaaccagtttaaaaacgaggttttatttactgtagagatgaatgcaaatcagaaccaatgatcccttggcctacttagttaaaaccagttcatacatcccttagggtttttattattattattattattattacagttgttattgttgtttttgttgttattattatttggggtttcttgtgttttttctttgcgactctccacactaaacttgcaatattgtggggagaagctgtgactaaactctacgctgcggtgagatgtagcagtaatcagctcccagcgacgtgtgtagctggggctgccgctcgcaataatcactattgatttaaagctttacttagccttgatctgtaccctcgtagtcaataaggtcttgccacattttattagtgaggtggagaaacgtattatttgtttgttgtttttgcccttcccccaccccccaatattaaactgtgaaatttgtgatttgtttaaactctgggtgaatcatagcttagtttgcatgtccagctaatttgtttctatacattttgtttgattctctttctccttctctcagggcttttacaaaaaaatatatatatatggatcttctgaaaagttttttgaggtgcaagttttttctcttgtttttttttttttttttctcattgattaatggacatgatgctgagattcaatcactacatgaaacacctggctgtgaaaacaaaacaacccagagggctgtgttccaagcagcgctggggaagctacgtaacagtcggatgccagttttggaagattcaccatgcgttctgaccctctgttcgtctctttcctctcctctttcttcaagaaggaaattgatcctagtgatttcagcccatgcattaaacaggaaacaataataaatttgtagaattcatatttttctaaagggaacttaaaaactgctgctacatgttatgtacaaaactggtttatgccacatgaacagagaatcacaagtttggttttggtactttttgttcctctttgtattcagttgtatagaacttccaaattcagaatgagaagaaagctgttctgtatcaaaccatttaagcaataaatgttatattttaaaagctgca

SEQ ID NO: 447265 - DNA, 2718 bp, Homo sapiens
ggctatcacattatcttgtttacagatgaagaaaagccaaagagaagttatataactggcaagtttctctggctccccgcctgcaccactgctcaccagattgcatgaagagggaggcagctgtaacacctcataccgttgatctccagtgaactcagatacttgtttccacgtccaggaaaccacaaactaagctctttgaagcatcagcaaaccttgctaagtgacacgtgaatgataatgtgatagccggctatcacatttcatggtggagctgtcatctggtccttggtattacaggatgtggttgatgaaggtttccaatatggtttcaggccaaaaccagggaagattctagcttcagcctcatgtccatttccagtctgtcagcattagacatggtcactgttcaagtttcaagacatccattcttaactatagagaagagttactcccctggcgtcttaacctatggaaaacatgcacggataggatatatttgattgcctcctcttccctttcagtatatgtattattaatattattattattattattattattagttcatcagtttgctgttctctgcagtgagcagaatcaaatgggcaatatttgtcctgggagacctgtgccgcacccaggtccccgtgttaacgtgtgcctgcggttgtggttggcaccctcgggtggtagctcttctactgtaatgagacaagcctttcttctgtcactgcagaatttagaaggggccgtgagcagtcttcccaagcatggtccaggagcagctcagagagggtggagtgaggatgcatgcatccagggaacaggcatcaagaagccagggccgtgcctggagcactgcagagatgactttggagaaagcaaagcagtgacccagtgaccaggcacattactcgtgagcgaggtattcccagtcttcctgctaagcctaatccaagccttacccagctgtgctactgtcatttgcaaagcaaggaaatactactactggtaataaaactacacatgcaagatgtcagataagaaataggtttatatttaccttcctgcgatgtggggttggtgcttgaagataaatgtgctgtttctagtttcttaaatagcccacacccctggatgcaaaaaggcagggttatttttacccatgagcatcctgtgcaggcaatagacttccctcactgtctccgcctgcagggaggagaatgtaccccactgcacctgagctcctggtccctcagccaagacctcaggggtccccagccagcctgctgctggggacccctgtgcttgctgcagtgtatggagcctcttgccttcccctggggaggcacccctgtaccccagcttccttcccctggccttttctggccccagtgctcctcctttacatagacttgttcacacagaaacgtgcacgcccccttttctccgccacttcaccagtttctgaaatccaacctcccagacttcacaggaagatagatattcttgagataatgaaaagtgatatcttcgcatacgaaaggaaaaaaggttgaggtatatatgatttttaactgtattaggggtgtatgaaccagtttaaaaacgaggttttatttactgtagagatgaatgcaaatcagaaccaatgatcccttggcctacttagttaaaaccagttcatacatcccttagggtttttattattattattattattattacagttgttattgttgtttttgttgttattattatttggggtttcttgtgttttttctttgcgactctccacactaaacttgcaatattgtggggagaagctgtgactaaactctacgctgcggtgagatgtagcagtaatcagctcccagcgacgtgtgtagctggggctgccgctcgcaataatcactattgatttaaagctttacttagccttgatctgtaccctcgtagtcaataaggtcttgccacattttattagtgaggtggagaaacgtattatttgtttgttgtttttgcccttcccccaccccccaatattaaactgtgaaatttgtgatttgtttaaactctgggtgaatcatagcttagtttgcatgtccagctaatttgtttctatacattttgtttgattctctttctccttctctcagggcttttacaaaaaaatatatatatatggatcttctgaaaagttttttgaggtgcaagttttttctcttgtttttttttttttttttctcattgattaatggacatgatgctgagattcaatcactacatgaaacacctggctgtgaaaacaaaacaacccagagggctgtgttccaagcagcgctggggaagctacgtaacagtcggatgccagttttggaagattcaccatgcgttctgaccctctgttcgtctctttcctctcctctttcttcaagaaggaaattgatcctagtgatttcagcccatgcattaaacaggaaacaataataaatttgtagaattcatatttttctaaagggaacttaaaaactgctgctacatgttatgtacaaaactggtttatgccacatgaacagagaatcacaagtttggttttggtactttttgttcctctttgtattcagttgtatagaacttccaaattcagaatgagaagaaagctgttctgtatcaaaccatttaagcaataaatgttatattttaaaagctgca

SEQ ID NO: 447266 - DNA, 970 bp, Homo sapiens
ggcactttctagttgccaagcatgactcagccatggagaagacagaggtttacagtggaaaacaatgaccatgacattcagagaaaagtatagagggtagggcgagcccagctggcatgccagtccacctgtccaaatccttcacacatttcctattaggcttcttgtagattatcaagattccttgtgcattctgtatattcgtccctcgtagtcaataaggtcttgccacattttattagtgaggtggagaaacgtattatttgtttgttgtttttgcccttcccccaccccccaatattaaactgtgaaatttgtgatttgtttaaactctgggtgaatcatagcttagtttgcatgtccagctaatttgtttctatacattttgtttgattctctttctccttctctcagggcttttacaaaaaaatatatatatatggatcttctgaaaagttttttgaggtgcaagttttttctcttgtttttttttttttttttctcattgattaatggacatgatgctgagattcaatcactacatgaaacacctggctgtgaaaacaaaacaacccagagggctgtgttccaagcagcgctggggaagctacgtaacagtcggatgccagttttggaagattcaccatgcgttctgaccctctgttcgtctctttcctctcctctttcttcaagaaggaaattgatcctagtgatttcagcccatgcattaaacaggaaacaataataaatttgtagaattcatatttttctaaagggaacttaaaaactgctgctacatgttatgtacaaaactggtttatgccacatgaacagagaatcacaagtttggttttggtactttttgttcctctttgtattcagttgtatagaacttccaaattcagaatgagaagaaagctgttctgtatcaaaccatttaagcaataaatgttatattttaaaagctgca

SEQ ID NO: 447267 - DNA, 5458 bp, Homo sapiens
  misc_feature (1703)..(1703): n is a, c, g, or t
  misc_feature (1726)..(1727): n is a, c, g, or t
  misc_feature (1729)..(1732): n is a, c, g, or t
  misc_feature (1735)..(1735): n is a, c, g, or t
  misc_feature (1739)..(1739): n is a, c, g, or t
  misc_feature (1741)..(1742): n is a, c, g, or t
  misc_feature (1745)..(1745): n is a, c, g, or t
  misc_feature (1747)..(1747): n is a, c, g, or t
  misc_feature (4686)..(4686): n is a, c, g, or t
  misc_feature (4688)..(4688): n is a, c, g, or t
tgggccgctctagagtatcccctcgtcttttgataggattgtacatagatgctgttaacagaactttgcctttttcattcctatcaggtttagtacagttcatgcgcaggtttcagtaaacattaactacttttatcagagcttgcagtgtgctgaatggttagcaaagagagtgtactgcaagagacagatgaaaatgagagagtccaaggtcacatggattttgaattttttttaattattgagaatttaggggaaagaccatcaggcttcacactttaaatctctttatgtgggcctgccacacagcgtctttgccagcttttgtatgtactgaagctaaaacatttgttcagatgctgattggcaaggcaagtgactttaaaacatggtttttttttctttcaattaaaaaaagttttattcagggctgccttctaggatgaaagattctcaaggccctatcaaaagacgtaatgcaacacttatcgtggtgattcttaagactcctttgaattttatagggatatcctttttctcaaagatttttcaggattgccttctgataatctatttcgtttctggagttagcacagtaactcgtaaaccaagtgctaaaagatgaaatctgaaacacagatatagaataaacgtgttttggatatcatgtaatgttccccaacttttgcctatcattttcgaaaacaggaatgtgatctgtacttatttttagagaaaaggacacgaacatttgagaaattactgacaaaaattattctcctcctgcccctccgatccaataggtttgaagccgctggtcctcgccttttactccttagctggacagcgggttcgggatctgccccatgactaaggctgaagtggaaagttgcgaagatagaacaagagttgttccttagggtggtgtccctaaacttgaaagtggacttggtcctgctcgcaggttgctccgactgtgtgttccaggagtggtggctctgaggtgtgaccctgcccacgtttgggcccagccaggttcagccccccaataaggagggcagcttgataacacaaagaaaacagtgtcaacgagtactaccaagagaagaagacaagaggtcaacacagactcattttctactccgtgtgaatgatagctacagcaggggaaagtttcatagtctatcagtgggtcagaaaatggagttttatagcagaggcttcttagaagcttaaacccctgtcccaatgacgtcaagttcgcccgctggcttggaaggttcagacctatcttccatcaacaccatgatgtcggcggtcatgagtgtagggaaggtcacagagaatggcgggagcccccaggggatcaagtccccctcgaagcctccaggaccaaatcggattggcagaaggaaccaggaaacgaaagaggagaagtcttcctataactgccccctgtgtgagaagatttgcactacccagcaccagctgaccatgcacattcgccagcacaacacagacactggaggagccgaccactcatgcagcatctgcggaaagtcactgagctcggccagctccctcgatcgccacatgctggtgcactctggcgagaggccttacaagtgcactgtgtgtggccagtcatttaccaccaatgggaacatgcacagacatatgaagatccatgagaaggaccctancagtgccacagccacagccccanntnnnnganacgnanncgntngtcctccaagaggaaactgagtcacgatgccgagtcagagagagaagacccagcaccagctaaaaagatggtagaagacgggcagtcaggtgacttggagaagaaagctgatgaagtctttcactgcccagtatgtttcaaggagtttgtttgcaagtatggactggagacccacatggagacccattcagataacccactaagatgtgacatttgttgtgtcacctttcgaacacatcgaggactgctgcgtcacaacgcgcttgtccacaaacaacttcccagggatgcaatgggcagacctttcatacagaacaacccttcaattcctgctggcttccacgacttaggattcacggacttctcctgtaggaagtttcctcgcatttctcaggcctggtgcgaaacaaacctgcggaggtgcatcagcgagcaacaccgttttgtctgcgacacctgtgacaaggcgttccccatgctctgctcactggctctgcacaagcagacccatgtggcggcagaccagggtcaagaaaagccgcaggccacgcccctgcctggtgacgccctggaccagaagggcttcctggccttgcttggcctgcagcacaccaaagacgtcaggcctgcccccgccgaggagcccctgccggatgacaaccaggcaattcagctccagacactcaagtgtcagctacctcaggaccccggctgcaccaacctgctgagcctgtcacctttcgaagctgcttccctaggcggttctctcacagttctccccgcgaccaaggacagcataaagcacctgtccctgcagcccttccagaagggcttcatcatccagcctgacagcagcattgtggtcaagcccatctctggcgagtcggccatcgagctggcagacatccagcaaattctgaagatggcagcctcggctccccctcagatcagtcttccgcccttctccaaggcccctgccgccccactgcaggcgatcttcaagcacatgccccctctgaagccaaagcccctggtcacaccacggacggtggtggccacctccacgcccccgcctctcatcaacgcccagcaggcttccccgggctgtatcagccccagcctgccgccaccgcccctgaagctcctcaaaggctcagtggaggcggcctccaacgcccacctgctgcagtccaagtccgggacccagccccacgcggccacgcggctctccctgcagcagccgcgggcggagctgccgggccagcctgagatgaagacgcagctggagcaggacagcatcatcgaggccctgctgccgctgagcatggaggccaagatcaagcaggagatcacagagggggaactcaaggccttcatgacagcgcccggcggcaagaagacgcccgccatgcgcaaggtgctctacccctgccgcttctgcaaccaggtgtttgccttctcgggggtcttgcgtgcccacgtgcgctcccacctgggcatctcgccataccagtgcaacatctgcgactacatcgccgccgacaaggccgcgctcatccgccacctgcgcacgcacagtggggagcggccctacatttgcaagatctgccactaccccttcactgtcaaagccaactgcgagcggcacctgcgcaagaagcacctcaaggccacccgcaaggatatcgagaagaacatcgagtatgtgagtagcagcgcggccgagctggtggacgccttctgcgccccggacaccgtgtgccggctgtgcggcgaggacctcaagcactatcgtgccctgcgcatccacatgcgcacgcactgcggccgcggcctgggcgggggccacaagggccgcaagcccttcgagtgcaaggagtgcagcgccgcgttcgcggccaagcgcaactgcatccaccacatcctcaagcagcacctgcacgtgcccgagcaggacatcgagagctacgtgctggccgccgacggcctgggccccgcagaggcgccggccgctgaggcgtcggggcgcggggaggacagtggctgcgctgcccttggtgactgcaagcccctcactgccttcctggaaccccagaacggctttcttcacaggggccccacccagcctccacctccccatgtctcgatcaagttggagcccgccagtagctttgcggtggacttcaatgagcccctggacttctcgcagaagggcctggccctggtccaagtgaagcaggaaaacatctcctttctgagcccttcttccctggtcccctatgactgctccatggagcccatcgacctgtccatccccaagaacttcaggaaaggggacaaggatttggccactcccagcgaagccaagaagcctgaggaggaggcggggagcagcgagcagccctctccctgcccagcacccggcccttctcttcctgtaactttggggcccagcggaatcctggaaagccccatggcccctgctccggcggccaccccggaacccccagcacagcccctgcagggccctgttcagctggcggtcccaatctactcctcagccctggtcagcagccctccactcgtgggcagctcagccctcctgagtggcacagccttgctgcgtccactgcggcccaagcccccgctgcttttgccaaagccccccgtgacagaagagctgcccccgctggcctccattgcccagatcatctcatctgtatcctcggcccccaccctgctgaaaaccaaggtggcggacccagggcccgcaagcactggcagtaacaccacggcttcagacagcttaggaggttctgtccccaaagccgccaccaccgccacccccgctgccaccaccagcccaaaagagtctagtgagcctcccgctccagccagcagcccagaggctgcctctcccaccgagcagggcccagcgngnacgtcgaagaagaggggccggaaaagggggatgaggagccgaccccgcgccaacagcggcggggtggacctggactccagcggggagtttgccagcatcgagaagatgctggccaccacagacaccaacaagttcagtccgtttctgcagacagcggaggacaacactcaggatgaggtggccggagcccctgccgaccaccatgggcccagtgatgaagagcagggcagtcccccagaagacaagctgctgagggccaagcggaactcgtacaccaactgcctgcagaagatcacctgtccccactgtccccgggttttcccttgggccagctccctacagaggcacatgctcacacacactggtaagagggccaccgggctcccaggcagtgagtcctacttcctggtagggggagccacgagtgggggtcaaaagcgagacccatctcccacagttccagttattcctagcttggcttcttccccggtctccgaagccccgagcttgtctggtggtgctgtatttcctatgtgctctcagtacccacatggcctttgtgcaggggccgagccctccaagggcagcattctactaagtgttcatccggggcgttttgaggtgaaagtggtcacaggccctcagatcactcatggcgtcgcctcatcccttccggaggtggtagccagattatctgctgggttaaacagggaggcggctccacagacgtgagactttgtattaaggtattggggcataatgagctcggt

SEQ ID NO: 447268 - DNA, 1695 bp, Homo sapiens
tgggccgctctagagtatcccctcgtcttttgataggattgtacatagatgctgttaacagaactttgcctttttcattcctatcaggtttagtacagttcatgcgcaggtttcagtaaacattaactacttttatcagagcttgcagtgtgctgaatggttagcaaagagagtgtactgcaagagacagatgaaaatgagagagtccaaggtcacatggattttgaattttttttaattattgagaatttaggggaaagaccatcaggcttcacactttaaatctctttatgtgggcctgccacacagcgtctttgccagcttttgtatgtactgaagctaaaacatttgttcagatgctgattggcaaggcaagtgactttaaaacatggtttttttttctttcaattaaaaaaagttttattcagggctgccttctaggatgaaagattctcaaggccctatcaaaagacgtaatgcaacacttatcgtggtgattcttaagactcctttgaattttatagggatatcctttttctcaaagatttttcaggattgccttctgataatctatttcgtttctggagttagcacagtaactcgtaaaccaagtgctaaaagatgaaatctgaaacacagatatagaataaacgtgttttggatatcatgtaatgttccccaacttttgcctatcattttcgaaaacaggaatgtgatctgtacttatttttagagaaaaggacacgaacatttgagaaattactgacaaaaattattctcctcctgcccctccgatccaataggtttgaagccgctggtcctcgccttttactccttagctggacagcgggttcgggatctgccccatgactaaggctgaagtggaaagttgcgaagatagaacaagagttgttccttagggtggtgtccctaaacttgaaagtggacttggtcctgctcgcaggttgctccgactgtgtgttccaggagtggtggctctgaggtgtgaccctgcccacgtttgggcccagccaggttcagccccccaataaggagggcagcttgataacacaaagaaaacagtgtcaacgagtactaccaagagaagaagacaagaggtcaacacagactcattttctactccgtgtgaatgatagctacagcaggggaaagtttcatagtctatcagtgggtcagaaaatggagttttatagcagaggcttcttagaagcttaaacccctgtcccaatgacgtcaagttcgcccgctggcttggaaggttcagacctatcttccatcaacaccatgatgtcggcggtcatgagtgtagggaaggtcacagagaatggcgggagcccccaggggatcaagtccccctcgaagcctccaggaccaaatcggattggcagaaggaaccaggtaagtgttcacacctagtggtgacctctggtgggttcaatccatgagaacattgggagatgtttccgagtttcctatgataaaaccttggaagaattgggaataaaacggacatacccagaggccttgatcatttttcaagggcaaaatttttatggcttatgttagtttcctttcatggagaaggttttctttgctgtggtgtcgatgttggtggaagtgcccttatttttggccccaccattggattttaactcaagctttcttcacttgatg

SEQ ID NO: 447269 - DNA, 683 bp, Homo sapiens
gttctgggtacagtgtgtgtatgtatatgttgtaagttgaaattttattttaactgaggtaattggagaaaaagggatagtgtagaaatgggaggaaaagacagtatcagtaagttaaaaatatcagtaggttctgatgtttaactcaatatactttgagtgaatgtaatggtaaatgttaaaattaaagatctggtttgactgaagttaactttacatttggagttaaggggagaaaaatagataactgttgaaatgttaaatttatttttgcataaaatagttctgctataacctatgtgtagctattcaaacaaataaatattcgacaatataactgaattggttattgatcaggtagttgggccttcaaaaaaaagtatgagaatatgaaatataaacagatttaagttctgtaaaaacaaaatctgtaaaatcattcaggtatatttgtgttcaaaattttccaaaaagattagattaaaagtatcttttaattggtgatatatattgactccattagactttggaaatttatattttatcagtcagaacttttagattcagactagaaaaaaaattccttcttggtcctttcccccacccaccctttttattgtacatagatgctgttaacagaactttgcctttttcattcctatcaggtttagtacagttcatgc

SEQ ID NO: 447270 - DNA, 644 bp, Homo sapiens
gtgtctgctgtgaacatgccattaggatgcacgaagctcccccccggagccagtggtccgagccattctcacatggtgctgcccttgacgttattggaatgtgcctgggggataggggtgttcctgtctgttcaaggcacactcagttccaagctcttacttggatgttaatgggacaactctggatggaatcagcctggctcctggcagcttgcttgtaattgcaggcaagggatgggaaatgttttctagtcctaattggtgactcccggtgatgttgagcagaggaccatttctggtcttaatcctcttttaacatcaccttttcttatttttgtaggttgctccgactgtgtgttccaggagtggtggctctgaggtgtgaccctgcccacgtttgggcccagccaggttcagccccccaataaggagggcagcttgataacacaaagaaaacaggttagtgaaacagttttcactcgcagtgagtcacaataatgttgaacgtcgagtcttcccatgccctcctctcctaccctcccctacctcccgtttaattgtcatgccatttccaggtcctcctgaggctttgttggaaaatcgtgttgaaattgtaactaggccagacatggtggctcacacct

SEQ ID NO: 447271 - DNA, 984 bp, Homo sapiens
gaagctgggcggggggccgagacgggggccgggacgacggctggggcgccggggtcgccagctcctcgcccacctccctccctgtgggagaagaggaggaggggaagtgactgcggagttgatgaactttgcacatccagaaacgccattttgattccttttccggaacaagtttgcatctctcctcggtctctccctgaagcccaccggtccccaacgcatcatgccagggagccaagcgtcctgcccggccgttgctccgactgtgtgttccaggagtggtggctctgaggtgtgaccctgcccacgtttgggcccagccaggttcagccccccaataaggagggcagcttgataacacaaagaaaacagtgtcaacgagtactaccaagagaagaagacaagaggtcaacacagactcattttctactccgtgtgaatgatagctacagcaggggaaagtttcatagtctatcagtgggtcagaaaatggagttttatagcagaggcttcttagaagcttaaacccctgtcccaatgacgtcaagttcgcccgctggcttggaaggttcagacctatcttccatcaacaccatgatgtcggcggtcatgagtgtagggaaggtcacagagaatggcgggagcccccaggggatcaagtccccctcgaagcctccaggaccaaatcggattggcagaaggaaccaggtaagtgttcacacctagtggtgacctctggtgggttcaatccatgagaacattgggagatgtttccgagtttcctatgataaaaccttggaagaattgggaataaaacggacatacccagaggccttgatcatttttcaagggcaaaatttttatggcttatgttagtttcctttcatggagaaggttttctttgctgtggtgtcgatgttggtggaagtgcccttatttttggccccaccattggattttaactcaagctttcttcacttgatg

SEQ ID NO: 447272 - DNA, 8443 bp, Homo sapiens
  misc_feature (908)..(908): n is a, c, g, or t
  misc_feature (931)..(932): n is a, c, g, or t
  misc_feature (934)..(937): n is a, c, g, or t
  misc_feature (940)..(940): n is a, c, g, or t
  misc_feature (944)..(944): n is a, c, g, or t
  misc_feature (946)..(947): n is a, c, g, or t
  misc_feature (950)..(950): n is a, c, g, or t
  misc_feature (952)..(952): n is a, c, g, or t
  misc_feature (3891)..(3891): n is a, c, g, or t
  misc_feature (3893)..(3893): n is a, c, g, or t
cgggatggcaactgcggtcaccctgctaaagtcggggcggggcggcggtcctccccctcaccccccccagtccgagcgccgccgccgccgccgccgccgccgccggccgctcagtaacacgtccccaggagactcgcaggagcaacacgtgatgtgtctacttatcagggttgctccgactgtgtgttccaggagtggtggctctgaggtgtgaccctgcccacgtttgggcccagccaggttcagccccccaataaggagggcagcttgataacacaaagaaaacagtgtcaacgagtactaccaagagaagaagacaagaggtcaacacagactcattttctactccgtgtgaatgatagctacagcaggggaaagtttcatagtctatcagtgggtcagaaaatggagttttatagcagaggcttcttagaagcttaaacccctgtcccaatgacgtcaagttcgcccgctggcttggaaggttcagacctatcttccatcaacaccatgatgtcggcggtcatgagtgtagggaaggtcacagagaatggcgggagcccccaggggatcaagtccccctcgaagcctccaggaccaaatcggattggcagaaggaaccaggaaacgaaagaggagaagtcttcctataactgccccctgtgtgagaagatttgcactacccagcaccagctgaccatgcacattcgccagcacaacacagacactggaggagccgaccactcatgcagcatctgcggaaagtcactgagctcggccagctccctcgatcgccacatgctggtgcactctggcgagaggccttacaagtgcactgtgtgtggccagtcatttaccaccaatgggaacatgcacagacatatgaagatccatgagaaggaccctancagtgccacagccacagccccanntnnnnganacgnanncgntngtcctccaagaggaaactgagtcacgatgccgagtcagagagagaagacccagcaccagctaaaaagatggtagaagacgggcagtcaggtgacttggagaagaaagctgatgaagtctttcactgcccagtatgtttcaaggagtttgtttgcaagtatggactggagacccacatggagacccattcagataacccactaagatgtgacatttgttgtgtcacctttcgaacacatcgaggactgctgcgtcacaacgcgcttgtccacaaacaacttcccagggatgcaatgggcagacctttcatacagaacaacccttcaattcctgctggcttccacgacttaggattcacggacttctcctgtaggaagtttcctcgcatttctcaggcctggtgcgaaacaaacctgcggaggtgcatcagcgagcaacaccgttttgtctgcgacacctgtgacaaggcgttccccatgctctgctcactggctctgcacaagcagacccatgtggcggcagaccagggtcaagaaaagccgcaggccacgcccctgcctggtgacgccctggaccagaagggcttcctggccttgcttggcctgcagcacaccaaagacgtcaggcctgcccccgccgaggagcccctgccggatgacaaccaggcaattcagctccagacactcaagtgtcagctacctcaggaccccggctgcaccaacctgctgagcctgtcacctttcgaagctgcttccctaggcggttctctcacagttctccccgcgaccaaggacagcataaagcacctgtccctgcagcccttccagaagggcttcatcatccagcctgacagcagcattgtggtcaagcccatctctggcgagtcggccatcgagctggcagacatccagcaaattctgaagatggcagcctcggctccccctcagatcagtcttccgcccttctccaaggcccctgccgccccactgcaggcgatcttcaagcacatgccccctctgaagccaaagcccctggtcacaccacggacggtggtggccacctccacgcccccgcctctcatcaacgcccagcaggcttccccgggctgtatcagccccagcctgccgccaccgcccctgaagctcctcaaaggctcagtggaggcggcctccaacgcccacctgctgcagtccaagtccgggacccagccccacgcggccacgcggctctccctgcagcagccgcgggcggagctgccgggccagcctgagatgaagacgcagctggagcaggacagcatcatcgaggccctgctgccgctgagcatggaggccaagatcaagcaggagatcacagagggggaactcaaggccttcatgacagcgcccggcggcaagaagacgcccgccatgcgcaaggtgctctacccctgccgcttctgcaaccaggtgtttgccttctcgggggtcttgcgtgcccacgtgcgctcccacctgggcatctcgccataccagtgcaacatctgcgactacatcgccgccgacaaggccgcgctcatccgccacctgcgcacgcacagtggggagcggccctacatttgcaagatctgccactaccccttcactgtcaaagccaactgcgagcggcacctgcgcaagaagcacctcaaggccacccgcaaggatatcgagaagaacatcgagtatgtgagtagcagcgcggccgagctggtggacgccttctgcgccccggacaccgtgtgccggctgtgcggcgaggacctcaagcactatcgtgccctgcgcatccacatgcgcacgcactgcggccgcggcctgggcgggggccacaagggccgcaagcccttcgagtgcaaggagtgcagcgccgcgttcgcggccaagcgcaactgcatccaccacatcctcaagcagcacctgcacgtgcccgagcaggacatcgagagctacgtgctggccgccgacggcctgggccccgcagaggcgccggccgctgaggcgtcggggcgcggggaggacagtggctgcgctgcccttggtgactgcaagcccctcactgccttcctggaaccccagaacggctttcttcacaggggccccacccagcctccacctccccatgtctcgatcaagttggagcccgccagtagctttgcggtggacttcaatgagcccctggacttctcgcagaagggcctggccctggtccaagtgaagcaggaaaacatctcctttctgagcccttcttccctggtcccctatgactgctccatggagcccatcgacctgtccatccccaagaacttcaggaaaggggacaaggatttggccactcccagcgaagccaagaagcctgaggaggaggcggggagcagcgagcagccctctccctgcccagcacccggcccttctcttcctgtaactttggggcccagcggaatcctggaaagccccatggcccctgctccggcggccaccccggaacccccagcacagcccctgcagggccctgttcagctggcggtcccaatctactcctcagccctggtcagcagccctccactcgtgggcagctcagccctcctgagtggcacagccttgctgcgtccactgcggcccaagcccccgctgcttttgccaaagccccccgtgacagaagagctgcccccgctggcctccattgcccagatcatctcatctgtatcctcggcccccaccctgctgaaaaccaaggtggcggacccagggcccgcaagcactggcagtaacaccacggcttcagacagcttaggaggttctgtccccaaagccgccaccaccgccacccccgctgccaccaccagcccaaaagagtctagtgagcctcccgctccagccagcagcccagaggctgcctctcccaccgagcagggcccagcgngnacgtcgaagaagaggggccggaaaagggggatgaggagccgaccccgcgccaacagcggcggggtggacctggactccagcggggagtttgccagcatcgagaagatgctggccaccacagacaccaacaagttcagtccgtttctgcagacagcggaggacaacactcaggatgaggtggccggagcccctgccgaccaccatgggcccagtgatgaagagcagggcagtcccccagaagacaagctgctgagggccaagcggaactcgtacaccaactgcctgcagaagatcacctgtccccactgtccccgggttttcccttgggccagctccctacagaggcacatgctcacacacactgacagtcagtcggatgcggagactgcagccgccgcgggcgaagtgctagacctcacctcacgggacagagagcagccgtcggagggcgccactgagctccgccaggtcgcaggggatgcgcctgtggagcaggccacggcggaaacggcctcgccggtgcaccgggaagagcacgggcgtggggagagccatgagccggaggaggagcatggcactgaggagagcactggggacgccgacggcggaagaggacgcgtcgagcaaccagagcctggacctggacttcgccaccaagctcatggacttcaagctggcggagggcgacggcgaggcaggcccgggggcgcggcctcgcaggagcagaagctcgcctgcgacacctgtgggaagagcttcaagttcctgggcaccctgagccgccaccggaaggcgcacggccgccaggagcccaaggacgagaagggagatggcgccagcactgcagaggaggggccccagcccgcccctgaacaggaggagaagccccccgagaccccggcagaggtggtggagtcggccccgggtgccggggaggccccggcggaaaagctcgcggaggagacggagggcccctccgacggggagagcgcggccgagaaaaggtcctcagagaagagcgacgatgacaagaaaccaaagacagactcccccaaaagcgtggccagcaaggcagacaagaggaagaaggtctgcagcgtgtgcaacaagcggttctggtcgctgcaggacctgacccggcacatgcgctcccacacaggggaaaggccatacaaatgtcagacctgcgagcgaaccttcaccttgaagcacagcctggttcgccaccagcggatccaccagaaagccaggcatgccaaacaccacgggaaggacagcgacaaggaagagcggggtgaggaggacagcgagaatgagtccacccacagcggcaacaacgccgtctcagagaacgaggctgagctggctcccaatgccagcaaccacatggctgtcacccggagccggaaggagggcttggccagtgccaccaaggactgcagccacagggaggagaaggtcacggcagggtggccgtctgagcctggccagggtgaccttaacccagagagcccggcggccctggggcaggacctgctggagccgcgcagcaagaggcctgcccacccaatcctggccacagctgatggcgcctcccagctcgtggggatggagtgacagcctcagtccccctcagcacagacaaaagccagcagagcaaagcgtctatacttcatggggtttcctcagtgccctttggctgttgaggagtgagagagagagagagagagagagagagagagagagacaagcaggagcgtggctgctcgctcagtgccatagccttaccgcagcctgcgcgggaggccacagcccgtgccgattccagtgccttaactacttaccggatccctccatattatcatgggtgttgtatttttccaaaatgacttcttaaacaaaacaaatattataatgaattgtctggagaggacctcttcatttgagcattagcgttattttgtattggtgtgtgtgagcttgttcttgtgaatctgtgatagcaccgtttgttctgtgagctggaaacagaaggaaaaaacatacccttgggtacccatagccaataactggaagaaaatgatgtgaatttcatgtaaatgaccagaggaaagatggataagatgataatttcttaaatagacattttccttttttctttgtgcttcatggtggagctgtcatctggtccttggtattacaggatgtggttgatgaaggtttccaatatggtttcaggccaaaaccagggaagattctagcttcagcctcatgtccatttccagtctgtcagcattagacatggtcactgttcaagtttcaagacatccattcttaactatagagaagagttactcccctggcgtcttaacctatggaaaacatgcacggataggatatatttgattgcctcctcttccctttcagtatatgtattattaatattattattattattattattattagttcatcagtttgctgttctctgcagtgagcagaatcaaatgggcaatatttgtcctgggagacctgtgccgcacccaggtccccgtgttaacgtgtgcctgcggttgtggttggcaccctcgggtggtagctcttctactgtaatgagacaagcctttcttctgtcactgcagaatttagaaggggccgtgagcagtcttcccaagcatggtccaggagcagctcagagagggtggagtgaggatgcatgcatccagggaacaggcatcaagaagccagggccgtgcctggagcactgcagagatgactttggagaaagcaaagcagtgacccagtgaccaggcacattactcgtgagcgaggtattcccagtcttcctgctaagcctaatccaagccttacccagctgtgctactgtcatttgcaaagcaaggaaatactactactggtaataaaactacacatgcaagatgtcagataagaaataggtttatatttaccttcctgcgatgtggggttggtgcttgaagataaatgtgctgtttctagtttcttaaatagcccacacccctggatgcaaaaaggcagggttatttttacccatgagcatcctgtgcaggcaatagacttccctcactgtctccgcctgcagggaggagaatgtacccctgtgcttgctgcagtgtatggagcctcttgccttcccctggggaggcacccctgtaccccagcttccttcccctggccttttctggccccagtgctcctcctttacatagacttgttcacacagaaacgtgcacgcccccttttctccgccacttcaccagtttctgaaatccaacctcccagacttcacaggaagatagatattcttgagataatgaaaagtgatatcttcgcatacgaaaggaaaaaaggttgaggtatatatgatttttaactgtattaggggtgtatgaaccagtttaaaaacgaggttttatttactgtagagatgaatgcaaatcagaaccaatgatcccttggcctacttagttaaaaccagttcatacatcccttagggtttttattattattattattattattacagttgttattgttgtttttgttgttattattatttggggtttcttgtgttttttctttgcgactctccacactaaacttgcaatattgtggggagaagctgtgactaaactctacgctgcggtgagatgtagcagtaatcagctcccagcgacgtgtgtagctggggctgccgctcgcaataatcactattgatttaaagctttacttagccttgatctgtaccctcgtagtcaataaggtcttgccacattttattagtgaggtggagaaacgtattatttgtttgttgtttttgcccttcccccaccccccaatattaaactgtgaaatttgtgatttgtttaaactctgggtgaatcatagcttagtttgcatgtccagctaatttgtttctatacattttgtttgattctctttctccttctctcagggcttttacaaaaaaatatatatatatggatcttctgaaaagttttttgaggtgcaagttttttctcttgtttttttttttttttttctcattgattaatggacatgatgctgagattcaatcactacatgaaacacctggctgtgaaaacaaaacaacccagagggctgtgttccaagcagcgctggggaagctacgtaacagtcggatgccagttttggaagattcaccatgcgttctgaccctctgttcgtctctttcctctcctctttcttcaagaaggaaattgatcctagtgatttcagcccatgcattaaacaggaaacaataataaatttgtagaattcatatttttctaaagggaacttaaaaactgctgctacatgttatgtacaaaactggtttatgccacatgaacagagaatcacaagtttggttttggtactttttgttcctctttgtattcagttgtatagaacttccaaattcagaatgagaagaaagctgttctgtatcaaaccatttaagcaataaatgttatattttaaaagctgca

SEQ ID NO: 447273 - DNA, 9309 bp, Homo sapiens
  misc_feature (1703)..(1703): n is a, c, g, or t
  misc_feature (1726)..(1727): n is a, c, g, or t
  misc_feature (1729)..(1732): n is a, c, g, or t
  misc_feature (1735)..(1735): n is a, c, g, or t
  misc_feature (1739)..(1739): n is a, c, g, or t
  misc_feature (1741)..(1742): n is a, c, g, or t
  misc_feature (1745)..(1745): n is a, c, g, or t
  misc_feature (1747)..(1747): n is a, c, g, or t
  misc_feature (4686)..(4686): n is a, c, g, or t
  misc_feature (4688)..(4688): n is a, c, g, or t
tgggccgctctagagtatcccctcgtcttttgataggattgtacatagatgctgttaacagaactttgcctttttcattcctatcaggtttagtacagttcatgcgcaggtttcagtaaacattaactacttttatcagagcttgcagtgtgctgaatggttagcaaagagagtgtactgcaagagacagatgaaaatgagagagtccaaggtcacatggattttgaattttttttaattattgagaatttaggggaaagaccatcaggcttcacactttaaatctctttatgtgggcctgccacacagcgtctttgccagcttttgtatgtactgaagctaaaacatttgttcagatgctgattggcaaggcaagtgactttaaaacatggtttttttttctttcaattaaaaaaagttttattcagggctgccttctaggatgaaagattctcaaggccctatcaaaagacgtaatgcaacacttatcgtggtgattcttaagactcctttgaattttatagggatatcctttttctcaaagatttttcaggattgccttctgataatctatttcgtttctggagttagcacagtaactcgtaaaccaagtgctaaaagatgaaatctgaaacacagatatagaataaacgtgttttggatatcatgtaatgttccccaacttttgcctatcattttcgaaaacaggaatgtgatctgtacttatttttagagaaaaggacacgaacatttgagaaattactgacaaaaattattctcctcctgcccctccgatccaataggtttgaagccgctggtcctcgccttttactccttagctggacagcgggttcgggatctgccccatgactaaggctgaagtggaaagttgcgaagatagaacaagagttgttccttagggtggtgtccctaaacttgaaagtggacttggtcctgctcgcaggttgctccgactgtgtgttccaggagtggtggctctgaggtgtgaccctgcccacgtttgggcccagccaggttcagccccccaataaggagggcagcttgataacacaaagaaaacagtgtcaacgagtactaccaagagaagaagacaagaggtcaacacagactcattttctactccgtgtgaatgatagctacagcaggggaaagtttcatagtctatcagtgggtcagaaaatggagttttatagcagaggcttcttagaagcttaaacccctgtcccaatgacgtcaagttcgcccgctggcttggaaggttcagacctatcttccatcaacaccatgatgtcggcggtcatgagtgtagggaaggtcacagagaatggcgggagcccccaggggatcaagtccccctcgaagcctccaggaccaaatcggattggcagaaggaaccaggaaacgaaagaggagaagtcttcctataactgccccctgtgtgagaagatttgcactacccagcaccagctgaccatgcacattcgccagcacaacacagacactggaggagccgaccactcatgcagcatctgcggaaagtcactgagctcggccagctccctcgatcgccacatgctggtgcactctggcgagaggccttacaagtgcactgtgtgtggccagtcatttaccaccaatgggaacatgcacagacatatgaagatccatgagaaggaccctancagtgccacagccacagccccanntnnnnganacgnanncgntngtcctccaagaggaaactgagtcacgatgccgagtcagagagagaagacccagcaccagctaaaaagatggtagaagacgggcagtcaggtgacttggagaagaaagctgatgaagtctttcactgcccagtatgtttcaaggagtttgtttgcaagtatggactggagacccacatggagacccattcagataacccactaagatgtgacatttgttgtgtcacctttcgaacacatcgaggactgctgcgtcacaacgcgcttgtccacaaacaacttcccagggatgcaatgggcagacctttcatacagaacaacccttcaattcctgctggcttccacgacttaggattcacggacttctcctgtaggaagtttcctcgcatttctcaggcctggtgcgaaacaaacctgcggaggtgcatcagcgagcaacaccgttttgtctgcgacacctgtgacaaggcgttccccatgctctgctcactggctctgcacaagcagacccatgtggcggcagaccagggtcaagaaaagccgcaggccacgcccctgcctggtgacgccctggaccagaagggcttcctggccttgcttggcctgcagcacaccaaagacgtcaggcctgcccccgccgaggagcccctgccggatgacaaccaggcaattcagctccagacactcaagtgtcagctacctcaggaccccggctgcaccaacctgctgagcctgtcacctttcgaagctgcttccctaggcggttctctcacagttctccccgcgaccaaggacagcataaagcacctgtccctgcagcccttccagaagggcttcatcatccagcctgacagcagcattgtggtcaagcccatctctggcgagtcggccatcgagctggcagacatccagcaaattctgaagatggcagcctcggctccccctcagatcagtcttccgcccttctccaaggcccctgccgccccactgcaggcgatcttcaagcacatgccccctctgaagccaaagcccctggtcacaccacggacggtggtggccacctccacgcccccgcctctcatcaacgcccagcaggcttccccgggctgtatcagccccagcctgccgccaccgcccctgaagctcctcaaaggctcagtggaggcggcctccaacgcccacctgctgcagtccaagtccgggacccagccccacgcggccacgcggctctccctgcagcagccgcgggcggagctgccgggccagcctgagatgaagacgcagctggagcaggacagcatcatcgaggccctgctgccgctgagcatggaggccaagatcaagcaggagatcacagagggggaactcaaggccttcatgacagcgcccggcggcaagaagacgcccgccatgcgcaaggtgctctacccctgccgcttctgcaaccaggtgtttgccttctcgggggtcttgcgtgcccacgtgcgctcccacctgggcatctcgccataccagtgcaacatctgcgactacatcgccgccgacaaggccgcgctcatccgccacctgcgcacgcacagtggggagcggccctacatttgcaagatctgccactaccccttcactgtcaaagccaactgcgagcggcacctgcgcaagaagcacctcaaggccacccgcaaggatatcgagaagaacatcgagtatgtgagtagcagcgcggccgagctggtggacgccttctgcgccccggacaccgtgtgccggctgtgcggcgaggacctcaagcactatcgtgccctgcgcatccacatgcgcacgcactgcggccgcggcctgggcgggggccacaagggccgcaagcccttcgagtgcaaggagtgcagcgccgcgttcgcggccaagcgcaactgcatccaccacatcctcaagcagcacctgcacgtgcccgagcaggacatcgagagctacgtgctggccgccgacggcctgggccccgcagaggcgccggccgctgaggcgtcggggcgcggggaggacagtggctgcgctgcccttggtgactgcaagcccctcactgccttcctggaaccccagaacggctttcttcacaggggccccacccagcctccacctccccatgtctcgatcaagttggagcccgccagtagctttgcggtggacttcaatgagcccctggacttctcgcagaagggcctggccctggtccaagtgaagcaggaaaacatctcctttctgagcccttcttccctggtcccctatgactgctccatggagcccatcgacctgtccatccccaagaacttcaggaaaggggacaaggatttggccactcccagcgaagccaagaagcctgaggaggaggcggggagcagcgagcagccctctccctgcccagcacccggcccttctcttcctgtaactttggggcccagcggaatcctggaaagccccatggcccctgctccggcggccaccccggaacccccagcacagcccctgcagggccctgttcagctggcggtcccaatctactcctcagccctggtcagcagccctccactcgtgggcagctcagccctcctgagtggcacagccttgctgcgtccactgcggcccaagcccccgctgcttttgccaaagccccccgtgacagaagagctgcccccgctggcctccattgcccagatcatctcatctgtatcctcggcccccaccctgctgaaaaccaaggtggcggacccagggcccgcaagcactggcagtaacaccacggcttcagacagcttaggaggttctgtccccaaagccgccaccaccgccacccccgctgccaccaccagcccaaaagagtctagtgagcctcccgctccagccagcagcccagaggctgcctctcccaccgagcagggcccagcgngnacgtcgaagaagaggggccggaaaagggggatgaggagccgaccccgcgccaacagcggcggggtggacctggactccagcggggagtttgccagcatcgagaagatgctggccaccacagacaccaacaagttcagtccgtttctgcagacagcggaggacaacactcaggatgaggtggccggagcccctgccgaccaccatgggcccagtgatgaagagcagggcagtcccccagaagacaagctgctgagggccaagcggaactcgtacaccaactgcctgcagaagatcacctgtccccactgtccccgggttttcccttgggccagctccctacagaggcacatgctcacacacactgacagtcagtcggatgcggagactgcagccgccgcgggcgaagtgctagacctcacctcacgggacagagagcagccgtcggagggcgccactgagctccgccaggtcgcaggggatgcgcctgtggagcaggccacggcggaaacggcctcgccggtgcaccgggaagagcacgggcgtggggagagccatgagccggaggaggagcatggcactgaggagagcactggggacgccgacggcggaagaggacgcgtcgagcaaccagagcctggacctggacttcgccaccaagctcatggacttcaagctggcggagggcgacggcgaggcaggcccgggggcgcggcctcgcaggagcagaagctcgcctgcgacacctgtgggaagagcttcaagttcctgggcaccctgagccgccaccggaaggcgcacggccgccaggagcccaaggacgagaagggagatggcgccagcactgcagaggaggggccccagcccgcccctgaacaggaggagaagccccccgagaccccggcagaggtggtggagtcggccccgggtgccggggaggccccggcggaaaagctcgcggaggagacggagggcccctccgacggggagagcgcggccgagaaaaggtcctcagagaagagcgacgatgacaagaaaccaaagacagactcccccaaaagcgtggccagcaaggcagacaagaggaagaaggtctgcagcgtgtgcaacaagcggttctggtcgctgcaggacctgacccggcacatgcgctcccacacaggggaaaggccatacaaatgtcagacctgcgagcgaaccttcaccttgaagcacagcctggttcgccaccagcggatccaccagaaagccaggcatgccaaacaccacgggaaggacagcgacaaggaagagcggggtgaggaggacagcgagaatgagtccacccacagcggcaacaacgccgtctcagagaacgaggctgagctggctcccaatgccagcaaccacatggctgtcacccggagccggaaggagggcttggccagtgccaccaaggactgcagccacagggaggagaaggtcacggcagggtggccgtctgagcctggccagggtgaccttaacccagagagcccggcggccctggggcaggacctgctggagccgcgcagcaagaggcctgcccacccaatcctggccacagctgatggcgcctcccagctcgtggggatggagtgacagcctcagtccccctcagcacagacaaaagccagcagagcaaagcgtctatacttcatggggtttcctcagtgccctttggctgttgaggagtgagagagagagagagagagagagagagagagagagacaagcaggagcgtggctgctcgctcagtgccatagccttaccgcagcctgcgcgggaggccacagcccgtgccgattccagtgccttaactacttaccggatccctccatattatcatgggtgttgtatttttccaaaatgacttcttaaacaaaacaaatattataatgaattgtctggagaggacctcttcatttgagcattagcgttattttgtattggtgtgtgtgagcttgttcttgtgaatctgtgatagcaccgtttgttctgtgagctggaaacagaaggaaaaaacatacccttgggtacccatagccaataactggaagaaaatgatgtgaatttcatgtaaatgaccagaggaaagatggataagatgataatttcttaaatagacattttccttttttctttgtgcttcatggtggagctgtcatctggtccttggtattacaggatgtggttgatgaaggtttccaatatggtttcaggccaaaaccagggaagattctagcttcagcctcatgtccatttccagtctgtcagcattagacatggtcactgttcaagtttcaagacatccattcttaactatagagaagagttactcccctggcgtcttaacctatggaaaacatgcacggataggatatatttgattgcctcctcttccctttcagtatatgtattattaatattattattattattattattattagttcatcagtttgctgttctctgcagtgagcagaatcaaatgggcaatatttgtcctgggagacctgtgccgcacccaggtccccgtgttaacgtgtgcctgcggttgtggttggcaccctcgggtggtagctcttctactgtaatgagacaagcctttcttctgtcactgcagaatttagaaggggccgtgagcagtcttcccaagcatggtccaggagcagctcagagagggtggagtgaggatgcatgcatccagggaacaggcatcaagaagccagggccgtgcctggagcactgcagagatgactttggagaaagcaaagcagtgacccagtgaccaggcacattactcgtgagcgaggtattcccagtcttcctgctaagcctaatccaagccttacccagctgtgctactgtcatttgcaaagcaaggaaatactactactggtaataaaactacacatgcaagatgtcagataagaaataggtttatatttaccttcctgcgatgtggggttggtgcttgaagataaatgtgctgtttctagtttcttaaatagcccacacccctggatgcaaaaaggcagggttatttttacccatgagcatcctgtgcaggcaatagacttccctcactgtctccgcctgcagggaggagaatgtaccccactgcacctgagctcctggtccctcagccaagacctcaggggtccccagccagcctgctgctggggacccctgtgcttgctgcagtgtatggagcctcttgccttcccctggggaggcacccctgtaccccagcttccttcccctggccttttctggccccagtgctcctcctttacatagacttgttcacacagaaacgtgcacgcccccttttctccgccacttcaccagtttctgaaatccaacctcccagacttcacaggaagatagatattcttgagataatgaaaagtgatatcttcgcatacgaaaggaaaaaaggttgaggtatatatgatttttaactgtattaggggtgtatgaaccagtttaaaaacgaggttttatttactgtagagatgaatgcaaatcagaaccaatgatcccttggcctacttagttaaaaccagttcatacatcccttagggtttttattattattattattattattacagttgttattgttgtttttgttgttattattatttggggtttcttgtgttttttctttgcgactctccacactaaacttgcaatattgtggggagaagctgtgactaaactctacgctgcggtgagatgtagcagtaatcagctcccagcgacgtgtgtagctggggctgccgctcgcaataatcactattgatttaaagctttacttagccttgatctgtaccctcgtagtcaataaggtcttgccacattttattagtgaggtggagaaacgtattatttgtttgttgtttttgcccttcccccaccccccaatattaaactgtgaaatttgtgatttgtttaaactctgggtgaatcatagcttagtttgcatgtccagctaatttgtttctatacattttgtttgattctctttctccttctctcagggcttttacaaaaaaatatatatatatggatcttctgaaaagttttttgaggtgcaagttttttctcttgtttttttttttttttttctcattgattaatggacatgatgctgagattcaatcactacatgaaacacctggctgtgaaaacaaaacaacccagagggctgtgttccaagcagcgctggggaagctacgtaacagtcggatgccagttttggaagattcaccatgcgttctgaccctctgttcgtctctttcctctcctctttcttcaagaaggaaattgatcctagtgatttcagcccatgcattaaacaggaaacaataataaatttgtagaattcatatttttctaaagggaacttaaaaactgctgctacatgttatgtacaaaactggtttatgccacatgaacagagaatcacaagtttggttttggtactttttgttcctctttgtattcagttgtatagaacttccaaattcagaatgagaagaaagctgttctgtatcaaaccatttaagcaataaatgttatattttaaaagctgca

SEQ ID NO: 447274 - DNA, 8560 bp, Homo sapiens
  misc_feature (954)..(954): n is a, c, g, or t
  misc_feature (977)..(978): n is a, c, g, or t
  misc_feature (980)..(983): n is a, c, g, or t
  misc_feature (986)..(986): n is a, c, g, or t
  misc_feature (990)..(990): n is a, c, g, or t
  misc_feature (992)..(993): n is a, c, g, or t
  misc_feature (996)..(996): n is a, c, g, or t
  misc_feature (998)..(998): n is a, c, g, or t
  misc_feature (3937)..(3937): n is a, c, g, or t
  misc_feature (3939)..(3939): n is a, c, g, or t
ggagcctgagcatccttgcaagggactgaggcacagtgtgaaagagaatttgatgcatgggtataaatatgagctttagaaagtaaaattttactgcagagtccttttggctgttgggagtgtgcgtaacaggcagtactgtaggggttaagataaggttgagaaacagctgtagaatgtggttttggaagaaagaaaggcagacattgcctctcatttgtgctccttgcattgttgtgaatatagtggtctaagattatagcccataaatgatttcagttttttcttcactaagtgaaaagatgttcactttgggcctttgcttcccttccagtgtcaacgagtactaccaagagaagaagacaagaggtcaacacagactcattttctactccgtgtgaatgatagctacagcaggggaaagtttcatagtctatcagtgggtcagaaaatggagttttatagcagaggcttcttagaagcttaaacccctgtcccaatgacgtcaagttcgcccgctggcttggaaggttcagacctatcttccatcaacaccatgatgtcggcggtcatgagtgtagggaaggtcacagagaatggcgggagcccccaggggatcaagtccccctcgaagcctccaggaccaaatcggattggcagaaggaaccaggaaacgaaagaggagaagtcttcctataactgccccctgtgtgagaagatttgcactacccagcaccagctgaccatgcacattcgccagcacaacacagacactggaggagccgaccactcatgcagcatctgcggaaagtcactgagctcggccagctccctcgatcgccacatgctggtgcactctggcgagaggccttacaagtgcactgtgtgtggccagtcatttaccaccaatgggaacatgcacagacatatgaagatccatgagaaggaccctancagtgccacagccacagccccanntnnnnganacgnanncgntngtcctccaagaggaaactgagtcacgatgccgagtcagagagagaagacccagcaccagctaaaaagatggtagaagacgggcagtcaggtgacttggagaagaaagctgatgaagtctttcactgcccagtatgtttcaaggagtttgtttgcaagtatggactggagacccacatggagacccattcagataacccactaagatgtgacatttgttgtgtcacctttcgaacacatcgaggactgctgcgtcacaacgcgcttgtccacaaacaacttcccagggatgcaatgggcagacctttcatacagaacaacccttcaattcctgctggcttccacgacttaggattcacggacttctcctgtaggaagtttcctcgcatttctcaggcctggtgcgaaacaaacctgcggaggtgcatcagcgagcaacaccgttttgtctgcgacacctgtgacaaggcgttccccatgctctgctcactggctctgcacaagcagacccatgtggcggcagaccagggtcaagaaaagccgcaggccacgcccctgcctggtgacgccctggaccagaagggcttcctggccttgcttggcctgcagcacaccaaagacgtcaggcctgcccccgccgaggagcccctgccggatgacaaccaggcaattcagctccagacactcaagtgtcagctacctcaggaccccggctgcaccaacctgctgagcctgtcacctttcgaagctgcttccctaggcggttctctcacagttctccccgcgaccaaggacagcataaagcacctgtccctgcagcccttccagaagggcttcatcatccagcctgacagcagcattgtggtcaagcccatctctggcgagtcggccatcgagctggcagacatccagcaaattctgaagatggcagcctcggctccccctcagatcagtcttccgcccttctccaaggcccctgccgccccactgcaggcgatcttcaagcacatgccccctctgaagccaaagcccctggtcacaccacggacggtggtggccacctccacgcccccgcctctcatcaacgcccagcaggcttccccgggctgtatcagccccagcctgccgccaccgcccctgaagctcctcaaaggctcagtggaggcggcctccaacgcccacctgctgcagtccaagtccgggacccagccccacgcggccacgcggctctccctgcagcagccgcgggcggagctgccgggccagcctgagatgaagacgcagctggagcaggacagcatcatcgaggccctgctgccgctgagcatggaggccaagatcaagcaggagatcacagagggggaactcaaggccttcatgacagcgcccggcggcaagaagacgcccgccatgcgcaaggtgctctacccctgccgcttctgcaaccaggtgtttgccttctcgggggtcttgcgtgcccacgtgcgctcccacctgggcatctcgccataccagtgcaacatctgcgactacatcgccgccgacaaggccgcgctcatccgccacctgcgcacgcacagtggggagcggccctacatttgcaagatctgccactaccccttcactgtcaaagccaactgcgagcggcacctgcgcaagaagcacctcaaggccacccgcaaggatatcgagaagaacatcgagtatgtgagtagcagcgcggccgagctggtggacgccttctgcgccccggacaccgtgtgccggctgtgcggcgaggacctcaagcactatcgtgccctgcgcatccacatgcgcacgcactgcggccgcggcctgggcgggggccacaagggccgcaagcccttcgagtgcaaggagtgcagcgccgcgttcgcggccaagcgcaactgcatccaccacatcctcaagcagcacctgcacgtgcccgagcaggacatcgagagctacgtgctggccgccgacggcctgggccccgcagaggcgccggccgctgaggcgtcggggcgcggggaggacagtggctgcgctgcccttggtgactgcaagcccctcactgccttcctggaaccccagaacggctttcttcacaggggccccacccagcctccacctccccatgtctcgatcaagttggagcccgccagtagctttgcggtggacttcaatgagcccctggacttctcgcagaagggcctggccctggtccaagtgaagcaggaaaacatctcctttctgagcccttcttccctggtcccctatgactgctccatggagcccatcgacctgtccatccccaagaacttcaggaaaggggacaaggatttggccactcccagcgaagccaagaagcctgaggaggaggcggggagcagcgagcagccctctccctgcccagcacccggcccttctcttcctgtaactttggggcccagcggaatcctggaaagccccatggcccctgctccggcggccaccccggaacccccagcacagcccctgcagggccctgttcagctggcggtcccaatctactcctcagccctggtcagcagccctccactcgtgggcagctcagccctcctgagtggcacagccttgctgcgtccactgcggcccaagcccccgctgcttttgccaaagccccccgtgacagaagagctgcccccgctggcctccattgcccagatcatctcatctgtatcctcggcccccaccctgctgaaaaccaaggtggcggacccagggcccgcaagcactggcagtaacaccacggcttcagacagcttaggaggttctgtccccaaagccgccaccaccgccacccccgctgccaccaccagcccaaaagagtctagtgagcctcccgctccagccagcagcccagaggctgcctctcccaccgagcagggcccagcgngnacgtcgaagaagaggggccggaaaagggggatgaggagccgaccccgcgccaacagcggcggggtggacctggactccagcggggagtttgccagcatcgagaagatgctggccaccacagacaccaacaagttcagtccgtttctgcagacagcggaggacaacactcaggatgaggtggccggagcccctgccgaccaccatgggcccagtgatgaagagcagggcagtcccccagaagacaagctgctgagggccaagcggaactcgtacaccaactgcctgcagaagatcacctgtccccactgtccccgggttttcccttgggccagctccctacagaggcacatgctcacacacactgacagtcagtcggatgcggagactgcagccgccgcgggcgaagtgctagacctcacctcacgggacagagagcagccgtcggagggcgccactgagctccgccaggtcgcaggggatgcgcctgtggagcaggccacggcggaaacggcctcgccggtgcaccgggaagagcacgggcgtggggagagccatgagccggaggaggagcatggcactgaggagagcactggggacgccgacggcggaagaggacgcgtcgagcaaccagagcctggacctggacttcgccaccaagctcatggacttcaagctggcggagggcgacggcgaggcaggcccgggggcgcggcctcgcaggagcagaagctcgcctgcgacacctgtgggaagagcttcaagttcctgggcaccctgagccgccaccggaaggcgcacggccgccaggagcccaaggacgagaagggagatggcgccagcactgcagaggaggggccccagcccgcccctgaacaggaggagaagccccccgagaccccggcagaggtggtggagtcggccccgggtgccggggaggccccggcggaaaagctcgcggaggagacggagggcccctccgacggggagagcgcggccgagaaaaggtcctcagagaagagcgacgatgacaagaaaccaaagacagactcccccaaaagcgtggccagcaaggcagacaagaggaagaaggtctgcagcgtgtgcaacaagcggttctggtcgctgcaggacctgacccggcacatgcgctcccacacaggggaaaggccatacaaatgtcagacctgcgagcgaaccttcaccttgaagcacagcctggttcgccaccagcggatccaccagaaagccaggcatgccaaacaccacgggaaggacagcgacaaggaagagcggggtgaggaggacagcgagaatgagtccacccacagcggcaacaacgccgtctcagagaacgaggctgagctggctcccaatgccagcaaccacatggctgtcacccggagccggaaggagggcttggccagtgccaccaaggactgcagccacagggaggagaaggtcacggcagggtggccgtctgagcctggccagggtgaccttaacccagagagcccggcggccctggggcaggacctgctggagccgcgcagcaagaggcctgcccacccaatcctggccacagctgatggcgcctcccagctcgtggggatggagtgacagcctcagtccccctcagcacagacaaaagccagcagagcaaagcgtctatacttcatggggtttcctcagtgccctttggctgttgaggagtgagagagagagagagagagagagagagagagagagacaagcaggagcgtggctgctcgctcagtgccatagccttaccgcagcctgcgcgggaggccacagcccgtgccgattccagtgccttaactacttaccggatccctccatattatcatgggtgttgtatttttccaaaatgacttcttaaacaaaacaaatattataatgaattgtctggagaggacctcttcatttgagcattagcgttattttgtattggtgtgtgtgagcttgttcttgtgaatctgtgatagcaccgtttgttctgtgagctggaaacagaaggaaaaaacatacccttgggtacccatagccaataactggaagaaaatgatgtgaatttcatgtaaatgaccagaggaaagatggataagatgataatttcttaaatagacattttccttttttctttgtgcttcatggtggagctgtcatctggtccttggtattacaggatgtggttgatgaaggtttccaatatggtttcaggccaaaaccagggaagattctagcttcagcctcatgtccatttccagtctgtcagcattagacatggtcactgttcaagtttcaagacatccattcttaactatagagaagagttactcccctggcgtcttaacctatggaaaacatgcacggataggatatatttgattgcctcctcttccctttcagtatatgtattattaatattattattattattattattattagttcatcagtttgctgttctctgcagtgagcagaatcaaatgggcaatatttgtcctgggagacctgtgccgcacccaggtccccgtgttaacgtgtgcctgcggttgtggttggcaccctcgggtggtagctcttctactgtaatgagacaagcctttcttctgtcactgcagaatttagaaggggccgtgagcagtcttcccaagcatggtccaggagcagctcagagagggtggagtgaggatgcatgcatccagggaacaggcatcaagaagccagggccgtgcctggagcactgcagagatgactttggagaaagcaaagcagtgacccagtgaccaggcacattactcgtgagcgaggtattcccagtcttcctgctaagcctaatccaagccttacccagctgtgctactgtcatttgcaaagcaaggaaatactactactggtaataaaactacacatgcaagatgtcagataagaaataggtttatatttaccttcctgcgatgtggggttggtgcttgaagataaatgtgctgtttctagtttcttaaatagcccacacccctggatgcaaaaaggcagggttatttttacccatgagcatcctgtgcaggcaatagacttccctcactgtctccgcctgcagggaggagaatgtaccccactgcacctgagctcctggtccctcagccaagacctcaggggtccccagccagcctgctgctggggacccctgtgcttgctgcagtgtatggagcctcttgccttcccctggggaggcacccctgtaccccagcttccttcccctggccttttctggccccagtgctcctcctttacatagacttgttcacacagaaacgtgcacgcccccttttctccgccacttcaccagtttctgaaatccaacctcccagacttcacaggaagatagatattcttgagataatgaaaagtgatatcttcgcatacgaaaggaaaaaaggttgaggtatatatgatttttaactgtattaggggtgtatgaaccagtttaaaaacgaggttttatttactgtagagatgaatgcaaatcagaaccaatgatcccttggcctacttagttaaaaccagttcatacatcccttagggtttttattattattattattattattacagttgttattgttgtttttgttgttattattatttggggtttcttgtgttttttctttgcgactctccacactaaacttgcaatattgtggggagaagctgtgactaaactctacgctgcggtgagatgtagcagtaatcagctcccagcgacgtgtgtagctggggctgccgctcgcaataatcactattgatttaaagctttacttagccttgatctgtaccctcgtagtcaataaggtcttgccacattttattagtgaggtggagaaacgtattatttgtttgttgtttttgcccttcccccaccccccaatattaaactgtgaaatttgtgatttgtttaaactctgggtgaatcatagcttagtttgcatgtccagctaatttgtttctatacattttgtttgattctctttctccttctctcagggcttttacaaaaaaatatatatatatggatcttctgaaaagttttttgaggtgcaagttttttctcttgtttttttttttttttttctcattgattaatggacatgatgctgagattcaatcactacatgaaacacctggctgtgaaaacaaaacaacccagagggctgtgttccaagcagcgctggggaagctacgtaacagtcggatgccagttttggaagattcaccatgcgttctgaccctctgttcgtctctttcctctcctctttcttcaagaaggaaattgatcctagtgatttcagcccatgcattaaacaggaaacaataataaatttgtagaattcatatttttctaaagggaacttaaaaactgctgctacatgttatgtacaaaactggtttatgccacatgaacagagaatcacaagtttggttttggtactttttgttcctctttgtattcagttgtatagaacttccaaattcagaatgagaagaaagctgttctgtatcaaaccatttaagcaataaatgttatattttaaaagctgca

SEQ ID NO: 447275 - DNA, 6150 bp, Homo sapiens
  misc_feature (908)..(908): n is a, c, g, or t
  misc_feature (931)..(932): n is a, c, g, or t
  misc_feature (934)..(937): n is a, c, g, or t
  misc_feature (940)..(940): n is a, c, g, or t
  misc_feature (944)..(944): n is a, c, g, or t
  misc_feature (946)..(947): n is a, c, g, or t
  misc_feature (950)..(950): n is a, c, g, or t
  misc_feature (952)..(952): n is a, c, g, or t
  misc_feature (3891)..(3891): n is a, c, g, or t
  misc_feature (3893)..(3893): n is a, c, g, or t
cgggatggcaactgcggtcaccctgctaaagtcggggcggggcggcggtcctccccctcaccccccccagtccgagcgccgccgccgccgccgccgccgccgccggccgctcagtaacacgtccccaggagactcgcaggagcaacacgtgatgtgtctacttatcagggttgctccgactgtgtgttccaggagtggtggctctgaggtgtgaccctgcccacgtttgggcccagccaggttcagccccccaataaggagggcagcttgataacacaaagaaaacagtgtcaacgagtactaccaagagaagaagacaagaggtcaacacagactcattttctactccgtgtgaatgatagctacagcaggggaaagtttcatagtctatcagtgggtcagaaaatggagttttatagcagaggcttcttagaagcttaaacccctgtcccaatgacgtcaagttcgcccgctggcttggaaggttcagacctatcttccatcaacaccatgatgtcggcggtcatgagtgtagggaaggtcacagagaatggcgggagcccccaggggatcaagtccccctcgaagcctccaggaccaaatcggattggcagaaggaaccaggaaacgaaagaggagaagtcttcctataactgccccctgtgtgagaagatttgcactacccagcaccagctgaccatgcacattcgccagcacaacacagacactggaggagccgaccactcatgcagcatctgcggaaagtcactgagctcggccagctccctcgatcgccacatgctggtgcactctggcgagaggccttacaagtgcactgtgtgtggccagtcatttaccaccaatgggaacatgcacagacatatgaagatccatgagaaggaccctancagtgccacagccacagccccanntnnnnganacgnanncgntngtcctccaagaggaaactgagtcacgatgccgagtcagagagagaagacccagcaccagctaaaaagatggtagaagacgggcagtcaggtgacttggagaagaaagctgatgaagtctttcactgcccagtatgtttcaaggagtttgtttgcaagtatggactggagacccacatggagacccattcagataacccactaagatgtgacatttgttgtgtcacctttcgaacacatcgaggactgctgcgtcacaacgcgcttgtccacaaacaacttcccagggatgcaatgggcagacctttcatacagaacaacccttcaattcctgctggcttccacgacttaggattcacggacttctcctgtaggaagtttcctcgcatttctcaggcctggtgcgaaacaaacctgcggaggtgcatcagcgagcaacaccgttttgtctgcgacacctgtgacaaggcgttccccatgctctgctcactggctctgcacaagcagacccatgtggcggcagaccagggtcaagaaaagccgcaggccacgcccctgcctggtgacgccctggaccagaagggcttcctggccttgcttggcctgcagcacaccaaagacgtcaggcctgcccccgccgaggagcccctgccggatgacaaccaggcaattcagctccagacactcaagtgtcagctacctcaggaccccggctgcaccaacctgctgagcctgtcacctttcgaagctgcttccctaggcggttctctcacagttctccccgcgaccaaggacagcataaagcacctgtccctgcagcccttccagaagggcttcatcatccagcctgacagcagcattgtggtcaagcccatctctggcgagtcggccatcgagctggcagacatccagcaaattctgaagatggcagcctcggctccccctcagatcagtcttccgcccttctccaaggcccctgccgccccactgcaggcgatcttcaagcacatgccccctctgaagccaaagcccctggtcacaccacggacggtggtggccacctccacgcccccgcctctcatcaacgcccagcaggcttccccgggctgtatcagccccagcctgccgccaccgcccctgaagctcctcaaaggctcagtggaggcggcctccaacgcccacctgctgcagtccaagtccgggacccagccccacgcggccacgcggctctccctgcagcagccgcgggcggagctgccgggccagcctgagatgaagacgcagctggagcaggacagcatcatcgaggccctgctgccgctgagcatggaggccaagatcaagcaggagatcacagagggggaactcaaggccttcatgacagcgcccggcggcaagaagacgcccgccatgcgcaaggtgctctacccctgccgcttctgcaaccaggtgtttgccttctcgggggtcttgcgtgcccacgtgcgctcccacctgggcatctcgccataccagtgcaacatctgcgactacatcgccgccgacaaggccgcgctcatccgccacctgcgcacgcacagtggggagcggccctacatttgcaagatctgccactaccccttcactgtcaaagccaactgcgagcggcacctgcgcaagaagcacctcaaggccacccgcaaggatatcgagaagaacatcgagtatgtgagtagcagcgcggccgagctggtggacgccttctgcgccccggacaccgtgtgccggctgtgcggcgaggacctcaagcactatcgtgccctgcgcatccacatgcgcacgcactgcggccgcggcctgggcgggggccacaagggccgcaagcccttcgagtgcaaggagtgcagcgccgcgttcgcggccaagcgcaactgcatccaccacatcctcaagcagcacctgcacgtgcccgagcaggacatcgagagctacgtgctggccgccgacggcctgggccccgcagaggcgccggccgctgaggcgtcggggcgcggggaggacagtggctgcgctgcccttggtgactgcaagcccctcactgccttcctggaaccccagaacggctttcttcacaggggccccacccagcctccacctccccatgtctcgatcaagttggagcccgccagtagctttgcggtggacttcaatgagcccctggacttctcgcagaagggcctggccctggtccaagtgaagcaggaaaacatctcctttctgagcccttcttccctggtcccctatgactgctccatggagcccatcgacctgtccatccccaagaacttcaggaaaggggacaaggatttggccactcccagcgaagccaagaagcctgaggaggaggcggggagcagcgagcagccctctccctgcccagcacccggcccttctcttcctgtaactttggggcccagcggaatcctggaaagccccatggcccctgctccggcggccaccccggaacccccagcacagcccctgcagggccctgttcagctggcggtcccaatctactcctcagccctggtcagcagccctccactcgtgggcagctcagccctcctgagtggcacagccttgctgcgtccactgcggcccaagcccccgctgcttttgccaaagccccccgtgacagaagagctgcccccgctggcctccattgcccagatcatctcatctgtatcctcggcccccaccctgctgaaaaccaaggtggcggacccagggcccgcaagcactggcagtaacaccacggcttcagacagcttaggaggttctgtccccaaagccgccaccaccgccacccccgctgccaccaccagcccaaaagagtctagtgagcctcccgctccagccagcagcccagaggctgcctctcccaccgagcagggcccagcgngnacgtcgaagaagaggggccggaaaagggggatgaggagccgaccccgcgccaacagcggcggggtggacctggactccagcggggagtttgccagcatcgagaagatgctggccaccacagacaccaacaagttcagtccgtttctgcagacagcggaggacaacactcaggatgaggtggccggagcccctgccgaccaccatgggcccagtgatgaagagcagggcagtcccccagaagacaagctgctgagggccaagcggaactcgtacaccaactgcctgcagaagatcacctgtccccactgtccccgggttttcccttgggccagctccctacagaggcacatgctcacacacactgacagtcagtcggatgcggagactgcagccgccgcgggcgaagtgctagacctcacctcacgggacagagagcagccgtcggagggcgccactgagctccgccaggtcgcaggggatgcgcctgtggagcaggccacggcggaaacggcctcgccggtgcaccgggaagagcacgggcgtggggagagccatgagccggaggaggagcatggcactgaggagagcactggggacgccgacggcggaagaggacgcgtcgagcaaccagagcctggacctggacttcgccaccaagctcatggacttcaagctggcggagggcgacggcgaggcaggcccgggggcgcggcctcgcaggagcagaagctcgcctgcgacacctgtgggaagagcttcaagttcctgggcaccctgagccgccaccggaaggcgcacggccgccaggagcccaaggacgagaagggagatggcgccagcactgcagaggaggggccccagcccgcccctgaacaggaggagaagccccccgagaccccggcagaggtggtggagtcggccccgggtgccggggaggccccggcggaaaagctcgcggaggagacggagggcccctccgacggggagagcgcggccgagaaaaggtcctcagagaagagcgacgatgacaagaaaccaaagacagactcccccaaaagcgtggccagcaaggcagacaagaggaagaaggtctgcagcgtgtgcaacaagcggttctggtcgctgcaggacctgacccggcacatgcgctcccacacaggggaaaggccatacaaatgtcagacctgcgagcgaaccttcaccttgaagcacagcctggttcgccaccagcggatccaccagaaagccaggcatgccaaacaccacgggaaggacagcgacaaggaagagcggggtgaggaggacagcgagaatgagtccacccacagcggcaacaacgccgtctcagagaacgaggctgagctggctcccaatgccagcaaccacatggctgtcacccggagccggaaggagggcttggccagtgccaccaaggactgcagccacagggaggagaaggtcacggcagggtggccgtctgagcctggccagggtgaccttaacccagagagcccggcggccctggggcaggacctgctggagccgcgcagcaagaggcctgcccacccaatcctggccacagctgatggcgcctcccagctcgtggggatggagtgacagcctcagtccccctcagcacagacaaaagccagcagagcaaagcgtctatacttcatggggtttcctcagtgccctttggctgttgaggagtgagagagagagagagagagagagagagagagagagacaagcaggagcgtggctgctcgctcagtgccatagccttaccgcagcctgcgcgggaggccacagcccgtgccgattccagtgccttaactacttaccggatccctccatattatcatgggtgttgtatttttccaaaatgacttcttaaacaaaacaaatattataatgaattgtctggagaggacctcttcatttgagcattagcgttattttgtattggtgtgtgtgagcttgttcttgtgaatctgtgatagcaccgtttgttctgtgagctggaaacagaaggaaaaaacatacccttgggtacccatagccaataactggaagaaaatgatgtgaatttcatgtaaatgaccagaggaaagatggataagatgataatttcttaaatagaaggtaagttcgggtcatgggtagagcagtatgaacaaagttcccaagattggagggatcggtaggaggctttatgggaaaggaatttgaaaagacaaagggacacaccgggtac

SEQ ID NO: 447276 - DNA, 475 bp, Homo sapiens
gctgggactagaggcatgagccaacacacctggctaatttttttttattttttgtagagatacgggatcttgctatattgcccaggctgggaactctttatgttatggggaaaggctgtgtactgggataaatgtacaacaaatactttgtgcatctccgtttagtgattattttttcaatcttcacatgtgttcccttgcttttaccggtgggttctatataggcctggtgcgaaacaaacctgcggaggtgcatcagcgagcaacaccgttttgtctgcgacacctgtgacaaggcgttccccatgctctgctcactggctctgcacaagcagacccatgtggcggcagaccagggtcaagaaaagccgcaggccacgcccctgcctggtgacgccctggaccagaagggcttcctggccttgcttggcctgcagcacaccaaagacgtcaggcctgcccccgccgaggagcc

SEQ ID NO: 447277 - DNA, 1933 bp, Homo sapiens
ataaaaggaggtctgcacagcctctcttaaaacaacatgccacagttaaaacttacttcagtttggacaactactcacagctactacacagagacccgaacgagtcactgatatacacctggaccaccaccaatggatatacaaatggcaaacaattttactccgccctctgcaactcctcagggaaatgactgtgacctctatgcacatcacagcacggccaggatagtaatgcctctgcattacagcctcgtcttcatcattgggctcgtgggaaacttactagccttggtcgtcattgttcaaaacaggaaaaaaatcaactctaccaccctctattcaacaaatttggtgatttctgatatactttttaccaccgctttgcctacacgaatagcctactatgcaatgggctttgactggagaatcggagatgccttgtgtaggataactgcgctagtgttttacatcaacacatatgcaggtgtgaactttatgacctgcctgagtattgaccgcttcattgctgtggtgcaccctctacgctacaacaagataaaaaggattgaacatgcaaaaggcgtgtgcatatttgtctggattctagtatttgctcagacactcccactcctcatcaaccctatgtcaaagcaggaggctgaaaggattacatgcatggagtatccaaactttgaagaaactaaatctcttccctggattctgcttggggcatgtttcataggatatgtacttccacttataatcattctcatctgctattctcagatctgctgcaaactcttcagaactgccaaacaaaacccactcactgagaaatctggtgtaaacaaaaaggctctcaacacaattattcttattattgttgtgtttgttctctgtttcacaccttaccatgttgcaattattcaacatatgattaagaagcttcgtttctctaatttcctggaatgtagccaaagacattcgttccagatttctctgcactttacagtatgcctgatgaacttcaattgctgcatggacccttttatctacttctttgcatgtaaagggtataagagaaaggttatgaggatgctgaaacggcaagtcagtgtatcgatttctagtgctgtgaagtcagcccctgaagaaaattcacgtgaaatgacagaaacgcagatgatgatacattccaagtcttcaaatggaaagtgaaatggattgtattttggtttatagtgacgtaaactgtatgacaaactttgcaggacttcccttataaagcaaaataattgttcagcttccaattagtattcttttatatttctttcattgggcactttcccatctccaactcggaagtaagcccaagagaacaacataaagcaaacaacataaagcacaataaaaatgcaaataaatatttcatttttatttgtaaacgaatacaccaaaaggaggcgctcttaataactcccaatgtaaaaagttttgttttaataaaaaatttaattattatttcttgccaacaaatggctagaaaggactgaatagattatatattgccagatgttaatactgtaacatactttttaaataacatatttcttaaatccaaatttctctcaatgttagatttaattccctcaataacaccaatgttttgttttgtttcgttctgggtcataaaactttgttaaggaactcttttggaataaagagcaggatgctgcaaagttatgagtctgtccctcaatgctccctgtcaactatcagtgggagtgtcagggaaaagataattggcaatagactttgaactgcaacattataaatgatgatgatgatgactgaggcaatgaaagcactgagcttttcctggagctgccagcacagtcttttagggcctctgcttagcaatatgaaaaagact

SEQ ID NO: 447278 - DNA, 1743 bp, Homo sapiens
ataaaaggaggtctgcacagcctctcttaaaacaacatgccacagttaaaacttacttcagtttggacaactactcacagctactacacagagacccgaacgagtcactgatatacacctggaccaccaccaatggatatacaaatggcaaacaattttactccgccctctgcaactcctcagggaaatgactgtgacctctatgcacatcacagcacggccaggatagtaatgcctctgcattacagcctcgtcttcatcattgggctcgtgggaaacttactagccttggtcgtcattgttcaaaacaggaaaaaaatcaactctaccaccctctattcaacaaatttggtgatttctgatatactttttaccaccgctttgcctacacgaatagcctactatgcaatgggctttgactggagaatcggagatgccttgtgtaggataactgcgctagtgttttacatcaacacatatgcaggtgtgaactttatgacctgcctgagtattgaccgcttcattgctgtggtgcaccctctacgctacaacaagataaaaaggattgaacatgcaaaaggcgtgtgcatatttgtctggattctagtatttgctcagacactcccactcctcatcaaccctatgtcaaagcaggaggctgaaaggattacatgcatggagtatccaaactttgaagaaactaaatctcttccctggattctgcttggggcatgtttcataggatatgtacttccacttataatcattctcatctgctattctcagatctgctgcaaactcttcagaactgccaaacaaaacccactcactgagaaatctggtgtaaacaaaaaggctctcaacacaattattcttattattgttgtgtttgttctctgtttcacaccttaccatgttgcaattattcaacatatgattaagaagcttcgtttctctaatttcctggaatgtagccaaagacattcgttccagatttctctgcactttacagtatgcctgatgaacttcaattgctgcatggacccttttatctacttctttgcatgtaaagggtataagagaaaggttatgaggatgctgaaacggcaagtcagtgtatcgatttctagtgctgtgaagtcagcccctgaagaaaattcacgtgaaatgacagaaacgcagatgatgatacattccaagtcttcaaatggaaagtgaaatggattgtattttggtttatagtgacgtaaactgtatgacaaactttgcaggacttcccttataaagcaaaataattgttcagcttccaattagtattcttttatatttctttcattgggcactttcccatctccaactcggaagtaagcccaagagaacaacataaagcaaacaacataaagcacaataaaaatgcaaataaatatttcatttttatttgtaaacgaatacaccaaaaggaggcgctcttaataactcccaatgtaaaaagttttgttttaataaaaaatttaattattatttcttgccaacaaatggctagaaaggactgaatagattatatattgccagatgttaatactgtaacatactttttaaataacatatttcttaaatccaaatttctctcaatgttagatttaattccctcaataacaccaatgttttgttttgtttcgttctgggtcataaaactttgttaaggaactcttttggaataaagagcaggatgctgcaaagtta

SEQ ID NO: 447279 - DNA, 885 bp, Homo sapiens
ataaaaggaggtctgcacagcctctcttaaaacaacatgccacagttaaaacttacttcagtttggacaactactcacagctactacacagagacccgaacgagtcactgatatacacctggaccaccaccaatggatatacaaatggcaaacaattttactccgccctctgcaactcctcagggaaatgactgtgacctctatgcacatcacagcacggccaggatagtaatgcctctgcattacagcctcgtcttcatcattgggctcgtgggaaacttactagccttggtcgtcattgttcaaaacaggaaaaaaatcaactctaccaccctctattcaacaaatttggtgatttctgatatactttttaccaccgctttgcctacacgaatagcctactatgcaatgggctttgactggagaatcggagatgccttgtgtaggataactgcgctagtgttttacatcaacacatatgcaggtgtgaactttatgacctgcctgagtattgaccgcttcattgctgtggtgcaccctctacgctacaacaagataaaaaggattgaacatgcaaaaggcgtgtgcatatttgtctggattctagtatttgctcagacactcccactcctcatcaaccctatgtcaaagcaggaggctgaaaggattacatgcatggagtatccaaactttgaagaaactaaatctcttccctggattctgcttggggcatgtttcataggatatgtacttccacttataatcattctcatctgctattctcagatctgctgcaaactcttcagaactgccaaacaaaacccacggcatcaccagtattagaggcaccgcctgcccagtgacacattttacgcccgtacccta

SEQ ID NO: 447280 - DNA, 749 bp, Homo sapiens
tggggttcgaaccagcaagacaagcgggcatggccacagcagcgcgaggcgggcacggggtattgtccggctccggcggcggcggtcggtgctgcgagagcggcggcggcggcgcgggtcggcagcgggagggcgcgcggccgagcggaggcggagtcggcgccgagaacatggctggaggcaaagctggaaaggacagtgggaaggccaaggctaaggcagtatctcgctcacagagagctgggctacagtttcctgtgggccgcatccacagacacttgaagactcgcaccacaagccatggaagggtgggtgccactgctgccgtgtacagtgctgcgattctggagtacctcactgcagaggtgctggagctggcaggtaatgcttctaaggatctcaaagtaaagcgtatcactccgcgtcacttgcagcttgcaatccgtggtgatgaagagttggattctcttatcaaggctaccatagctgggggtggtgtgatccctcacatccacaaatctctgattggaaagaagggacagcagaaaactgcttagagggatgctttaaccaaccctcttcctccccgtcattgtactgtaactgggacagaagaaataatggggatatgtggaatttttaacaacagttaaatggaaaagcatagacaattactgtagacatgataaaagaaacatttgtatgttcttagactcgaagtttgataaaagtaccttttcatgtggtga

SEQ ID NO: 447281 - DNA, 7353 bp, Homo sapiens
  misc_feature (2932)..(2932): n is a, c, g, or t
tggggttcgaaccagcaagacaagcgggcatggccacagcagcgcgaggcgggcacggggtattgtccggctccggcggcggcggtcggtgctgcgagagcggcggcggcggcgcgggtcggcagcgggagggcgcgcggccgagcggaggcggagtcggcgccgagaacatggctggaggcaaagctggaaaggacagtgggaaggccaaggctaaggcagtatctcgctcacagagagctgggctacagtttcctgtgggccgcatccacagacacttgaagactcgcaccacaagccatggaagggtgggtgccactgctgccgtgtacagtgctgcgattctggagtacctcactgcagaggtgctggagctggcaggtaatgcttctaaggatctcaaagtaaagcgtatcactccgcgtcacttgcagcttgcaatccgtggtgatgaagagttggattctcttatcaaggctaccatagctgggggtggtgtgatccctcacatccacaaatctctgattggaaagaagggacagcagaaaactgcttagagggatgctttaaccaaccctcttcctccccgtcattgtactgtaactgggacagaagaaataatggggatatgtggaatttttaacaacagttaaatggaaaagcatagacaattactgtagacatgataaaagaaacatttgtatgttcttagactcgaagtttgataaaagtaccttttcatgtggtgacagttgtgtgttgattggctaggtttctcccgtgtgttttatacaaaaatggaattgataaaccattttttacaaaattaatttgtctcaaaactgttctgttcatgatgtattagaaatattttactcagactttaaatattttaaatctcagattggttattcagagtaaccttagaacagaaattgggaatatatctttacaatgattgataccatggtatattgactcttagatgctattgatctgtagcaccattttttacaaacgactaaggaaaaaacctgccaattaaatcatgatatgccatcaattatgagacatcccaatttgagagatgttagattatagaaaagtatgcatttatgactgaaatggtagtggaattatttgaattctacaccaagcacttaccatgtgccaggccctttgcagagtgctctactgaccaagaaagttgttcctgccacattatagatgtggagcctaagggtcacagaaattgtgtgctatgccaaaaaacattgaactggtagatagaaaatgacagagctaggattcaaacctagatctggctgactccagagcctagttttacctggaattgatgttcagtttatcaaaggtttctccttttggtttaaaatcccaatttttggcctggcattgtggtttacgcctgtaatcccaacatgctgggattataggcataagccaccatgccctgccctaagtaactgttacttgagttaatgtactagttaattgacccttagaaaattatatttttctgcttgcaagtcttcattaaagaaggaaattttaaaatattttatagtataatgctatccaaactcatttttaaaaacattttattatggaaattttcacaaatgcacaaaaagaatagcagaatgaagctctgtgtacccatcctccaacagctgtcctgtggtcagtcttgtttacctgcatccccacctatcccctgccccaacccacagggatcagtttgagtcccattaacaggcatagtattttcatgtttgtgtgatcagagacattcaaatataactccaaagatagggtacttttttgaacataaccacaataccattgtgtaagactgctaaaacattttttgatgccaagtaccagtcaatattcaaacttcctgattgtctcgtaagttttttttaacagttggtttattcgagtcaagatccaggcaagatctagatcttgcattttgttaatataatctatagatttaactttcctgtttttaatttttgaagaaactaagttgtttgtcctatagaattgtccttcagtggattttactgaatgtatcctaatgggatcatgtacaccttttctgtcccctatatgttctataaactgacagatctagagggcttctgttgttctgttttgctttttcacaaaaataattcataggtgatatatgctccatgttgtatcacatcatggcacataatggctctcatcttgtaacattaagattgatagtgggtttggatgctgccagcccactccattcattacaaaagttctctatcagcttttcccctgatggatttagccatcattaatgatatttgcccacatctgggattccattagaggttgccaaccagtgatatcttgtcattccttctgcatctattagctggaatcctataaagaacttgtgctcattaattcacgaggcaggataaaatagaaatttcaaattctgattgaataggcgcccattttgaagtttctgtattgagagtcaggcctacagtaaaagtagcaatagaaagctgattgtttgaaaaaaaagaagcgggggggggagtgcaatataatcaacagactttcctttggctgaatcacttgattcagggcaatttttactacagttttatagataattgcttcaaatgtctaattcattttgatagtatagttacttgactacataatttcttcccagggttgtattttcaatttgttttctaacaaaaaacatagaaatagaacaactaggtcatgtactctgggcttagctctcacagttatgatcagtctcgtttcatttgtacccaaccccttgagttattttaaagcacgttccagctatcatatcacttcatgtataatatcttaatangtatctaaaagatagcttttttatgttttattttatttttattttttcagacaaagtattactctgtcgcccaggctggcatgcagtggcacaatctcagctcactgcaacctccacctcccaggttcaagtgattcttctgcctcagcctcctgagtagctggcattacaggtgcctgccaccatgcctggctaatgtttgtttgttcttttgtttttgtttctgagacaggatctcactctgttgcctaggctggagtccaatagcctaatcttggctcactgcaacctcagcctcccaggcaactgggactacaggcatgcgccaccatgcccagctaatctgtgtgtgttttttgtttgtttgtttatttgtgtagtagagatggggtttcaccatgttggccaggctggtctcaaactcctgacctcaagtgatccacccgcctcagcctcccaaagtgctgggattacaggcatgagccactgtgcctggcgtagaaagtatttcttataattaaaaacaacacccagtctaactagtataacacctaaaaaattgtcagatctgtattttagatagtacgacacagtgaaatgcaatggcacttaagcagagagaagaaggatttttctttttctttttttaaatagaaggtgttagaacctgaactgggcctggtttgcatttgggaagagtccagtggggaaacaacacaaataaggtcttgagaatgaagaattgcatttatatagggagttgtaacaaatggcctggagagtatctgactctttatgaaacatttaatgagaaatgtgacttgctttggtgcctatggttgaatttgttgcgatgcttctgacattatgaaaattttcaaacatgcaaaaaagttccagtagttatccagtgaattcttatactcaccacctatatctatagttaacattttacttgtattttatccagttatcagctcatctatgagatggcccttatttatttgcctgctgtttttattctctatttgtcctgttatttcttgttagagaagagaaggtgttcttagatcagaagatgccattgtattaggtgacggcaaggttttgctgatttagtggaacaagattctactgggatgtgtgctgagctgaaccaaggaactgcccgaatgtgctgaacaaggacatttgcttctcagatacgtgaattcaattttaagcaagattcttgatctgcttcagagcagctttgatttaaagtaatttcagagcacttttccttgcatgagtaattttctgaatgtataaaatattctatttatgtttgaccttttggataaactgtgttgctgcagtgttggtccacactaccatcctaagtgaagacttagtaagtctgaggatctccaggcactggaaagagtgagaacctgggagtgaaagggttatagttagtgttcatttttcgggttttgtttcatagggagtcctgagtggggtaacctgaaatgttttaacagttgaagatcatcccattcctatccccagtaaaaataggcctttccacaatcttctaccagttaacttagcttttttttttttttttccttaatagagtctcattcttgtcacccagactggagtgcgatggcacgatcttggctcactgcaaccctccctcccgggttccagcgattctcctgcctcagcctcccaagtagctgggattacaggcgcacgccaccatgcccagctaatttttgtatttttagtagacgtggggtttcaccatgttggccagactggtctcaaactcctgacctcaggcgatccgcccgtctaagccttccaaagtgctgggattactggcaggaaccaccaggcccagccaaccagcatttcttaaggtgaaaatacatggtgttaatttatattttgagtgagacccagtccagctgctataactgcttggacacttggcagaggacagagtactgcaaaagtgtctaagggagacagcattttgccttgggtgctgtagatgtacaagagaggttccaggagggggtgataggcagaattttggtccccatcaccttccctgcccagtgttatgcctatgaatgtgttacattatgtggtaaaagggactttgcagatgtaactaaaatttctaaaatagagatattatcctggattacctgggggaacccagtgtaattacatgaacccttaaaaatggaagaggatgcaggagtcagattcaaaggaaggcccaaggtgctattgctgacttgaagatagaggggccatgtggaaatcaagagaaggaagtgaatccttccagtgagcttggaagagagcaccttgaggcacagatgagaagcttggccttacctgatgccttgattttagcctggtgagaccccgagcatataaatttgctgtgctatgccacacttctcacctacagaaacttagtttaaagccactaagtttgtggtaatttgttggctttaggcccctgagggtagagatttatggcttgtgttacaagtagagagcagtggagagttgggctttgtaattctttcaagggtgattgtagttctggagtcctatctacctgggttcagatctttgttggccagtccctggctgtgtgacttcactgctttaagcctctgtcttcatccttaaagtggcgatgatagtacctacctcactctgatctctgaatgagaacacatgtaagacacttagcacagttcctggtgctcaaagagttccaacacctgaaagcaccatggccctgtttgtttttcagtcaagatttctaaaagccgttattaccagaggttcagtgagaacatgggcagggtaaactcaaaatggagaacataaaaactgggactcccagaccagtcacttagaagactgctgcaggaagtaccaaggtcgttaagaatcagtaataataataagtaatgtgtgaatccattagaatgttgagaagtagacctttgacatttcagaaaaatgtatatctcagacacagccatatgtattgttatccctgagttggaagagcatcacagggcatagtttcacaaaagcttcaaaaaatatactaattgctggtaatatgtgaactaacagaaaaaaatagccatgttaaaataggagtgcctgacaattagctctattcatcttgtctcctagctgtaagcaccctagattcaaattatgcacctagaaaactaaattactatgtatgttataggcctttgaaatggatacatgaaaattagtgaaatcagaatgaacgtttcgcctgccaaagatatgtatttttataagtgatacaagggccccatgagctccatggccacatctgtacaaaacaggccctcctttcaggaactggtctcgagagagcaaaggggtcaactccctaaatggcagctgagacagtcctccctggtggcatggccctgtttcctgttgatatggtgatagttggagagtcaaatttttaccagaatttgtgaatatcatctctggttaatgattacacaaaaccttttaaaattttaaaaaattatttctaattctataaataaactctgcagttgtacagccactgtacagctaacatctcaacactggaaatgaggctggtttcttccagtttggctcagattcttcagggaagcccagttaagacaaacagctctctatactcaatccttactttgctgagaagatacaggcctgcccactcgctcccacctgctcttcatgaggagtcctttattcctgcatgtttcctgttctttgggacctttaggagctaacctccacagatgctgatagtctgtagagtcaggaataccatgtaacatgttgaagtagactaaagattagttctttggcaatagcccagtctggacttactatgtacttttgaaaataaaactgcttatttgtaaactctgtaattaggaccttttgctatttgagttatattcctttctaacttcaaacgtctgcattcatgtataatagccattttatgcacagatgaggtgattcccacacttcttttcgcagatgtttcattatctggatgagtgtattacataataaatttgaataatggtagtcttccaaatgacaaaaagcaagctagttgatttgtcaattttgagtttaaatgttttgactgcttatcagcaaaaaaaatcaaagaatagcatactaatattaatggaaatgcagagtatatttaattggcatgattttttcatggatgtgtgcttcatttgatctattgtatgtagctcgtgatcacattttctgttggttaacattgttcctagcttatatgatggaattaaatatattctgtgtaaaaa

SEQ ID NO: 447282 - DNA, 8299 bp, Homo sapiens
  misc_feature (4)..(4): n is a, c, g, or t
  misc_feature (101)..(101): n is a, c, g, or t
  misc_feature (2015)..(2015): n is a, c, g, or t
  misc_feature (2172)..(2172): n is a, c, g, or t
  misc_feature (2180)..(2180): n is a, c, g, or t
  misc_feature (2218)..(2218): n is a, c, g, or t
  misc_feature (2270)..(2270): n is a, c, g, or t
  misc_feature (2272)..(2272): n is a, c, g, or t
  misc_feature (3878)..(3878): n is a, c, g, or t
tgtnagggaggtttcttcgtggccgcagttctcggggcggattccgaggaggcaggggcaatgggaccacccgtcgcaaccccacttcccacagggccggnactggcagggtgtgagggtgcagccaaaggctcctactgaagtggcgcgggtcggcagcgggagggcgcgcggccgagcggaggcggagtcggcgccgagaacatggctggaggcaaagctggaaaggacagtgggaaggccaaggctaaggcagtatctcgctcacagagagctgggctacagtttcctgtgggccgcatccacagacacttgaagactcgcaccacaagccatggaagggtgggtgccactgctgccgtgtacagtgctgcgattctggagtacctcactgcagaggtgctggagctggcaggtaatgcttctaaggatctcaaagtaaagcgtatcactccgcgtcacttgcagcttgcaatccgtggtgatgaagagttggattctcttatcaaggctaccatagctgggggtggtgtgatccctcacatccacaaatctctgattggaaagaagggacagcagaaaactgcttagagggatgctttaaccaaccctcttcctccccgtcattgtactgtaactgggacagaagaaataatggggatatgtggaatttttaacaacagttaaatggaaaagcatagacaattactgtagacatgataaaagaaacatttgtatgttcttagactcgaagtttgataaaagtaccttttcatgtggtgacagttgtgtgttgattggctaggtttctcccgtgtgttttatacaaaaatggaattgataaaccattttttacaaaattaatttgtctcaaaactgttctgttcatgatgtattagaaatattttactcagactttaaatattttaaatctcagattggttattcagagtaaccttagaacagaaattgggaatatatctttacaatgattgataccatggtatattgactcttagatgctattgatctgtagcaccattttttacaaacgactaaggaaaaaacctgccaattaaatcatgatatgccatcaattatgagacatcccaatttgagagatgttagattatagaaaagtatgcatttatgactgaaatggtagtggaattatttgaattctacaccaagcacttaccatgtgccaggccctttgcagagtgctctactgaccaagaaagttgttcctgccacattatagatgtggagcctaagggtcacagaaattgtgtgctatgccaaaaaacattgaactggtagatagaaaatgacagagctaggattcaaacctagatctggctgactccagagcctagttttacctggaattgatgttcagtttatcaaaggtttctccttttggtttaaaatcccaatttttggcctggcattgtggtttacgcctgtaatcccaacacttcgggagaccgaggctggtggaacacttgaggtcaggagtttgagaccagcctggccaacatggtaaaacgccgtctcggccaggcgcggtggctcacgcctgtaatcccagcactttgggaggccaaggtgggtgaatcacgaggtcaggaaatcgagaccatcctggctaacatggtgaaaccccgtctctatttaaaaaaatacaaaaaattggccgggtgtggtggcacgcgcctgtggtcccagctactcaggaggctgaggcatgagaatgacgtgaacccgggaggcggagcttgcagtgagccaagatggcgccactgcactccagcttggcgactgagcaagactccctctcaaaacaaacaaaaaaaagtctctactaaaaatacagaaattagccaggcatggtacacacatgttgtcccaactacttggggcactggggcacaaaaaatcacttgaacccaggaggcagaggttgcagtgagccaagatcacgccactacactccagcctaggtgacagagtgngactctgtctcaaaaaaaaaaatcccaacttttagtagtctcttagtcatgcaataacagtaatttgtacaatcttttaaaaattatatttatttatcagtttctaagaaacttttttgtttgttttgagacaggctcttgctcttttgcccaggtngaagtgcngtggcatgatcctggctcactgcagcctccacctctcnggcccaagcaatcctcttacctcagccctgcaaatagctgggaccacaggcncntgccaccatacctggctaattttttttatttatgtaagagacagaggtctccctatgttgcccaggttggtattgaactcctggctcaagccatcctcccaccttggcctcccaaagtgctgggattataggcataagccaccatgccctgccctaagtaactgttacttgagttaatgtactagttaattgacccttagaaaattatatttttctgcttgcaagtcttcattaaagaaggaaattttaaaatattttatagtataatgctatccaaactcatttttaaaaacattttattatggaaattttcacaaatgcacaaaaagaatagcagaatgaagctctgtgtacccatcctccaacagctgtcctgtggtcagtcttgtttacctgcatccccacctatcccctgccccaacccacagggatcagtttgagtcccattaacaggcatagtattttcatgtttgtgtgatcagagacattcaaatataactccaaagatagggtacttttttgaacataaccacaataccattgtgtaagactgctaaaacattttttgatgccaagtaccagtcaatattcaaacttcctgattgtctcgtaagttttttttaacagttggtttattcgagtcaagatccaggcaagatctagatcttgcattttgttaatataatctatagatttaactttcctgtttttaatttttgaagaaactaagttgtttgtcctatagaattgtccttcagtggattttactgaatgtatcctaatgggatcatgtacaccttttctgtcccctatatgttctataaactgacagatctagagggcttctgttgttctgttttgctttttcacaaaaataattcataggtgatatatgctccatgttgtatcacatcatggcacataatggctctcatcttgtaacattaagattgatagtgggtttggatgctgccagcccactccattcattacaaaagttctctatcagcttttcccctgatggatttagccatcattaatgatatttgcccacatctgggattccattagaggttgccaaccagtgatatcttgtcattccttctgcatctattagctggaatcctataaagaacttgtgctcattaattcacgaggcaggataaaatagaaatttcaaattctgattgaataggcgcccattttgaagtttctgtattgagagtcaggcctacagtaaaagtagcaatagaaagctgattgtttgaaaaaaaagaagcgggggggggagtgcaatataatcaacagactttcctttggctgaatcacttgattcagggcaatttttactacagttttatagataattgcttcaaatgtctaattcattttgatagtatagttacttgactacataatttcttcccagggttgtattttcaatttgttttctaacaaaaaacatagaaatagaacaactaggtcatgtactctgggcttagctctcacagttatgatcagtctcgtttcatttgtacccaaccccttgagttattttaaagcacgttccagctatcatatcacttcatgtataatatcttaatangtatctaaaagatagcttttttatgttttattttatttttattttttcagacaaagtattactctgtcgcccaggctggcatgcagtggcacaatctcagctcactgcaacctccacctcccaggttcaagtgattcttctgcctcagcctcctgagtagctggcattacaggtgcctgccaccatgcctggctaatgtttgtttgttcttttgtttttgtttctgagacaggatctcactctgttgcctaggctggagtccaatagcctaatcttggctcactgcaacctcagcctcccaggcaactgggactacaggcatgcgccaccatgcccagctaatctgtgtgtgttttttgtttgtttgtttatttgtgtagtagagatggggtttcaccatgttggccaggctggtctcaaactcctgacctcaagtgatccacccgcctcagcctcccaaagtgctgggattacaggcatgagccactgtgcctggcgtagaaagtatttcttataattaaaaacaacacccagtctaactagtataacacctaaaaaattgtcagatctgtattttagatagtacgacacagtgaaatgcaatggcacttaagcagagagaagaaggatttttctttttctttttttaaatagaaggtgttagaacctgaactgggcctggtttgcatttgggaagagtccagtggggaaacaacacaaataaggtcttgagaatgaagaattgcatttatatagggagttgtaacaaatggcctggagagtatctgactctttatgaaacatttaatgagaaatgtgacttgctttggtgcctatggttgaatttgttgcgatgcttctgacattatgaaaattttcaaacatgcaaaaaagttccagtagttatccagtgaattcttatactcaccacctatatctatagttaacattttacttgtattttatccagttatcagctcatctatgagatggcccttatttatttgcctgctgtttttattctctatttgtcctgttatttcttgttagagaagagaaggtgttcttagatcagaagatgccattgtattaggtgacggcaaggttttgctgatttagtggaacaagattctactgggatgtgtgctgagctgaaccaaggaactgcccgaatgtgctgaacaaggacatttgcttctcagatacgtgaattcaattttaagcaagattcttgatctgcttcagagcagctttgatttaaagtaatttcagagcacttttccttgcatgagtaattttctgaatgtataaaatattctatttatgtttgaccttttggataaactgtgttgctgcagtgttggtccacactaccatcctaagtgaagacttagtaagtctgaggatctccaggcactggaaagagtgagaacctgggagtgaaagggttatagttagtgttcatttttcgggttttgtttcatagggagtcctgagtggggtaacctgaaatgttttaacagttgaagatcatcccattcctatccccagtaaaaataggcctttccacaatcttctaccagttaacttagcttttttttttttttttccttaatagagtctcattcttgtcacccagactggagtgcgatggcacgatcttggctcactgcaaccctccctcccgggttccagcgattctcctgcctcagcctcccaagtagctgggattacaggcgcacgccaccatgcccagctaatttttgtatttttagtagacgtggggtttcaccatgttggccagactggtctcaaactcctgacctcaggcgatccgcccgtctaagccttccaaagtgctgggattactggcaggaaccaccaggcccagccaaccagcatttcttaaggtgaaaatacatggtgttaatttatattttgagtgagacccagtccagctgctataactgcttggacacttggcagaggacagagtactgcaaaagtgtctaagggagacagcattttgccttgggtgctgtagatgtacaagagaggttccaggagggggtgataggcagaattttggtccccatcaccttccctgcccagtgttatgcctatgaatgtgttacattatgtggtaaaagggactttgcagatgtaactaaaatttctaaaatagagatattatcctggattacctgggggaacccagtgtaattacatgaacccttaaaaatggaagaggatgcaggagtcagattcaaaggaaggcccaaggtgctattgctgacttgaagatagaggggccatgtggaaatcaagagaaggaagtgaatccttccagtgagcttggaagagagcaccttgaggcacagatgagaagcttggccttacctgatgccttgattttagcctggtgagaccccgagcatataaatttgctgtgctatgccacacttctcacctacagaaacttagtttaaagccactaagtttgtggtaatttgttggctttaggcccctgagggtagagatttatggcttgtgttacaagtagagagcagtggagagttgggctttgtaattctttcaagggtgattgtagttctggagtcctatctacctgggttcagatctttgttggccagtccctggctgtgtgacttcactgctttaagcctctgtcttcatccttaaagtggcgatgatagtacctacctcactctgatctctgaatgagaacacatgtaagacacttagcacagttcctggtgctcaaagagttccaacacctgaaagcaccatggccctgtttgtttttcagtcaagatttctaaaagccgttattaccagaggttcagtgagaacatgggcagggtaaactcaaaatggagaacataaaaactgggactcccagaccagtcacttagaagactgctgcaggaagtaccaaggtcgttaagaatcagtaataataataagtaatgtgtgaatccattagaatgttgagaagtagacctttgacatttcagaaaaatgtatatctcagacacagccatatgtattgttatccctgagttggaagagcatcacagggcatagtttcacaaaagcttcaaaaaatatactaattgctggtaatatgtgaactaacagaaaaaaatagccatgttaaaataggagtgcctgacaattagctctattcatcttgtctcctagctgtaagcaccctagattcaaattatgcacctagaaaactaaattactatgtatgttataggcctttgaaatggatacatgaaaattagtgaaatcagaatgaacgtttcgcctgccaaagatatgtatttttataagtgatacaagggccccatgagctccatggccacatctgtacaaaacaggccctcctttcaggaactggtctcgagagagcaaaggggtcaactccctaaatggcagctgagacagtcctccctggtggcatggccctgtttcctgttgatatggtgatagttggagagtcaaatttttaccagaatttgtgaatatcatctctggttaatgattacacaaaaccttttaaaattttaaaaaattatttctaattctataaataaactctgcagttgtacagccactgtacagctaacatctcaacactggaaatgaggctggtttcttccagtttggctcagattcttcagggaagcccagttaagacaaacagctctctatactcaatccttactttgctgagaagatacaggcctgcccactcgctcccacctgctcttcatgaggagtcctttattcctgcatgtttcctgttctttgggacctttaggagctaacctccacagatgctgatagtctgtagagtcaggaataccatgtaacatgttgaagtagactaaagattagttctttggcaatagcccagtctggacttactatgtacttttgaaaataaaactgcttatttgtaaactctgtaattaggaccttttgctatttgagttatattcctttctaacttcaaacgtctgcattcatgtataatagccattttatgcacagatgaggtgattcccacacttcttttcgcagatgtttcattatctggatgagtgtattacataataaatttgaataatggtagtcttccaaatgacaaaaagcaagctagttgatttgtcaattttgagtttaaatgttttgactgcttatcagcaaaaaaaatcaaagaatagcatactaatattaatggaaatgcagagtatatttaattggcatgattttttcatggatgtgtgcttcatttgatctattgtatgtagctcgtgatcacattttctgttggttaacattgttcctagcttatatgatggaattaaatatattctgtgtaaaaa

SEQ ID NO: 447283 - DNA, 8736 bp, Homo sapiens
  misc_feature (498)..(498): n is a, c, g, or t
  misc_feature (2452)..(2452): n is a, c, g, or t
  misc_feature (2609)..(2609): n is a, c, g, or t
  misc_feature (2617)..(2617): n is a, c, g, or t
  misc_feature (2655)..(2655): n is a, c, g, or t
  misc_feature (2707)..(2707): n is a, c, g, or t
  misc_feature (2709)..(2709): n is a, c, g, or t
  misc_feature (4315)..(4315): n is a, c, g, or t
tatttttttttccctccaaacagatttattgaatacagcgaaattctatatacaaagtgacctggacctgctgcttcaaaacatgatcctttcttactaatatcttgatagtcggcccatagagcattagaaagcaatttgactcttaaattaaacagaaaagtgcctaattgcacatttacaattgacatggccataactacgtggaacctttagttagtctctatacagcgtaacttaaccatacgttaggactccagttccctagtgaccaggctgcttgaaggaacacgttattgagcatcaagaaggcccatttgtgtgcacttgccaccgttgaatgccactcggtgttctcgtggatcataagtgtccccatttatctgaattctagaacacacccacaggcaatactcaggtggggctcaagaggcttacgctatagctgcttgctgggcttagaacgagatatcacctccagacatgcctcatcttgancagggctccgcgcggcaaacccagaattaagctcctgtgtgaactctgtgcacagcgactccaacaagtggagggatctctctcatgtgtgtctctccaagttgctgctccaaggctcgcctccatcccacccaccgaccactccggctggaggcaaagctggaaaggacagtgggaaggccaaggctaaggcagtatctcgctcacagagagctgggctacagtttcctgtgggccgcatccacagacacttgaagactcgcaccacaagccatggaagggtgggtgccactgctgccgtgtacagtgctgcgattctggagtacctcactgcagaggtgctggagctggcaggtaatgcttctaaggatctcaaagtaaagcgtatcactccgcgtcacttgcagcttgcaatccgtggtgatgaagagttggattctcttatcaaggctaccatagctgggggtggtgtgatccctcacatccacaaatctctgattggaaagaagggacagcagaaaactgcttagagggatgctttaaccaaccctcttcctccccgtcattgtactgtaactgggacagaagaaataatggggatatgtggaatttttaacaacagttaaatggaaaagcatagacaattactgtagacatgataaaagaaacatttgtatgttcttagactcgaagtttgataaaagtaccttttcatgtggtgacagttgtgtgttgattggctaggtttctcccgtgtgttttatacaaaaatggaattgataaaccattttttacaaaattaatttgtctcaaaactgttctgttcatgatgtattagaaatattttactcagactttaaatattttaaatctcagattggttattcagagtaaccttagaacagaaattgggaatatatctttacaatgattgataccatggtatattgactcttagatgctattgatctgtagcaccattttttacaaacgactaaggaaaaaacctgccaattaaatcatgatatgccatcaattatgagacatcccaatttgagagatgttagattatagaaaagtatgcatttatgactgaaatggtagtggaattatttgaattctacaccaagcacttaccatgtgccaggccctttgcagagtgctctactgaccaagaaagttgttcctgccacattatagatgtggagcctaagggtcacagaaattgtgtgctatgccaaaaaacattgaactggtagatagaaaatgacagagctaggattcaaacctagatctggctgactccagagcctagttttacctggaattgatgttcagtttatcaaaggtttctccttttggtttaaaatcccaatttttggcctggcattgtggtttacgcctgtaatcccaacacttcgggagaccgaggctggtggaacacttgaggtcaggagtttgagaccagcctggccaacatggtaaaacgccgtctcggccaggcgcggtggctcacgcctgtaatcccagcactttgggaggccaaggtgggtgaatcacgaggtcaggaaatcgagaccatcctggctaacatggtgaaaccccgtctctatttaaaaaaatacaaaaaattggccgggtgtggtggcacgcgcctgtggtcccagctactcaggaggctgaggcatgagaatgacgtgaacccgggaggcggagcttgcagtgagccaagatggcgccactgcactccagcttggcgactgagcaagactccctctcaaaacaaacaaaaaaaagtctctactaaaaatacagaaattagccaggcatggtacacacatgttgtcccaactacttggggcactggggcacaaaaaatcacttgaacccaggaggcagaggttgcagtgagccaagatcacgccactacactccagcctaggtgacagagtgngactctgtctcaaaaaaaaaaatcccaacttttagtagtctcttagtcatgcaataacagtaatttgtacaatcttttaaaaattatatttatttatcagtttctaagaaacttttttgtttgttttgagacaggctcttgctcttttgcccaggtngaagtgcngtggcatgatcctggctcactgcagcctccacctctcnggcccaagcaatcctcttacctcagccctgcaaatagctgggaccacaggcncntgccaccatacctggctaattttttttatttatgtaagagacagaggtctccctatgttgcccaggttggtattgaactcctggctcaagccatcctcccaccttggcctcccaaagtgctgggattataggcataagccaccatgccctgccctaagtaactgttacttgagttaatgtactagttaattgacccttagaaaattatatttttctgcttgcaagtcttcattaaagaaggaaattttaaaatattttatagtataatgctatccaaactcatttttaaaaacattttattatggaaattttcacaaatgcacaaaaagaatagcagaatgaagctctgtgtacccatcctccaacagctgtcctgtggtcagtcttgtttacctgcatccccacctatcccctgccccaacccacagggatcagtttgagtcccattaacaggcatagtattttcatgtttgtgtgatcagagacattcaaatataactccaaagatagggtacttttttgaacataaccacaataccattgtgtaagactgctaaaacattttttgatgccaagtaccagtcaatattcaaacttcctgattgtctcgtaagttttttttaacagttggtttattcgagtcaagatccaggcaagatctagatcttgcattttgttaatataatctatagatttaactttcctgtttttaatttttgaagaaactaagttgtttgtcctatagaattgtccttcagtggattttactgaatgtatcctaatgggatcatgtacaccttttctgtcccctatatgttctataaactgacagatctagagggcttctgttgttctgttttgctttttcacaaaaataattcataggtgatatatgctccatgttgtatcacatcatggcacataatggctctcatcttgtaacattaagattgatagtgggtttggatgctgccagcccactccattcattacaaaagttctctatcagcttttcccctgatggatttagccatcattaatgatatttgcccacatctgggattccattagaggttgccaaccagtgatatcttgtcattccttctgcatctattagctggaatcctataaagaacttgtgctcattaattcacgaggcaggataaaatagaaatttcaaattctgattgaataggcgcccattttgaagtttctgtattgagagtcaggcctacagtaaaagtagcaatagaaagctgattgtttgaaaaaaaagaagcgggggggggagtgcaatataatcaacagactttcctttggctgaatcacttgattcagggcaatttttactacagttttatagataattgcttcaaatgtctaattcattttgatagtatagttacttgactacataatttcttcccagggttgtattttcaatttgttttctaacaaaaaacatagaaatagaacaactaggtcatgtactctgggcttagctctcacagttatgatcagtctcgtttcatttgtacccaaccccttgagttattttaaagcacgttccagctatcatatcacttcatgtataatatcttaatangtatctaaaagatagcttttttatgttttattttatttttattttttcagacaaagtattactctgtcgcccaggctggcatgcagtggcacaatctcagctcactgcaacctccacctcccaggttcaagtgattcttctgcctcagcctcctgagtagctggcattacaggtgcctgccaccatgcctggctaatgtttgtttgttcttttgtttttgtttctgagacaggatctcactctgttgcctaggctggagtccaatagcctaatcttggctcactgcaacctcagcctcccaggcaactgggactacaggcatgcgccaccatgcccagctaatctgtgtgtgttttttgtttgtttgtttatttgtgtagtagagatggggtttcaccatgttggccaggctggtctcaaactcctgacctcaagtgatccacccgcctcagcctcccaaagtgctgggattacaggcatgagccactgtgcctggcgtagaaagtatttcttataattaaaaacaacacccagtctaactagtataacacctaaaaaattgtcagatctgtattttagatagtacgacacagtgaaatgcaatggcacttaagcagagagaagaaggatttttctttttctttttttaaatagaaggtgttagaacctgaactgggcctggtttgcatttgggaagagtccagtggggaaacaacacaaataaggtcttgagaatgaagaattgcatttatatagggagttgtaacaaatggcctggagagtatctgactctttatgaaacatttaatgagaaatgtgacttgctttggtgcctatggttgaatttgttgcgatgcttctgacattatgaaaattttcaaacatgcaaaaaagttccagtagttatccagtgaattcttatactcaccacctatatctatagttaacattttacttgtattttatccagttatcagctcatctatgagatggcccttatttatttgcctgctgtttttattctctatttgtcctgttatttcttgttagagaagagaaggtgttcttagatcagaagatgccattgtattaggtgacggcaaggttttgctgatttagtggaacaagattctactgggatgtgtgctgagctgaaccaaggaactgcccgaatgtgctgaacaaggacatttgcttctcagatacgtgaattcaattttaagcaagattcttgatctgcttcagagcagctttgatttaaagtaatttcagagcacttttccttgcatgagtaattttctgaatgtataaaatattctatttatgtttgaccttttggataaactgtgttgctgcagtgttggtccacactaccatcctaagtgaagacttagtaagtctgaggatctccaggcactggaaagagtgagaacctgggagtgaaagggttatagttagtgttcatttttcgggttttgtttcatagggagtcctgagtggggtaacctgaaatgttttaacagttgaagatcatcccattcctatccccagtaaaaataggcctttccacaatcttctaccagttaacttagcttttttttttttttttccttaatagagtctcattcttgtcacccagactggagtgcgatggcacgatcttggctcactgcaaccctccctcccgggttccagcgattctcctgcctcagcctcccaagtagctgggattacaggcgcacgccaccatgcccagctaatttttgtatttttagtagacgtggggtttcaccatgttggccagactggtctcaaactcctgacctcaggcgatccgcccgtctaagccttccaaagtgctgggattactggcaggaaccaccaggcccagccaaccagcatttcttaaggtgaaaatacatggtgttaatttatattttgagtgagacccagtccagctgctataactgcttggacacttggcagaggacagagtactgcaaaagtgtctaagggagacagcattttgccttgggtgctgtagatgtacaagagaggttccaggagggggtgataggcagaattttggtccccatcaccttccctgcccagtgttatgcctatgaatgtgttacattatgtggtaaaagggactttgcagatgtaactaaaatttctaaaatagagatattatcctggattacctgggggaacccagtgtaattacatgaacccttaaaaatggaagaggatgcaggagtcagattcaaaggaaggcccaaggtgctattgctgacttgaagatagaggggccatgtggaaatcaagagaaggaagtgaatccttccagtgagcttggaagagagcaccttgaggcacagatgagaagcttggccttacctgatgccttgattttagcctggtgagaccccgagcatataaatttgctgtgctatgccacacttctcacctacagaaacttagtttaaagccactaagtttgtggtaatttgttggctttaggcccctgagggtagagatttatggcttgtgttacaagtagagagcagtggagagttgggctttgtaattctttcaagggtgattgtagttctggagtcctatctacctgggttcagatctttgttggccagtccctggctgtgtgacttcactgctttaagcctctgtcttcatccttaaagtggcgatgatagtacctacctcactctgatctctgaatgagaacacatgtaagacacttagcacagttcctggtgctcaaagagttccaacacctgaaagcaccatggccctgtttgtttttcagtcaagatttctaaaagccgttattaccagaggttcagtgagaacatgggcagggtaaactcaaaatggagaacataaaaactgggactcccagaccagtcacttagaagactgctgcaggaagtaccaaggtcgttaagaatcagtaataataataagtaatgtgtgaatccattagaatgttgagaagtagacctttgacatttcagaaaaatgtatatctcagacacagccatatgtattgttatccctgagttggaagagcatcacagggcatagtttcacaaaagcttcaaaaaatatactaattgctggtaatatgtgaactaacagaaaaaaatagccatgttaaaataggagtgcctgacaattagctctattcatcttgtctcctagctgtaagcaccctagattcaaattatgcacctagaaaactaaattactatgtatgttataggcctttgaaatggatacatgaaaattagtgaaatcagaatgaacgtttcgcctgccaaagatatgtatttttataagtgatacaagggccccatgagctccatggccacatctgtacaaaacaggccctcctttcaggaactggtctcgagagagcaaaggggtcaactccctaaatggcagctgagacagtcctccctggtggcatggccctgtttcctgttgatatggtgatagttggagagtcaaatttttaccagaatttgtgaatatcatctctggttaatgattacacaaaaccttttaaaattttaaaaaattatttctaattctataaataaactctgcagttgtacagccactgtacagctaacatctcaacactggaaatgaggctggtttcttccagtttggctcagattcttcagggaagcccagttaagacaaacagctctctatactcaatccttactttgctgagaagatacaggcctgcccactcgctcccacctgctcttcatgaggagtcctttattcctgcatgtttcctgttctttgggacctttaggagctaacctccacagatgctgatagtctgtagagtcaggaataccatgtaacatgttgaagtagactaaagattagttctttggcaatagcccagtctggacttactatgtacttttgaaaataaaactgcttatttgtaaactctgtaattaggaccttttgctatttgagttatattcctttctaacttcaaacgtctgcattcatgtataatagccattttatgcacagatgaggtgattcccacacttcttttcgcagatgtttcattatctggatgagtgtattacataataaatttgaataatggtagtcttccaaatgacaaaaagcaagctagttgatttgtcaattttgagtttaaatgttttgactgcttatcagcaaaaaaaatcaaagaatagcatactaatattaatggaaatgcagagtatatttaattggcatgattttttcatggatgtgtgcttcatttgatctattgtatgtagctcgtgatcacattttctgttggttaacattgttcctagcttatatgatggaattaaatatattctgtgtaaaaa

SEQ ID NO: 447284 - DNA, 8074 bp, Homo sapiens
  misc_feature (1790)..(1790): n is a, c, g, or t
  misc_feature (1947)..(1947): n is a, c, g, or t
  misc_feature (1955)..(1955): n is a, c, g, or t
  misc_feature (1993)..(1993): n is a, c, g, or t
  misc_feature (2045)..(2045): n is a, c, g, or t
  misc_feature (2047)..(2047): n is a, c, g, or t
  misc_feature (3653)..(3653): n is a, c, g, or t
tggggttcgaaccagcaagacaagcgggcatggccacagcagcgcgaggcgggcacggggtattgtccggctccggcggcggcggtcggtgctgcgagagcggcggcggcggcgcgggtcggcagcgggagggcgcgcggccgagcggaggcggagtcggcgccgagaacatggctggaggcaaagctggaaaggacagtgggaaggccaaggctaaggcagtatctcgctcacagagagctgggctacagtttcctgtgggccgcatccacagacacttgaagactcgcaccacaagccatggaagggtgggtgccactgctgccgtgtacagtgctgcgattctggagtacctcactgcagaggtgctggagctggcaggtaatgcttctaaggatctcaaagtaaagcgtatcactccgcgtcacttgcagcttgcaatccgtggtgatgaagagttggattctcttatcaaggctaccatagctgggggtggtgtgatccctcacatccacaaatctctgattggaaagaagggacagcagaaaactgcttagagggatgctttaaccaaccctcttcctccccgtcattgtactgtaactgggacagaagaaataatggggatatgtggaatttttaacaacagttaaatggaaaagcatagacaattactgtagacatgataaaagaaacatttgtatgttcttagactcgaagtttgataaaagtaccttttcatgtggtgacagttgtgtgttgattggctaggtttctcccgtgtgttttatacaaaaatggaattgataaaccacattttttacaaacgactaaggaaaaaacctgccaattaaatcatgatatgccatcaattatgagacatcccaatttgagagatgttagattatagaaaagtatgcatttatgactgaaatggtagtggaattatttgaattctacaccaagcacttaccatgtgccaggccctttgcagagtgctctactgaccaagaaagttgttcctgccacattatagatgtggagcctaagggtcacagaaattgtgtgctatgccaaaaaacattgaactggtagatagaaaatgacagagctaggattcaaacctagatctggctgactccagagcctagttttacctggaattgatgttcagtttatcaaaggtttctccttttggtttaaaatcccaatttttggcctggcattgtggtttacgcctgtaatcccaacacttcgggagaccgaggctggtggaacacttgaggtcaggagtttgagaccagcctggccaacatggtaaaacgccgtctcggccaggcgcggtggctcacgcctgtaatcccagcactttgggaggccaaggtgggtgaatcacgaggtcaggaaatcgagaccatcctggctaacatggtgaaaccccgtctctatttaaaaaaatacaaaaaattggccgggtgtggtggcacgcgcctgtggtcccagctactcaggaggctgaggcatgagaatgacgtgaacccgggaggcggagcttgcagtgagccaagatggcgccactgcactccagcttggcgactgagcaagactccctctcaaaacaaacaaaaaaaagtctctactaaaaatacagaaattagccaggcatggtacacacatgttgtcccaactacttggggcactggggcacaaaaaatcacttgaacccaggaggcagaggttgcagtgagccaagatcacgccactacactccagcctaggtgacagagtgngactctgtctcaaaaaaaaaaatcccaacttttagtagtctcttagtcatgcaataacagtaatttgtacaatcttttaaaaattatatttatttatcagtttctaagaaacttttttgtttgttttgagacaggctcttgctcttttgcccaggtngaagtgcngtggcatgatcctggctcactgcagcctccacctctcnggcccaagcaatcctcttacctcagccctgcaaatagctgggaccacaggcncntgccaccatacctggctaattttttttatttatgtaagagacagaggtctccctatgttgcccaggttggtattgaactcctggctcaagccatcctcccaccttggcctcccaaagtgctgggattataggcataagccaccatgccctgccctaagtaactgttacttgagttaatgtactagttaattgacccttagaaaattatatttttctgcttgcaagtcttcattaaagaaggaaattttaaaatattttatagtataatgctatccaaactcatttttaaaaacattttattatggaaattttcacaaatgcacaaaaagaatagcagaatgaagctctgtgtacccatcctccaacagctgtcctgtggtcagtcttgtttacctgcatccccacctatcccctgccccaacccacagggatcagtttgagtcccattaacaggcatagtattttcatgtttgtgtgatcagagacattcaaatataactccaaagatagggtacttttttgaacataaccacaataccattgtgtaagactgctaaaacattttttgatgccaagtaccagtcaatattcaaacttcctgattgtctcgtaagttttttttaacagttggtttattcgagtcaagatccaggcaagatctagatcttgcattttgttaatataatctatagatttaactttcctgtttttaatttttgaagaaactaagttgtttgtcctatagaattgtccttcagtggattttactgaatgtatcctaatgggatcatgtacaccttttctgtcccctatatgttctataaactgacagatctagagggcttctgttgttctgttttgctttttcacaaaaataattcataggtgatatatgctccatgttgtatcacatcatggcacataatggctctcatcttgtaacattaagattgatagtgggtttggatgctgccagcccactccattcattacaaaagttctctatcagcttttcccctgatggatttagccatcattaatgatatttgcccacatctgggattccattagaggttgccaaccagtgatatcttgtcattccttctgcatctattagctggaatcctataaagaacttgtgctcattaattcacgaggcaggataaaatagaaatttcaaattctgattgaataggcgcccattttgaagtttctgtattgagagtcaggcctacagtaaaagtagcaatagaaagctgattgtttgaaaaaaaagaagcgggggggggagtgcaatataatcaacagactttcctttggctgaatcacttgattcagggcaatttttactacagttttatagataattgcttcaaatgtctaattcattttgatagtatagttacttgactacataatttcttcccagggttgtattttcaatttgttttctaacaaaaaacatagaaatagaacaactaggtcatgtactctgggcttagctctcacagttatgatcagtctcgtttcatttgtacccaaccccttgagttattttaaagcacgttccagctatcatatcacttcatgtataatatcttaatangtatctaaaagatagcttttttatgttttattttatttttattttttcagacaaagtattactctgtcgcccaggctggcatgcagtggcacaatctcagctcactgcaacctccacctcccaggttcaagtgattcttctgcctcagcctcctgagtagctggcattacaggtgcctgccaccatgcctggctaatgtttgtttgttcttttgtttttgtttctgagacaggatctcactctgttgcctaggctggagtccaatagcctaatcttggctcactgcaacctcagcctcccaggcaactgggactacaggcatgcgccaccatgcccagctaatctgtgtgtgttttttgtttgtttgtttatttgtgtagtagagatggggtttcaccatgttggccaggctggtctcaaactcctgacctcaagtgatccacccgcctcagcctcccaaagtgctgggattacaggcatgagccactgtgcctggcgtagaaagtatttcttataattaaaaacaacacccagtctaactagtataacacctaaaaaattgtcagatctgtattttagatagtacgacacagtgaaatgcaatggcacttaagcagagagaagaaggatttttctttttctttttttaaatagaaggtgttagaacctgaactgggcctggtttgcatttgggaagagtccagtggggaaacaacacaaataaggtcttgagaatgaagaattgcatttatatagggagttgtaacaaatggcctggagagtatctgactctttatgaaacatttaatgagaaatgtgacttgctttggtgcctatggttgaatttgttgcgatgcttctgacattatgaaaattttcaaacatgcaaaaaagttccagtagttatccagtgaattcttatactcaccacctatatctatagttaacattttacttgtattttatccagttatcagctcatctatgagatggcccttatttatttgcctgctgtttttattctctatttgtcctgttatttcttgttagagaagagaaggtgttcttagatcagaagatgccattgtattaggtgacggcaaggttttgctgatttagtggaacaagattctactgggatgtgtgctgagctgaaccaaggaactgcccgaatgtgctgaacaaggacatttgcttctcagatacgtgaattcaattttaagcaagattcttgatctgcttcagagcagctttgatttaaagtaatttcagagcacttttccttgcatgagtaattttctgaatgtataaaatattctatttatgtttgaccttttggataaactgtgttgctgcagtgttggtccacactaccatcctaagtgaagacttagtaagtctgaggatctccaggcactggaaagagtgagaacctgggagtgaaagggttatagttagtgttcatttttcgggttttgtttcatagggagtcctgagtggggtaacctgaaatgttttaacagttgaagatcatcccattcctatccccagtaaaaataggcctttccacaatcttctaccagttaacttagcttttttttttttttttccttaatagagtctcattcttgtcacccagactggagtgcgatggcacgatcttggctcactgcaaccctccctcccgggttccagcgattctcctgcctcagcctcccaagtagctgggattacaggcgcacgccaccatgcccagctaatttttgtatttttagtagacgtggggtttcaccatgttggccagactggtctcaaactcctgacctcaggcgatccgcccgtctaagccttccaaagtgctgggattactggcaggaaccaccaggcccagccaaccagcatttcttaaggtgaaaatacatggtgttaatttatattttgagtgagacccagtccagctgctataactgcttggacacttggcagaggacagagtactgcaaaagtgtctaagggagacagcattttgccttgggtgctgtagatgtacaagagaggttccaggagggggtgataggcagaattttggtccccatcaccttccctgcccagtgttatgcctatgaatgtgttacattatgtggtaaaagggactttgcagatgtaactaaaatttctaaaatagagatattatcctggattacctgggggaacccagtgtaattacatgaacccttaaaaatggaagaggatgcaggagtcagattcaaaggaaggcccaaggtgctattgctgacttgaagatagaggggccatgtggaaatcaagagaaggaagtgaatccttccagtgagcttggaagagagcaccttgaggcacagatgagaagcttggccttacctgatgccttgattttagcctggtgagaccccgagcatataaatttgctgtgctatgccacacttctcacctacagaaacttagtttaaagccactaagtttgtggtaatttgttggctttaggcccctgagggtagagatttatggcttgtgttacaagtagagagcagtggagagttgggctttgtaattctttcaagggtgattgtagttctggagtcctatctacctgggttcagatctttgttggccagtccctggctgtgtgacttcactgctttaagcctctgtcttcatccttaaagtggcgatgatagtacctacctcactctgatctctgaatgagaacacatgtaagacacttagcacagttcctggtgctcaaagagttccaacacctgaaagcaccatggccctgtttgtttttcagtcaagatttctaaaagccgttattaccagaggttcagtgagaacatgggcagggtaaactcaaaatggagaacataaaaactgggactcccagaccagtcacttagaagactgctgcaggaagtaccaaggtcgttaagaatcagtaataataataagtaatgtgtgaatccattagaatgttgagaagtagacctttgacatttcagaaaaatgtatatctcagacacagccatatgtattgttatccctgagttggaagagcatcacagggcatagtttcacaaaagcttcaaaaaatatactaattgctggtaatatgtgaactaacagaaaaaaatagccatgttaaaataggagtgcctgacaattagctctattcatcttgtctcctagctgtaagcaccctagattcaaattatgcacctagaaaactaaattactatgtatgttataggcctttgaaatggatacatgaaaattagtgaaatcagaatgaacgtttcgcctgccaaagatatgtatttttataagtgatacaagggccccatgagctccatggccacatctgtacaaaacaggccctcctttcaggaactggtctcgagagagcaaaggggtcaactccctaaatggcagctgagacagtcctccctggtggcatggccctgtttcctgttgatatggtgatagttggagagtcaaatttttaccagaatttgtgaatatcatctctggttaatgattacacaaaaccttttaaaattttaaaaaattatttctaattctataaataaactctgcagttgtacagccactgtacagctaacatctcaacactggaaatgaggctggtttcttccagtttggctcagattcttcagggaagcccagttaagacaaacagctctctatactcaatccttactttgctgagaagatacaggcctgcccactcgctcccacctgctcttcatgaggagtcctttattcctgcatgtttcctgttctttgggacctttaggagctaacctccacagatgctgatagtctgtagagtcaggaataccatgtaacatgttgaagtagactaaagattagttctttggcaatagcccagtctggacttactatgtacttttgaaaataaaactgcttatttgtaaactctgtaattaggaccttttgctatttgagttatattcctttctaacttcaaacgtctgcattcatgtataatagccattttatgcacagatgaggtgattcccacacttcttttcgcagatgtttcattatctggatgagtgtattacataataaatttgaataatggtagtcttccaaatgacaaaaagcaagctagttgatttgtcaattttgagtttaaatgttttgactgcttatcagcaaaaaaaatcaaagaatagcatactaatattaatggaaatgcagagtatatttaattggcatgattttttcatggatgtgtgcttcatttgatctattgtatgtagctcgtgatcacattttctgttggttaacattgttcctagcttatatgatggaattaaatatattctgtgtaaaaa

SEQ ID NO: 447285 - DNA, 8187 bp, Homo sapiens
  misc_feature (1903)..(1903): n is a, c, g, or t
  misc_feature (2060)..(2060): n is a, c, g, or t
  misc_feature (2068)..(2068): n is a, c, g, or t
  misc_feature (2106)..(2106): n is a, c, g, or t
  misc_feature (2158)..(2158): n is a, c, g, or t
  misc_feature (2160)..(2160): n is a, c, g, or t
  misc_feature (3766)..(3766): n is a, c, g, or t
tggggttcgaaccagcaagacaagcgggcatggccacagcagcgcgaggcgggcacggggtattgtccggctccggcggcggcggtcggtgctgcgagagcggcggcggcggcgcgggtcggcagcgggagggcgcgcggccgagcggaggcggagtcggcgccgagaacatgtttcctgtgggccgcatccacagacacttgaagactcgcaccacaagccatggaagggtgggtgccactgctgccgtgtacagtgctgcgattctggagtacctcactgcagaggtgctggagctggcaggtaatgcttctaaggatctcaaagtaaagcgtatcactccgcgtcacttgcagcttgcaatccgtggtgatgaagagttggattctcttatcaaggctaccatagctgggggtggtgtgatccctcacatccacaaatctctgattggaaagaagggacagcagaaaactgcttagagggatgctttaaccaaccctcttcctccccgtcattgtactgtaactgggacagaagaaataatggggatatgtggaatttttaacaacagttaaatggaaaagcatagacaattactgtagacatgataaaagaaacatttgtatgttcttagactcgaagtttgataaaagtaccttttcatgtggtgacagttgtgtgttgattggctaggtttctcccgtgtgttttatacaaaaatggaattgataaaccattttttacaaaattaatttgtctcaaaactgttctgttcatgatgtattagaaatattttactcagactttaaatattttaaatctcagattggttattcagagtaaccttagaacagaaattgggaatatatctttacaatgattgataccatggtatattgactcttagatgctattgatctgtagcaccattttttacaaacgactaaggaaaaaacctgccaattaaatcatgatatgccatcaattatgagacatcccaatttgagagatgttagattatagaaaagtatgcatttatgactgaaatggtagtggaattatttgaattctacaccaagcacttaccatgtgccaggccctttgcagagtgctctactgaccaagaaagttgttcctgccacattatagatgtggagcctaagggtcacagaaattgtgtgctatgccaaaaaacattgaactggtagatagaaaatgacagagctaggattcaaacctagatctggctgactccagagcctagttttacctggaattgatgttcagtttatcaaaggtttctccttttggtttaaaatcccaatttttggcctggcattgtggtttacgcctgtaatcccaacacttcgggagaccgaggctggtggaacacttgaggtcaggagtttgagaccagcctggccaacatggtaaaacgccgtctcggccaggcgcggtggctcacgcctgtaatcccagcactttgggaggccaaggtgggtgaatcacgaggtcaggaaatcgagaccatcctggctaacatggtgaaaccccgtctctatttaaaaaaatacaaaaaattggccgggtgtggtggcacgcgcctgtggtcccagctactcaggaggctgaggcatgagaatgacgtgaacccgggaggcggagcttgcagtgagccaagatggcgccactgcactccagcttggcgactgagcaagactccctctcaaaacaaacaaaaaaaagtctctactaaaaatacagaaattagccaggcatggtacacacatgttgtcccaactacttggggcactggggcacaaaaaatcacttgaacccaggaggcagaggttgcagtgagccaagatcacgccactacactccagcctaggtgacagagtgngactctgtctcaaaaaaaaaaatcccaacttttagtagtctcttagtcatgcaataacagtaatttgtacaatcttttaaaaattatatttatttatcagtttctaagaaacttttttgtttgttttgagacaggctcttgctcttttgcccaggtngaagtgcngtggcatgatcctggctcactgcagcctccacctctcnggcccaagcaatcctcttacctcagccctgcaaatagctgggaccacaggcncntgccaccatacctggctaattttttttatttatgtaagagacagaggtctccctatgttgcccaggttggtattgaactcctggctcaagccatcctcccaccttggcctcccaaagtgctgggattataggcataagccaccatgccctgccctaagtaactgttacttgagttaatgtactagttaattgacccttagaaaattatatttttctgcttgcaagtcttcattaaagaaggaaattttaaaatattttatagtataatgctatccaaactcatttttaaaaacattttattatggaaattttcacaaatgcacaaaaagaatagcagaatgaagctctgtgtacccatcctccaacagctgtcctgtggtcagtcttgtttacctgcatccccacctatcccctgccccaacccacagggatcagtttgagtcccattaacaggcatagtattttcatgtttgtgtgatcagagacattcaaatataactccaaagatagggtacttttttgaacataaccacaataccattgtgtaagactgctaaaacattttttgatgccaagtaccagtcaatattcaaacttcctgattgtctcgtaagttttttttaacagttggtttattcgagtcaagatccaggcaagatctagatcttgcattttgttaatataatctatagatttaactttcctgtttttaatttttgaagaaactaagttgtttgtcctatagaattgtccttcagtggattttactgaatgtatcctaatgggatcatgtacaccttttctgtcccctatatgttctataaactgacagatctagagggcttctgttgttctgttttgctttttcacaaaaataattcataggtgatatatgctccatgttgtatcacatcatggcacataatggctctcatcttgtaacattaagattgatagtgggtttggatgctgccagcccactccattcattacaaaagttctctatcagcttttcccctgatggatttagccatcattaatgatatttgcccacatctgggattccattagaggttgccaaccagtgatatcttgtcattccttctgcatctattagctggaatcctataaagaacttgtgctcattaattcacgaggcaggataaaatagaaatttcaaattctgattgaataggcgcccattttgaagtttctgtattgagagtcaggcctacagtaaaagtagcaatagaaagctgattgtttgaaaaaaaagaagcgggggggggagtgcaatataatcaacagactttcctttggctgaatcacttgattcagggcaatttttactacagttttatagataattgcttcaaatgtctaattcattttgatagtatagttacttgactacataatttcttcccagggttgtattttcaatttgttttctaacaaaaaacatagaaatagaacaactaggtcatgtactctgggcttagctctcacagttatgatcagtctcgtttcatttgtacccaaccccttgagttattttaaagcacgttccagctatcatatcacttcatgtataatatcttaatangtatctaaaagatagcttttttatgttttattttatttttattttttcagacaaagtattactctgtcgcccaggctggcatgcagtggcacaatctcagctcactgcaacctccacctcccaggttcaagtgattcttctgcctcagcctcctgagtagctggcattacaggtgcctgccaccatgcctggctaatgtttgtttgttcttttgtttttgtttctgagacaggatctcactctgttgcctaggctggagtccaatagcctaatcttggctcactgcaacctcagcctcccaggcaactgggactacaggcatgcgccaccatgcccagctaatctgtgtgtgttttttgtttgtttgtttatttgtgtagtagagatggggtttcaccatgttggccaggctggtctcaaactcctgacctcaagtgatccacccgcctcagcctcccaaagtgctgggattacaggcatgagccactgtgcctggcgtagaaagtatttcttataattaaaaacaacacccagtctaactagtataacacctaaaaaattgtcagatctgtattttagatagtacgacacagtgaaatgcaatggcacttaagcagagagaagaaggatttttctttttctttttttaaatagaaggtgttagaacctgaactgggcctggtttgcatttgggaagagtccagtggggaaacaacacaaataaggtcttgagaatgaagaattgcatttatatagggagttgtaacaaatggcctggagagtatctgactctttatgaaacatttaatgagaaatgtgacttgctttggtgcctatggttgaatttgttgcgatgcttctgacattatgaaaattttcaaacatgcaaaaaagttccagtagttatccagtgaattcttatactcaccacctatatctatagttaacattttacttgtattttatccagttatcagctcatctatgagatggcccttatttatttgcctgctgtttttattctctatttgtcctgttatttcttgttagagaagagaaggtgttcttagatcagaagatgccattgtattaggtgacggcaaggttttgctgatttagtggaacaagattctactgggatgtgtgctgagctgaaccaaggaactgcccgaatgtgctgaacaaggacatttgcttctcagatacgtgaattcaattttaagcaagattcttgatctgcttcagagcagctttgatttaaagtaatttcagagcacttttccttgcatgagtaattttctgaatgtataaaatattctatttatgtttgaccttttggataaactgtgttgctgcagtgttggtccacactaccatcctaagtgaagacttagtaagtctgaggatctccaggcactggaaagagtgagaacctgggagtgaaagggttatagttagtgttcatttttcgggttttgtttcatagggagtcctgagtggggtaacctgaaatgttttaacagttgaagatcatcccattcctatccccagtaaaaataggcctttccacaatcttctaccagttaacttagcttttttttttttttttccttaatagagtctcattcttgtcacccagactggagtgcgatggcacgatcttggctcactgcaaccctccctcccgggttccagcgattctcctgcctcagcctcccaagtagctgggattacaggcgcacgccaccatgcccagctaatttttgtatttttagtagacgtggggtttcaccatgttggccagactggtctcaaactcctgacctcaggcgatccgcccgtctaagccttccaaagtgctgggattactggcaggaaccaccaggcccagccaaccagcatttcttaaggtgaaaatacatggtgttaatttatattttgagtgagacccagtccagctgctataactgcttggacacttggcagaggacagagtactgcaaaagtgtctaagggagacagcattttgccttgggtgctgtagatgtacaagagaggttccaggagggggtgataggcagaattttggtccccatcaccttccctgcccagtgttatgcctatgaatgtgttacattatgtggtaaaagggactttgcagatgtaactaaaatttctaaaatagagatattatcctggattacctgggggaacccagtgtaattacatgaacccttaaaaatggaagaggatgcaggagtcagattcaaaggaaggcccaaggtgctattgctgacttgaagatagaggggccatgtggaaatcaagagaaggaagtgaatccttccagtgagcttggaagagagcaccttgaggcacagatgagaagcttggccttacctgatgccttgattttagcctggtgagaccccgagcatataaatttgctgtgctatgccacacttctcacctacagaaacttagtttaaagccactaagtttgtggtaatttgttggctttaggcccctgagggtagagatttatggcttgtgttacaagtagagagcagtggagagttgggctttgtaattctttcaagggtgattgtagttctggagtcctatctacctgggttcagatctttgttggccagtccctggctgtgtgacttcactgctttaagcctctgtcttcatccttaaagtggcgatgatagtacctacctcactctgatctctgaatgagaacacatgtaagacacttagcacagttcctggtgctcaaagagttccaacacctgaaagcaccatggccctgtttgtttttcagtcaagatttctaaaagccgttattaccagaggttcagtgagaacatgggcagggtaaactcaaaatggagaacataaaaactgggactcccagaccagtcacttagaagactgctgcaggaagtaccaaggtcgttaagaatcagtaataataataagtaatgtgtgaatccattagaatgttgagaagtagacctttgacatttcagaaaaatgtatatctcagacacagccatatgtattgttatccctgagttggaagagcatcacagggcatagtttcacaaaagcttcaaaaaatatactaattgctggtaatatgtgaactaacagaaaaaaatagccatgttaaaataggagtgcctgacaattagctctattcatcttgtctcctagctgtaagcaccctagattcaaattatgcacctagaaaactaaattactatgtatgttataggcctttgaaatggatacatgaaaattagtgaaatcagaatgaacgtttcgcctgccaaagatatgtatttttataagtgatacaagggccccatgagctccatggccacatctgtacaaaacaggccctcctttcaggaactggtctcgagagagcaaaggggtcaactccctaaatggcagctgagacagtcctccctggtggcatggccctgtttcctgttgatatggtgatagttggagagtcaaatttttaccagaatttgtgaatatcatctctggttaatgattacacaaaaccttttaaaattttaaaaaattatttctaattctataaataaactctgcagttgtacagccactgtacagctaacatctcaacactggaaatgaggctggtttcttccagtttggctcagattcttcagggaagcccagttaagacaaacagctctctatactcaatccttactttgctgagaagatacaggcctgcccactcgctcccacctgctcttcatgaggagtcctttattcctgcatgtttcctgttctttgggacctttaggagctaacctccacagatgctgatagtctgtagagtcaggaataccatgtaacatgttgaagtagactaaagattagttctttggcaatagcccagtctggacttactatgtacttttgaaaataaaactgcttatttgtaaactctgtaattaggaccttttgctatttgagttatattcctttctaacttcaaacgtctgcattcatgtataatagccattttatgcacagatgaggtgattcccacacttcttttcgcagatgtttcattatctggatgagtgtattacataataaatttgaataatggtagtcttccaaatgacaaaaagcaagctagttgatttgtcaattttgagtttaaatgttttgactgcttatcagcaaaaaaaatcaaagaatagcatactaatattaatggaaatgcagagtatatttaattggcatgattttttcatggatgtgtgcttcatttgatctattgtatgtagctcgtgatcacattttctgttggttaacattgttcctagcttatatgatggaattaaatatattctgtgtaaaaa

SEQ ID NO: 447286 - DNA, 3080 bp, Homo sapiens
  misc_feature (1981)..(1981): n is a, c, g, or t
  misc_feature (2138)..(2138): n is a, c, g, or t
  misc_feature (2146)..(2146): n is a, c, g, or t
  misc_feature (2184)..(2184): n is a, c, g, or t
  misc_feature (2236)..(2236): n is a, c, g, or t
  misc_feature (2238)..(2238): n is a, c, g, or t
tggggttcgaaccagcaagacaagcgggcatggccacagcagcgcgaggcgggcacggggtattgtccggctccggcggcggcggtcggtgctgcgagagcggcggcggcggcgcgggtcggcagcgggagggcgcgcggccgagcggaggcggagtcggcgccgagaacatggctggaggcaaagctggaaaggacagtgggaaggccaaggctaaggcagtatctcgctcacagagagctgggctacagtttcctgtgggccgcatccacagacacttgaagactcgcaccacaagccatggaagggtgggtgccactgctgccgtgtacagtgctgcgattctggagtacctcactgcagaggtgctggagctggcaggtaatgcttctaaggatctcaaagtaaagcgtatcactccgcgtcacttgcagcttgcaatccgtggtgatgaagagttggattctcttatcaaggctaccatagctgggggtggtgtgatccctcacatccacaaatctctgattggaaagaagggacagcagaaaactgcttagagggatgctttaaccaaccctcttcctccccgtcattgtactgtaactgggacagaagaaataatggggatatgtggaatttttaacaacagttaaatggaaaagcatagacaattactgtagacatgataaaagaaacatttgtatgttcttagactcgaagtttgataaaagtaccttttcatgtggtgacagttgtgtgttgattggctaggtttctcccgtgtgttttatacaaaaatggaattgataaaccattttttacaaaattaatttgtctcaaaactgttctgttcatgatgtattagaaatattttactcagactttaaatattttaaatctcagattggttattcagagtaaccttagaacagaaattgggaatatatctttacaatgattgataccatggtatattgactcttagatgctattgatctgtagcaccattttttacaaacgactaaggaaaaaacctgccaattaaatcatgatatgccatcaattatgagacatcccaatttgagagatgttagattatagaaaagtatgcatttatgactgaaatggtagtggaattatttgaattctacaccaagcacttaccatgtgccaggccctttgcagagtgctctactgaccaagaaagttgttcctgccacattatagatgtggagcctaagggtcacagaaattgtgtgctatgccaaaaaacattgaactggtagatagaaaatgacagagctaggattcaaacctagatctggctgactccagagcctagttttacctggaattgatgttcagtttatcaaaggtttctccttttggtttaaaatcccaatttttggcctggcattgtggtttacgcctgtaatcccaacacttcgggagaccgaggctggtggaacacttgaggtcaggagtttgagaccagcctggccaacatggtaaaacgccgtctcggccaggcgcggtggctcacgcctgtaatcccagcactttgggaggccaaggtgggtgaatcacgaggtcaggaaatcgagaccatcctggctaacatggtgaaaccccgtctctatttaaaaaaatacaaaaaattggccgggtgtggtggcacgcgcctgtggtcccagctactcaggaggctgaggcatgagaatgacgtgaacccgggaggcggagcttgcagtgagccaagatggcgccactgcactccagcttggcgactgagcaagactccctctcaaaacaaacaaaaaaaagtctctactaaaaatacagaaattagccaggcatggtacacacatgttgtcccaactacttggggcactggggcacaaaaaatcacttgaacccaggaggcagaggttgcagtgagccaagatcacgccactacactccagcctaggtgacagagtgngactctgtctcaaaaaaaaaaatcccaacttttagtagtctcttagtcatgcaataacagtaatttgtacaatcttttaaaaattatatttatttatcagtttctaagaaacttttttgtttgttttgagacaggctcttgctcttttgcccaggtngaagtgcngtggcatgatcctggctcactgcagcctccacctctcnggcccaagcaatcctcttacctcagccctgcaaatagctgggaccacaggcncntgccaccatacctggctaattttttttatttatgtaagagacagaggtctccctatgttgcccaggttggtattgaactcctggctcaagccatcctcccaccttggcctcccaaagtgctgggattataggcataagccaccatgccctgccctaagtaactgttacttgagttaatgtactagttaattgacccttagaaaattatatttttctgcttgcaagtcttcattaaagaaggaaattttaaaatattttatagtataatgctatccaaactcatttttaaaaacattttattatggaaattttcacaaatgcacaaaaagaatagcagaatgaagctctgtgtacccatcctccaacagctgtcctgtggtcagtcttgtttacctgcatccccacctatcccctgccccaacccacagggatcagtttgagtcccattaacaggcatagtattttcatgtttgtgtgatcagagacattcaaatataactccaaagatagggtacttttttgaacataaccacaataccattgtgtaagactgctaaaacattttttgatgccaagtaccagtcaatattcaaacttcctgattgtctcgtaagttttttttaacagttggtttattcgagtcaagatccaggcaagatctagatcttgcattttgttaatataatctatagatttaactttcctgtttttaatttttgaagaaactaagttgtttgtcctatagaattgtccttcagtggattttactgaatgtatcctaatgggatcatgtacaccttttctgtcccctatatgttctataaactgacagatctagaggg

SEQ ID NO: 447287 - DNA, 3993 bp, Homo sapiens
  misc_feature (1981)..(1981): n is a, c, g, or t
  misc_feature (2138)..(2138): n is a, c, g, or t
  misc_feature (2146)..(2146): n is a, c, g, or t
  misc_feature (2184)..(2184): n is a, c, g, or t
  misc_feature (2236)..(2236): n is a, c, g, or t
  misc_feature (2238)..(2238): n is a, c, g, or t
  misc_feature (3844)..(3844): n is a, c, g, or t
tggggttcgaaccagcaagacaagcgggcatggccacagcagcgcgaggcgggcacggggtattgtccggctccggcggcggcggtcggtgctgcgagagcggcggcggcggcgcgggtcggcagcgggagggcgcgcggccgagcggaggcggagtcggcgccgagaacatggctggaggcaaagctggaaaggacagtgggaaggccaaggctaaggcagtatctcgctcacagagagctgggctacagtttcctgtgggccgcatccacagacacttgaagactcgcaccacaagccatggaagggtgggtgccactgctgccgtgtacagtgctgcgattctggagtacctcactgcagaggtgctggagctggcaggtaatgcttctaaggatctcaaagtaaagcgtatcactccgcgtcacttgcagcttgcaatccgtggtgatgaagagttggattctcttatcaaggctaccatagctgggggtggtgtgatccctcacatccacaaatctctgattggaaagaagggacagcagaaaactgcttagagggatgctttaaccaaccctcttcctccccgtcattgtactgtaactgggacagaagaaataatggggatatgtggaatttttaacaacagttaaatggaaaagcatagacaattactgtagacatgataaaagaaacatttgtatgttcttagactcgaagtttgataaaagtaccttttcatgtggtgacagttgtgtgttgattggctaggtttctcccgtgtgttttatacaaaaatggaattgataaaccattttttacaaaattaatttgtctcaaaactgttctgttcatgatgtattagaaatattttactcagactttaaatattttaaatctcagattggttattcagagtaaccttagaacagaaattgggaatatatctttacaatgattgataccatggtatattgactcttagatgctattgatctgtagcaccattttttacaaacgactaaggaaaaaacctgccaattaaatcatgatatgccatcaattatgagacatcccaatttgagagatgttagattatagaaaagtatgcatttatgactgaaatggtagtggaattatttgaattctacaccaagcacttaccatgtgccaggccctttgcagagtgctctactgaccaagaaagttgttcctgccacattatagatgtggagcctaagggtcacagaaattgtgtgctatgccaaaaaacattgaactggtagatagaaaatgacagagctaggattcaaacctagatctggctgactccagagcctagttttacctggaattgatgttcagtttatcaaaggtttctccttttggtttaaaatcccaatttttggcctggcattgtggtttacgcctgtaatcccaacacttcgggagaccgaggctggtggaacacttgaggtcaggagtttgagaccagcctggccaacatggtaaaacgccgtctcggccaggcgcggtggctcacgcctgtaatcccagcactttgggaggccaaggtgggtgaatcacgaggtcaggaaatcgagaccatcctggctaacatggtgaaaccccgtctctatttaaaaaaatacaaaaaattggccgggtgtggtggcacgcgcctgtggtcccagctactcaggaggctgaggcatgagaatgacgtgaacccgggaggcggagcttgcagtgagccaagatggcgccactgcactccagcttggcgactgagcaagactccctctcaaaacaaacaaaaaaaagtctctactaaaaatacagaaattagccaggcatggtacacacatgttgtcccaactacttggggcactggggcacaaaaaatcacttgaacccaggaggcagaggttgcagtgagccaagatcacgccactacactccagcctaggtgacagagtgngactctgtctcaaaaaaaaaaatcccaacttttagtagtctcttagtcatgcaataacagtaatttgtacaatcttttaaaaattatatttatttatcagtttctaagaaacttttttgtttgttttgagacaggctcttgctcttttgcccaggtngaagtgcngtggcatgatcctggctcactgcagcctccacctctcnggcccaagcaatcctcttacctcagccctgcaaatagctgggaccacaggcncntgccaccatacctggctaattttttttatttatgtaagagacagaggtctccctatgttgcccaggttggtattgaactcctggctcaagccatcctcccaccttggcctcccaaagtgctgggattataggcataagccaccatgccctgccctaagtaactgttacttgagttaatgtactagttaattgacccttagaaaattatatttttctgcttgcaagtcttcattaaagaaggaaattttaaaatattttatagtataatgctatccaaactcatttttaaaaacattttattatggaaattttcacaaatgcacaaaaagaatagcagaatgaagctctgtgtacccatcctccaacagctgtcctgtggtcagtcttgtttacctgcatccccacctatcccctgccccaacccacagggatcagtttgagtcccattaacaggcatagtattttcatgtttgtgtgatcagagacattcaaatataactccaaagatagggtacttttttgaacataaccacaataccattgtgtaagactgctaaaacattttttgatgccaagtaccagtcaatattcaaacttcctgattgtctcgtaagttttttttaacagttggtttattcgagtcaagatccaggcaagatctagatcttgcattttgttaatataatctatagatttaactttcctgtttttaatttttgaagaaactaagttgtttgtcctatagaattgtccttcagtggattttactgaatgtatcctaatgggatcatgtacaccttttctgtcccctatatgttctataaactgacagatctagagggcttctgttgttctgttttgctttttcacaaaaataattcataggtgatatatgctccatgttgtatcacatcatggcacataatggctctcatcttgtaacattaagattgatagtgggtttggatgctgccagcccactccattcattacaaaagttctctatcagcttttcccctgatggatttagccatcattaatgatatttgcccacatctgggattccattagaggttgccaaccagtgatatcttgtcattccttctgcatctattagctggaatcctataaagaacttgtgctcattaattcacgaggcaggataaaatagaaatttcaaattctgattgaataggcgcccattttgaagtttctgtattgagagtcaggcctacagtaaaagtagcaatagaaagctgattgtttgaaaaaaaagaagcgggggggggagtgcaatataatcaacagactttcctttggctgaatcacttgattcagggcaatttttactacagttttatagataattgcttcaaatgtctaattcattttgatagtatagttacttgactacataatttcttcccagggttgtattttcaatttgttttctaacaaaaaacatagaaatagaacaactaggtcatgtactctgggcttagctctcacagttatgatcagtctcgtttcatttgtacccaaccccttgagttattttaaagcacgttccagctatcatatcacttcatgtataatatcttaatangtatctaaaagatagcttttttatgttttattttatttttattttttcagacaaagtattactctgtcgcccaggctggcatgcagtgagctgagatggcaccactgcaccccagcctgggcaacagagcaagactccatctcttaaaa

SEQ ID NO: 447288 - DNA, 8412 bp, Homo sapiens
  misc_feature (2128)..(2128): n is a, c, g, or t
  misc_feature (2285)..(2285): n is a, c, g, or t
  misc_feature (2293)..(2293): n is a, c, g, or t
  misc_feature (2331)..(2331): n is a, c, g, or t
  misc_feature (2383)..(2383): n is a, c, g, or t
  misc_feature (2385)..(2385): n is a, c, g, or t
  misc_feature (3991)..(3991): n is a, c, g, or t
cgcactcaattaaggtaatggtcctctgggtataaaaggtcaatttcttcttgccgcttttaagaataatcatctttgggtttcagaagtttaactgtgacatgaataggtacggttttccctcccgttatcccgcttgggaattttttgggtttttgcgtttttaaattaagcttttacttttttgaggtaatccctgagggccctcccgcgatatcctccacacacggcaagctcataaagaaagggttaaaaaaattaaaaggactcggccaatcttaccccgcctgtttacccaaaacatcacctttagcatcaccagtattagaggcaccgcctgccccgtgagccaagattacacccctgcaccccagcattggcgacaaaatgaggccattctcaaaaaaaaaaaaaaaaaaagctatggttactcttctcaaaaaatgcacggaaagtcacacaattttacatacagttttaaagggttcacagacccctggggagtagccattggtatagatagtttaacagtatcagaatatgaaaagggacttaagtaaatttcattttttctataattaactttttacttgaggcaaaaactttaaaagtttttaataacttttttaaatttcattctaggtgtgatccctcacatccacaaatctctgattggaaagaagggacagcagaaaactgcttagagggatgctttaaccaaccctcttcctccccgtcattgtactgtaactgggacagaagaaataatggggatatgtggaatttttaacaacagttaaatggaaaagcatagacaattactgtagacatgataaaagaaacatttgtatgttcttagactcgaagtttgataaaagtaccttttcatgtggtgacagttgtgtgttgattggctaggtttctcccgtgtgttttatacaaaaatggaattgataaaccattttttacaaaattaatttgtctcaaaactgttctgttcatgatgtattagaaatattttactcagactttaaatattttaaatctcagattggttattcagagtaaccttagaacagaaattgggaatatatctttacaatgattgataccatggtatattgactcttagatgctattgatctgtagcaccattttttacaaacgactaaggaaaaaacctgccaattaaatcatgatatgccatcaattatgagacatcccaatttgagagatgttagattatagaaaagtatgcatttatgactgaaatggtagtggaattatttgaattctacaccaagcacttaccatgtgccaggccctttgcagagtgctctactgaccaagaaagttgttcctgccacattatagatgtggagcctaagggtcacagaaattgtgtgctatgccaaaaaacattgaactggtagatagaaaatgacagagctaggattcaaacctagatctggctgactccagagcctagttttacctggaattgatgttcagtttatcaaaggtttctccttttggtttaaaatcccaatttttggcctggcattgtggtttacgcctgtaatcccaacacttcgggagaccgaggctggtggaacacttgaggtcaggagtttgagaccagcctggccaacatggtaaaacgccgtctcggccaggcgcggtggctcacgcctgtaatcccagcactttgggaggccaaggtgggtgaatcacgaggtcaggaaatcgagaccatcctggctaacatggtgaaaccccgtctctatttaaaaaaatacaaaaaattggccgggtgtggtggcacgcgcctgtggtcccagctactcaggaggctgaggcatgagaatgacgtgaacccgggaggcggagcttgcagtgagccaagatggcgccactgcactccagcttggcgactgagcaagactccctctcaaaacaaacaaaaaaaagtctctactaaaaatacagaaattagccaggcatggtacacacatgttgtcccaactacttggggcactggggcacaaaaaatcacttgaacccaggaggcagaggttgcagtgagccaagatcacgccactacactccagcctaggtgacagagtgngactctgtctcaaaaaaaaaaatcccaacttttagtagtctcttagtcatgcaataacagtaatttgtacaatcttttaaaaattatatttatttatcagtttctaagaaacttttttgtttgttttgagacaggctcttgctcttttgcccaggtngaagtgcngtggcatgatcctggctcactgcagcctccacctctcnggcccaagcaatcctcttacctcagccctgcaaatagctgggaccacaggcncntgccaccatacctggctaattttttttatttatgtaagagacagaggtctccctatgttgcccaggttggtattgaactcctggctcaagccatcctcccaccttggcctcccaaagtgctgggattataggcataagccaccatgccctgccctaagtaactgttacttgagttaatgtactagttaattgacccttagaaaattatatttttctgcttgcaagtcttcattaaagaaggaaattttaaaatattttatagtataatgctatccaaactcatttttaaaaacattttattatggaaattttcacaaatgcacaaaaagaatagcagaatgaagctctgtgtacccatcctccaacagctgtcctgtggtcagtcttgtttacctgcatccccacctatcccctgccccaacccacagggatcagtttgagtcccattaacaggcatagtattttcatgtttgtgtgatcagagacattcaaatataactccaaagatagggtacttttttgaacataaccacaataccattgtgtaagactgctaaaacattttttgatgccaagtaccagtcaatattcaaacttcctgattgtctcgtaagttttttttaacagttggtttattcgagtcaagatccaggcaagatctagatcttgcattttgttaatataatctatagatttaactttcctgtttttaatttttgaagaaactaagttgtttgtcctatagaattgtccttcagtggattttactgaatgtatcctaatgggatcatgtacaccttttctgtcccctatatgttctataaactgacagatctagagggcttctgttgttctgttttgctttttcacaaaaataattcataggtgatatatgctccatgttgtatcacatcatggcacataatggctctcatcttgtaacattaagattgatagtgggtttggatgctgccagcccactccattcattacaaaagttctctatcagcttttcccctgatggatttagccatcattaatgatatttgcccacatctgggattccattagaggttgccaaccagtgatatcttgtcattccttctgcatctattagctggaatcctataaagaacttgtgctcattaattcacgaggcaggataaaatagaaatttcaaattctgattgaataggcgcccattttgaagtttctgtattgagagtcaggcctacagtaaaagtagcaatagaaagctgattgtttgaaaaaaaagaagcgggggggggagtgcaatataatcaacagactttcctttggctgaatcacttgattcagggcaatttttactacagttttatagataattgcttcaaatgtctaattcattttgatagtatagttacttgactacataatttcttcccagggttgtattttcaatttgttttctaacaaaaaacatagaaatagaacaactaggtcatgtactctgggcttagctctcacagttatgatcagtctcgtttcatttgtacccaaccccttgagttattttaaagcacgttccagctatcatatcacttcatgtataatatcttaatangtatctaaaagatagcttttttatgttttattttatttttattttttcagacaaagtattactctgtcgcccaggctggcatgcagtggcacaatctcagctcactgcaacctccacctcccaggttcaagtgattcttctgcctcagcctcctgagtagctggcattacaggtgcctgccaccatgcctggctaatgtttgtttgttcttttgtttttgtttctgagacaggatctcactctgttgcctaggctggagtccaatagcctaatcttggctcactgcaacctcagcctcccaggcaactgggactacaggcatgcgccaccatgcccagctaatctgtgtgtgttttttgtttgtttgtttatttgtgtagtagagatggggtttcaccatgttggccaggctggtctcaaactcctgacctcaagtgatccacccgcctcagcctcccaaagtgctgggattacaggcatgagccactgtgcctggcgtagaaagtatttcttataattaaaaacaacacccagtctaactagtataacacctaaaaaattgtcagatctgtattttagatagtacgacacagtgaaatgcaatggcacttaagcagagagaagaaggatttttctttttctttttttaaatagaaggtgttagaacctgaactgggcctggtttgcatttgggaagagtccagtggggaaacaacacaaataaggtcttgagaatgaagaattgcatttatatagggagttgtaacaaatggcctggagagtatctgactctttatgaaacatttaatgagaaatgtgacttgctttggtgcctatggttgaatttgttgcgatgcttctgacattatgaaaattttcaaacatgcaaaaaagttccagtagttatccagtgaattcttatactcaccacctatatctatagttaacattttacttgtattttatccagttatcagctcatctatgagatggcccttatttatttgcctgctgtttttattctctatttgtcctgttatttcttgttagagaagagaaggtgttcttagatcagaagatgccattgtattaggtgacggcaaggttttgctgatttagtggaacaagattctactgggatgtgtgctgagctgaaccaaggaactgcccgaatgtgctgaacaaggacatttgcttctcagatacgtgaattcaattttaagcaagattcttgatctgcttcagagcagctttgatttaaagtaatttcagagcacttttccttgcatgagtaattttctgaatgtataaaatattctatttatgtttgaccttttggataaactgtgttgctgcagtgttggtccacactaccatcctaagtgaagacttagtaagtctgaggatctccaggcactggaaagagtgagaacctgggagtgaaagggttatagttagtgttcatttttcgggttttgtttcatagggagtcctgagtggggtaacctgaaatgttttaacagttgaagatcatcccattcctatccccagtaaaaataggcctttccacaatcttctaccagttaacttagcttttttttttttttttccttaatagagtctcattcttgtcacccagactggagtgcgatggcacgatcttggctcactgcaaccctccctcccgggttccagcgattctcctgcctcagcctcccaagtagctgggattacaggcgcacgccaccatgcccagctaatttttgtatttttagtagacgtggggtttcaccatgttggccagactggtctcaaactcctgacctcaggcgatccgcccgtctaagccttccaaagtgctgggattactggcaggaaccaccaggcccagccaaccagcatttcttaaggtgaaaatacatggtgttaatttatattttgagtgagacccagtccagctgctataactgcttggacacttggcagaggacagagtactgcaaaagtgtctaagggagacagcattttgccttgggtgctgtagatgtacaagagaggttccaggagggggtgataggcagaattttggtccccatcaccttccctgcccagtgttatgcctatgaatgtgttacattatgtggtaaaagggactttgcagatgtaactaaaatttctaaaatagagatattatcctggattacctgggggaacccagtgtaattacatgaacccttaaaaatggaagaggatgcaggagtcagattcaaaggaaggcccaaggtgctattgctgacttgaagatagaggggccatgtggaaatcaagagaaggaagtgaatccttccagtgagcttggaagagagcaccttgaggcacagatgagaagcttggccttacctgatgccttgattttagcctggtgagaccccgagcatataaatttgctgtgctatgccacacttctcacctacagaaacttagtttaaagccactaagtttgtggtaatttgttggctttaggcccctgagggtagagatttatggcttgtgttacaagtagagagcagtggagagttgggctttgtaattctttcaagggtgattgtagttctggagtcctatctacctgggttcagatctttgttggccagtccctggctgtgtgacttcactgctttaagcctctgtcttcatccttaaagtggcgatgatagtacctacctcactctgatctctgaatgagaacacatgtaagacacttagcacagttcctggtgctcaaagagttccaacacctgaaagcaccatggccctgtttgtttttcagtcaagatttctaaaagccgttattaccagaggttcagtgagaacatgggcagggtaaactcaaaatggagaacataaaaactgggactcccagaccagtcacttagaagactgctgcaggaagtaccaaggtcgttaagaatcagtaataataataagtaatgtgtgaatccattagaatgttgagaagtagacctttgacatttcagaaaaatgtatatctcagacacagccatatgtattgttatccctgagttggaagagcatcacagggcatagtttcacaaaagcttcaaaaaatatactaattgctggtaatatgtgaactaacagaaaaaaatagccatgttaaaataggagtgcctgacaattagctctattcatcttgtctcctagctgtaagcaccctagattcaaattatgcacctagaaaactaaattactatgtatgttataggcctttgaaatggatacatgaaaattagtgaaatcagaatgaacgtttcgcctgccaaagatatgtatttttataagtgatacaagggccccatgagctccatggccacatctgtacaaaacaggccctcctttcaggaactggtctcgagagagcaaaggggtcaactccctaaatggcagctgagacagtcctccctggtggcatggccctgtttcctgttgatatggtgatagttggagagtcaaatttttaccagaatttgtgaatatcatctctggttaatgattacacaaaaccttttaaaattttaaaaaattatttctaattctataaataaactctgcagttgtacagccactgtacagctaacatctcaacactggaaatgaggctggtttcttccagtttggctcagattcttcagggaagcccagttaagacaaacagctctctatactcaatccttactttgctgagaagatacaggcctgcccactcgctcccacctgctcttcatgaggagtcctttattcctgcatgtttcctgttctttgggacctttaggagctaacctccacagatgctgatagtctgtagagtcaggaataccatgtaacatgttgaagtagactaaagattagttctttggcaatagcccagtctggacttactatgtacttttgaaaataaaactgcttatttgtaaactctgtaattaggaccttttgctatttgagttatattcctttctaacttcaaacgtctgcattcatgtataatagccattttatgcacagatgaggtgattcccacacttcttttcgcagatgtttcattatctggatgagtgtattacataataaatttgaataatggtagtcttccaaatgacaaaaagcaagctagttgatttgtcaattttgagtttaaatgttttgactgcttatcagcaaaaaaaatcaaagaatagcatactaatattaatggaaatgcagagtatatttaattggcatgattttttcatggatgtgtgcttcatttgatctattgtatgtagctcgtgatcacattttctgttggttaacattgttcctagcttatatgatggaattaaatatattctgtgtaaaaa

SEQ ID NO: 447289 - DNA, 8413 bp, Homo sapiens
  misc_feature (2129)..(2129): n is a, c, g, or t
  misc_feature (2286)..(2286): n is a, c, g, or t
  misc_feature (2294)..(2294): n is a, c, g, or t
  misc_feature (2332)..(2332): n is a, c, g, or t
  misc_feature (2384)..(2384): n is a, c, g, or t
  misc_feature (2386)..(2386): n is a, c, g, or t
  misc_feature (3992)..(3992): n is a, c, g, or t
ggaaagggttgaaataaatacacttgaaaagtgggtcaggatcaatgaaagtgagaggtaagttggtggttcttaatcttctttggataaccctcaaagaacctcgtgaaagctgtggttacagctgggcacggtggctcacacctgtaatctcagcactttgggaggctgagaggccccggatcacccgaggtcaggagttcaagaccagcctggccaacgtggtgaaaccccatctctactaaaaatacaaaaattagctgggcgtggtggtgcacacctgtagtcccagctactcaggaggctgaggtaggagaatcacttgaacccaggacagaggtcgcagtgagccaagattacacccctgcaccccagcattggcgacaaaatgaggccattctcaaaaaaaaaaaaaaaaaaagctatggttactcttctcaaaaaatgcacggaaagtcacacaattttacatacagttttaaagggttcacagacccctggggagtagccattggtatagatagtttaacagtatcagaatatgaaaagggacttaagtaaatttcattttttctataattaactttttacttgaggcaaaaactttaaaagtttttaataacttttttaaatttcattctaggtgtgatccctcacatccacaaatctctgattggaaagaagggacagcagaaaactgcttagagggatgctttaaccaaccctcttcctccccgtcattgtactgtaactgggacagaagaaataatggggatatgtggaatttttaacaacagttaaatggaaaagcatagacaattactgtagacatgataaaagaaacatttgtatgttcttagactcgaagtttgataaaagtaccttttcatgtggtgacagttgtgtgttgattggctaggtttctcccgtgtgttttatacaaaaatggaattgataaaccattttttacaaaattaatttgtctcaaaactgttctgttcatgatgtattagaaatattttactcagactttaaatattttaaatctcagattggttattcagagtaaccttagaacagaaattgggaatatatctttacaatgattgataccatggtatattgactcttagatgctattgatctgtagcaccattttttacaaacgactaaggaaaaaacctgccaattaaatcatgatatgccatcaattatgagacatcccaatttgagagatgttagattatagaaaagtatgcatttatgactgaaatggtagtggaattatttgaattctacaccaagcacttaccatgtgccaggccctttgcagagtgctctactgaccaagaaagttgttcctgccacattatagatgtggagcctaagggtcacagaaattgtgtgctatgccaaaaaacattgaactggtagatagaaaatgacagagctaggattcaaacctagatctggctgactccagagcctagttttacctggaattgatgttcagtttatcaaaggtttctccttttggtttaaaatcccaatttttggcctggcattgtggtttacgcctgtaatcccaacacttcgggagaccgaggctggtggaacacttgaggtcaggagtttgagaccagcctggccaacatggtaaaacgccgtctcggccaggcgcggtggctcacgcctgtaatcccagcactttgggaggccaaggtgggtgaatcacgaggtcaggaaatcgagaccatcctggctaacatggtgaaaccccgtctctatttaaaaaaatacaaaaaattggccgggtgtggtggcacgcgcctgtggtcccagctactcaggaggctgaggcatgagaatgacgtgaacccgggaggcggagcttgcagtgagccaagatggcgccactgcactccagcttggcgactgagcaagactccctctcaaaacaaacaaaaaaaagtctctactaaaaatacagaaattagccaggcatggtacacacatgttgtcccaactacttggggcactggggcacaaaaaatcacttgaacccaggaggcagaggttgcagtgagccaagatcacgccactacactccagcctaggtgacagagtgngactctgtctcaaaaaaaaaaatcccaacttttagtagtctcttagtcatgcaataacagtaatttgtacaatcttttaaaaattatatttatttatcagtttctaagaaacttttttgtttgttttgagacaggctcttgctcttttgcccaggtngaagtgcngtggcatgatcctggctcactgcagcctccacctctcnggcccaagcaatcctcttacctcagccctgcaaatagctgggaccacaggcncntgccaccatacctggctaattttttttatttatgtaagagacagaggtctccctatgttgcccaggttggtattgaactcctggctcaagccatcctcccaccttggcctcccaaagtgctgggattataggcataagccaccatgccctgccctaagtaactgttacttgagttaatgtactagttaattgacccttagaaaattatatttttctgcttgcaagtcttcattaaagaaggaaattttaaaatattttatagtataatgctatccaaactcatttttaaaaacattttattatggaaattttcacaaatgcacaaaaagaatagcagaatgaagctctgtgtacccatcctccaacagctgtcctgtggtcagtcttgtttacctgcatccccacctatcccctgccccaacccacagggatcagtttgagtcccattaacaggcatagtattttcatgtttgtgtgatcagagacattcaaatataactccaaagatagggtacttttttgaacataaccacaataccattgtgtaagactgctaaaacattttttgatgccaagtaccagtcaatattcaaacttcctgattgtctcgtaagttttttttaacagttggtttattcgagtcaagatccaggcaagatctagatcttgcattttgttaatataatctatagatttaactttcctgtttttaatttttgaagaaactaagttgtttgtcctatagaattgtccttcagtggattttactgaatgtatcctaatgggatcatgtacaccttttctgtcccctatatgttctataaactgacagatctagagggcttctgttgttctgttttgctttttcacaaaaataattcataggtgatatatgctccatgttgtatcacatcatggcacataatggctctcatcttgtaacattaagattgatagtgggtttggatgctgccagcccactccattcattacaaaagttctctatcagcttttcccctgatggatttagccatcattaatgatatttgcccacatctgggattccattagaggttgccaaccagtgatatcttgtcattccttctgcatctattagctggaatcctataaagaacttgtgctcattaattcacgaggcaggataaaatagaaatttcaaattctgattgaataggcgcccattttgaagtttctgtattgagagtcaggcctacagtaaaagtagcaatagaaagctgattgtttgaaaaaaaagaagcgggggggggagtgcaatataatcaacagactttcctttggctgaatcacttgattcagggcaatttttactacagttttatagataattgcttcaaatgtctaattcattttgatagtatagttacttgactacataatttcttcccagggttgtattttcaatttgttttctaacaaaaaacatagaaatagaacaactaggtcatgtactctgggcttagctctcacagttatgatcagtctcgtttcatttgtacccaaccccttgagttattttaaagcacgttccagctatcatatcacttcatgtataatatcttaatangtatctaaaagatagcttttttatgttttattttatttttattttttcagacaaagtattactctgtcgcccaggctggcatgcagtggcacaatctcagctcactgcaacctccacctcccaggttcaagtgattcttctgcctcagcctcctgagtagctggcattacaggtgcctgccaccatgcctggctaatgtttgtttgttcttttgtttttgtttctgagacaggatctcactctgttgcctaggctggagtccaatagcctaatcttggctcactgcaacctcagcctcccaggcaactgggactacaggcatgcgccaccatgcccagctaatctgtgtgtgttttttgtttgtttgtttatttgtgtagtagagatggggtttcaccatgttggccaggctggtctcaaactcctgacctcaagtgatccacccgcctcagcctcccaaagtgctgggattacaggcatgagccactgtgcctggcgtagaaagtatttcttataattaaaaacaacacccagtctaactagtataacacctaaaaaattgtcagatctgtattttagatagtacgacacagtgaaatgcaatggcacttaagcagagagaagaaggatttttctttttctttttttaaatagaaggtgttagaacctgaactgggcctggtttgcatttgggaagagtccagtggggaaacaacacaaataaggtcttgagaatgaagaattgcatttatatagggagttgtaacaaatggcctggagagtatctgactctttatgaaacatttaatgagaaatgtgacttgctttggtgcctatggttgaatttgttgcgatgcttctgacattatgaaaattttcaaacatgcaaaaaagttccagtagttatccagtgaattcttatactcaccacctatatctatagttaacattttacttgtattttatccagttatcagctcatctatgagatggcccttatttatttgcctgctgtttttattctctatttgtcctgttatttcttgttagagaagagaaggtgttcttagatcagaagatgccattgtattaggtgacggcaaggttttgctgatttagtggaacaagattctactgggatgtgtgctgagctgaaccaaggaactgcccgaatgtgctgaacaaggacatttgcttctcagatacgtgaattcaattttaagcaagattcttgatctgcttcagagcagctttgatttaaagtaatttcagagcacttttccttgcatgagtaattttctgaatgtataaaatattctatttatgtttgaccttttggataaactgtgttgctgcagtgttggtccacactaccatcctaagtgaagacttagtaagtctgaggatctccaggcactggaaagagtgagaacctgggagtgaaagggttatagttagtgttcatttttcgggttttgtttcatagggagtcctgagtggggtaacctgaaatgttttaacagttgaagatcatcccattcctatccccagtaaaaataggcctttccacaatcttctaccagttaacttagcttttttttttttttttccttaatagagtctcattcttgtcacccagactggagtgcgatggcacgatcttggctcactgcaaccctccctcccgggttccagcgattctcctgcctcagcctcccaagtagctgggattacaggcgcacgccaccatgcccagctaatttttgtatttttagtagacgtggggtttcaccatgttggccagactggtctcaaactcctgacctcaggcgatccgcccgtctaagccttccaaagtgctgggattactggcaggaaccaccaggcccagccaaccagcatttcttaaggtgaaaatacatggtgttaatttatattttgagtgagacccagtccagctgctataactgcttggacacttggcagaggacagagtactgcaaaagtgtctaagggagacagcattttgccttgggtgctgtagatgtacaagagaggttccaggagggggtgataggcagaattttggtccccatcaccttccctgcccagtgttatgcctatgaatgtgttacattatgtggtaaaagggactttgcagatgtaactaaaatttctaaaatagagatattatcctggattacctgggggaacccagtgtaattacatgaacccttaaaaatggaagaggatgcaggagtcagattcaaaggaaggcccaaggtgctattgctgacttgaagatagaggggccatgtggaaatcaagagaaggaagtgaatccttccagtgagcttggaagagagcaccttgaggcacagatgagaagcttggccttacctgatgccttgattttagcctggtgagaccccgagcatataaatttgctgtgctatgccacacttctcacctacagaaacttagtttaaagccactaagtttgtggtaatttgttggctttaggcccctgagggtagagatttatggcttgtgttacaagtagagagcagtggagagttgggctttgtaattctttcaagggtgattgtagttctggagtcctatctacctgggttcagatctttgttggccagtccctggctgtgtgacttcactgctttaagcctctgtcttcatccttaaagtggcgatgatagtacctacctcactctgatctctgaatgagaacacatgtaagacacttagcacagttcctggtgctcaaagagttccaacacctgaaagcaccatggccctgtttgtttttcagtcaagatttctaaaagccgttattaccagaggttcagtgagaacatgggcagggtaaactcaaaatggagaacataaaaactgggactcccagaccagtcacttagaagactgctgcaggaagtaccaaggtcgttaagaatcagtaataataataagtaatgtgtgaatccattagaatgttgagaagtagacctttgacatttcagaaaaatgtatatctcagacacagccatatgtattgttatccctgagttggaagagcatcacagggcatagtttcacaaaagcttcaaaaaatatactaattgctggtaatatgtgaactaacagaaaaaaatagccatgttaaaataggagtgcctgacaattagctctattcatcttgtctcctagctgtaagcaccctagattcaaattatgcacctagaaaactaaattactatgtatgttataggcctttgaaatggatacatgaaaattagtgaaatcagaatgaacgtttcgcctgccaaagatatgtatttttataagtgatacaagggccccatgagctccatggccacatctgtacaaaacaggccctcctttcaggaactggtctcgagagagcaaaggggtcaactccctaaatggcagctgagacagtcctccctggtggcatggccctgtttcctgttgatatggtgatagttggagagtcaaatttttaccagaatttgtgaatatcatctctggttaatgattacacaaaaccttttaaaattttaaaaaattatttctaattctataaataaactctgcagttgtacagccactgtacagctaacatctcaacactggaaatgaggctggtttcttccagtttggctcagattcttcagggaagcccagttaagacaaacagctctctatactcaatccttactttgctgagaagatacaggcctgcccactcgctcccacctgctcttcatgaggagtcctttattcctgcatgtttcctgttctttgggacctttaggagctaacctccacagatgctgatagtctgtagagtcaggaataccatgtaacatgttgaagtagactaaagattagttctttggcaatagcccagtctggacttactatgtacttttgaaaataaaactgcttatttgtaaactctgtaattaggaccttttgctatttgagttatattcctttctaacttcaaacgtctgcattcatgtataatagccattttatgcacagatgaggtgattcccacacttcttttcgcagatgtttcattatctggatgagtgtattacataataaatttgaataatggtagtcttccaaatgacaaaaagcaagctagttgatttgtcaattttgagtttaaatgttttgactgcttatcagcaaaaaaaatcaaagaatagcatactaatattaatggaaatgcagagtatatttaattggcatgattttttcatggatgtgtgcttcatttgatctattgtatgtagctcgtgatcacattttctgttggttaacattgttcctagcttatatgatggaattaaatatattctgtgtaaaaa

SEQ ID NO: 447290 - DNA, 1341 bp, Homo sapiens
tggggttcgaaccagcaagacaagcgggcatggccacagcagcgcgaggcgggcacggggtattgtccggctccggcggcggcggtcggtgctgcgagagcggcggcggcggcgcgggtcggcagcgggagggcgcgcggccgagcggaggcggagtcggcgccgagaacatggctggaggcaaagctggaaaggacagtgggaaggccaaggctaaggcagtatctcgctcacagagagctgggctacagtttcctgtgggccgcatccacagacacttgaagactcgcaccacaagccatggaagggtgggtgccactgctgccgtgtacagtgctgcgattctggagtacctcactgcagaggtgctggagctggcaggtaatgcttctaaggatctcaaagtaaagcgtatcactccgcgtcacttgcagcttgcaatccgtggtgatgaagagttggattctcttatcaaggctaccatagctgggggtggtgtgatccctcacatccacaaatctctgattggaaagaagggacagcagaaaactgcttagagggatgctttaaccaaccctcttcctccccgtcattgtactgtaactgggacagaagaaataatggggatatgtggaatttttaacaacagttaaatggaaaagcatagacaattactgtagacatgataaaagaaacatttgtatgttcttagactcgaagtttgataaaagtaccttttcatgtggtgacagttgtgtgttgattggctaggtttctcccgtgtgttttatacaaaaatggaattgataaaccattttttacaaaattaatttgtctcaaaactgttctgttcatgatgtattagaaatattttactcagactttaaatattttaaatctcagattggttattcagagtaaccttagaacagaaattgggaatatatctttacaatgattgataccatggtatattgactcttagatgctattgatctgtagcaccattttttacaaacgactaaggaaaaaacctgccaattaaatcatgatatgccatcaattatgagacatcccaatttgagagatgttagattatagaaaagtatgcatttatgactgaaatggtagtggaattatttgaattctacaccaagcacttaccatgtgccaggccctttgcagagtgctctactgaccaagaaagttgttcctgccctaaagtaaccggttacctgacgttcactgtactaggtaaattgaccccttagacacttctactctctgcggtttgcacagtctccattaccgaagggcaacttctaaactatctaaagaatg

SEQ ID NO: 447291 - DNA, 3866 bp, Homo sapiens
tggggttcgaaccagcaagacaagcgggcatggccacagcagcgcgaggcgggcacggggtattgtccggctccggcggcggcggtcggtgctgcgagagcggcggcggcggcgcgggtcggcagcgggagggcgcgcggccgagcggaggcggagtcggcgccgagaacatggctggaggcaaagctggaaaggacagtgggaaggccaaggctaaggcagtatctcgctcacagagagctgggctacagtttcctgtgggccgcatccacagacacttgaagactcgcaccacaagccatggaagggtgggtgccactgctgccgtgtacagtgctgcgattctggagtacctcactgcagaggtgctggagctggcaggtaatgcttctaaggatctcaaagtaaagcgtatcactccgcgtcacttgcagcttgcaatccgtggtgatgaagagttggattctcttatcaaggctaccatagctgggggtgagaagagaaggtgttcttagatcagaagatgccattgtattaggtgacggcaaggttttgctgatttagtggaacaagattctactgggatgtgtgctgagctgaaccaaggaactgcccgaatgtgctgaacaaggacatttgcttctcagatacgtgaattcaattttaagcaagattcttgatctgcttcagagcagctttgatttaaagtaatttcagagcacttttccttgcatgagtaattttctgaatgtataaaatattctatttatgtttgaccttttggataaactgtgttgctgcagtgttggtccacactaccatcctaagtgaagacttagtaagtctgaggatctccaggcactggaaagagtgagaacctgggagtgaaagggttatagttagtgttcatttttcgggttttgtttcatagggagtcctgagtggggtaacctgaaatgttttaacagttgaagatcatcccattcctatccccagtaaaaataggcctttccacaatcttctaccagttaacttagcttttttttttttttttccttaatagagtctcattcttgtcacccagactggagtgcgatggcacgatcttggctcactgcaaccctccctcccgggttccagcgattctcctgcctcagcctcccaagtagctgggattacaggcgcacgccaccatgcccagctaatttttgtatttttagtagacgtggggtttcaccatgttggccagactggtctcaaactcctgacctcaggcgatccgcccgtctaagccttccaaagtgctgggattactggcaggaaccaccaggcccagccaaccagcatttcttaaggtgaaaatacatggtgttaatttatattttgagtgagacccagtccagctgctataactgcttggacacttggcagaggacagagtactgcaaaagtgtctaagggagacagcattttgccttgggtgctgtagatgtacaagagaggttccaggagggggtgataggcagaattttggtccccatcaccttccctgcccagtgttatgcctatgaatgtgttacattatgtggtaaaagggactttgcagatgtaactaaaatttctaaaatagagatattatcctggattacctgggggaacccagtgtaattacatgaacccttaaaaatggaagaggatgcaggagtcagattcaaaggaaggcccaaggtgctattgctgacttgaagatagaggggccatgtggaaatcaagagaaggaagtgaatccttccagtgagcttggaagagagcaccttgaggcacagatgagaagcttggccttacctgatgccttgattttagcctggtgagaccccgagcatataaatttgctgtgctatgccacacttctcacctacagaaacttagtttaaagccactaagtttgtggtaatttgttggctttaggcccctgagggtagagatttatggcttgtgttacaagtagagagcagtggagagttgggctttgtaattctttcaagggtgattgtagttctggagtcctatctacctgggttcagatctttgttggccagtccctggctgtgtgacttcactgctttaagcctctgtcttcatccttaaagtggcgatgatagtacctacctcactctgatctctgaatgagaacacatgtaagacacttagcacagttcctggtgctcaaagagttccaacacctgaaagcaccatggccctgtttgtttttcagtcaagatttctaaaagccgttattaccagaggttcagtgagaacatgggcagggtaaactcaaaatggagaacataaaaactgggactcccagaccagtcacttagaagactgctgcaggaagtaccaaggtcgttaagaatcagtaataataataagtaatgtgtgaatccattagaatgttgagaagtagacctttgacatttcagaaaaatgtatatctcagacacagccatatgtattgttatccctgagttggaagagcatcacagggcatagtttcacaaaagcttcaaaaaatatactaattgctggtaatatgtgaactaacagaaaaaaatagccatgttaaaataggagtgcctgacaattagctctattcatcttgtctcctagctgtaagcaccctagattcaaattatgcacctagaaaactaaattactatgtatgttataggcctttgaaatggatacatgaaaattagtgaaatcagaatgaacgtttcgcctgccaaagatatgtatttttataagtgatacaagggccccatgagctccatggccacatctgtacaaaacaggccctcctttcaggaactggtctcgagagagcaaaggggtcaactccctaaatggcagctgagacagtcctccctggtggcatggccctgtttcctgttgatatggtgatagttggagagtcaaatttttaccagaatttgtgaatatcatctctggttaatgattacacaaaaccttttaaaattttaaaaaattatttctaattctataaataaactctgcagttgtacagccactgtacagctaacatctcaacactggaaatgaggctggtttcttccagtttggctcagattcttcagggaagcccagttaagacaaacagctctctatactcaatccttactttgctgagaagatacaggcctgcccactcgctcccacctgctcttcatgaggagtcctttattcctgcatgtttcctgttctttgggacctttaggagctaacctccacagatgctgatagtctgtagagtcaggaataccatgtaacatgttgaagtagactaaagattagttctttggcaatagcccagtctggacttactatgtacttttgaaaataaaactgcttatttgtaaactctgtaattaggaccttttgctatttgagttatattcctttctaacttcaaacgtctgcattcatgtataatagccattttatgcacagatgaggtgattcccacacttcttttcgcagatgtttcattatctggatgagtgtattacataataaatttgaataatggtagtcttccaaatgacaaaaagcaagctagttgatttgtcaattttgagtttaaatgttttgactgcttatcagcaaaaaaaatcaaagaatagcatactaatattaatggaaatgcagagtatatttaattggcatgattttttcatggatgtgtgcttcatttgatctattgtatgtagctcgtgatcacattttctgttggttaacattgttcctagcttatatgatggaattaaatatattctgtgtaaaaa

SEQ ID NO: 447292 - DNA, 3311 bp, Homo sapiens
cgcactcaattaaggtaatggtcctctgggtataaaaggtcaatttcttcttgccgcttttaagaataatcatctttgggtttcagaagtttaactgtgacatgaataggtacggttttccctcccgttatcccgcttgggaattttttgggtttttgcgtttttaaattaagcttttacttttttgaggtaatccctgagggccctcccgcgatatcctccacacacggcaagctcataaagaaagggttaaaaaaattaaaaggactcggccaatcttaccccgcctgtttacccaaaacatcacctttagcatcaccagtattagaggcaccgcctgccccgtgagccaagattacacccctgcaccccagcattggcgacaaaatgaggccattctcaaaaaaaaaaaaaaaaaaagctatggttactcttctcaaaaaatgcacggaaagtcacacaattttacatacagttttaaagggttcacagacccctggggagtagccattggtatagatagtttaacagtatcagaatatgaaaagggacttaagtaaatttcattttttctataattaactttttacttgaggcaaaaactttaaaagtttttaataacttttttaaatttcattctaggtgtgatccctcacatccacaaatctctgattggaaagaagggacagcagaaaactgcttagagggatgctttaaccaaccctcttcctccccgtcattgtactgtaatgggattactggcaggaaccaccaggcccagccaaccagcatttcttaaggtgaaaatacatggtgttaatttatattttgagtgagacccagtccagctgctataactgcttggacacttggcagaggacagagtactgcaaaagtgtctaagggagacagcattttgccttgggtgctgtagatgtacaagagaggttccaggagggggtgataggcagaattttggtccccatcaccttccctgcccagtgttatgcctatgaatgtgttacattatgtggtaaaagggactttgcagatgtaactaaaatttctaaaatagagatattatcctggattacctgggggaacccagtgtaattacatgaacccttaaaaatggaagaggatgcaggagtcagattcaaaggaaggcccaaggtgctattgctgacttgaagatagaggggccatgtggaaatcaagagaaggaagtgaatccttccagtgagcttggaagagagcaccttgaggcacagatgagaagcttggccttacctgatgccttgattttagcctggtgagaccccgagcatataaatttgctgtgctatgccacacttctcacctacagaaacttagtttaaagccactaagtttgtggtaatttgttggctttaggcccctgagggtagagatttatggcttgtgttacaagtagagagcagtggagagttgggctttgtaattctttcaagggtgattgtagttctggagtcctatctacctgggttcagatctttgttggccagtccctggctgtgtgacttcactgctttaagcctctgtcttcatccttaaagtggcgatgatagtacctacctcactctgatctctgaatgagaacacatgtaagacacttagcacagttcctggtgctcaaagagttccaacacctgaaagcaccatggccctgtttgtttttcagtcaagatttctaaaagccgttattaccagaggttcagtgagaacatgggcagggtaaactcaaaatggagaacataaaaactgggactcccagaccagtcacttagaagactgctgcaggaagtaccaaggtcgttaagaatcagtaataataataagtaatgtgtgaatccattagaatgttgagaagtagacctttgacatttcagaaaaatgtatatctcagacacagccatatgtattgttatccctgagttggaagagcatcacagggcatagtttcacaaaagcttcaaaaaatatactaattgctggtaatatgtgaactaacagaaaaaaatagccatgttaaaataggagtgcctgacaattagctctattcatcttgtctcctagctgtaagcaccctagattcaaattatgcacctagaaaactaaattactatgtatgttataggcctttgaaatggatacatgaaaattagtgaaatcagaatgaacgtttcgcctgccaaagatatgtatttttataagtgatacaagggccccatgagctccatggccacatctgtacaaaacaggccctcctttcaggaactggtctcgagagagcaaaggggtcaactccctaaatggcagctgagacagtcctccctggtggcatggccctgtttcctgttgatatggtgatagttggagagtcaaatttttaccagaatttgtgaatatcatctctggttaatgattacacaaaaccttttaaaattttaaaaaattatttctaattctataaataaactctgcagttgtacagccactgtacagctaacatctcaacactggaaatgaggctggtttcttccagtttggctcagattcttcagggaagcccagttaagacaaacagctctctatactcaatccttactttgctgagaagatacaggcctgcccactcgctcccacctgctcttcatgaggagtcctttattcctgcatgtttcctgttctttgggacctttaggagctaacctccacagatgctgatagtctgtagagtcaggaataccatgtaacatgttgaagtagactaaagattagttctttggcaatagcccagtctggacttactatgtacttttgaaaataaaactgcttatttgtaaactctgtaattaggaccttttgctatttgagttatattcctttctaacttcaaacgtctgcattcatgtataatagccattttatgcacagatgaggtgattcccacacttcttttcgcagatgtttcattatctggatgagtgtattacataataaatttgaataatggtagtcttccaaatgacaaaaagcaagctagttgatttgtcaattttgagtttaaatgttttgactgcttatcagcaaaaaaaatcaaagaatagcatactaatattaatggaaatgcagagtatatttaattggcatgattttttcatggatgtgtgcttcatttgatctattgtatgtagctcgtgatcacattttctgttggttaacattgttcctagcttatatgatggaattaaatatattctgtgtaaaaa

SEQ ID NO: 447293 - DNA, 966 bp, Homo sapiens
  misc_feature (778)..(778): n is a, c, g, or t
  misc_feature (780)..(780): n is a, c, g, or t
tggggttcgaaccagcaagacaagcgggcatggccacagcagcgcgaggcgggcacggggtattgtccggctccggcggcggcggtcggtgctgcgagagcggcggcggcggcgcgggtcggcagcgggagggcgcgcggccgagcggaggcggagtcggcgccgagaacatggctggaggcaaagctggaaaggacagtgggaaggccaaggctaaggcagtatctcgctcacagagagctgggctacagtttcctgtgggccgcatccacagacacttgaagactcgcaccacaagccatggaagggtgggtgccactgctgccgtgtacagtgctgcgattctggagtacctcactgcagaggtgctggagctggcaggtaatgcttctaaggatctcaaagtaaagcgtatcactccgcgtcacttgcagcttgcaatccgtggtgatgaagagttggattctcttatcaaggctaccatagctgggggtggtgtgatccctcacatccacaaatctctgattggaaagaagggacagcagaaaactgcttagagggatgctttaaccaaccctcttcctccccgtcattgtactgtaactgggacagaagaaataatggggatatgtggaatttttaacaacagttaaatggaaaagcatagacaattactgtagacatgataaaagaaacatttgtatgttcttagactcgaagtttgataaaagtaccttttcatgtggtgaaaaaaaaaaaaaaaaaaaaaaaaaaacancnacacacaaaaaaaaaccacaggaacaacatgcccgaggggagaaaacagggtgaaaaaaacggcagagggggccagacgcgcagagccacgagaacccaatcacggcgacccacggggcacacaacgggcgagacccccacaaaagagggccggcacaaacaccgaacaccgggtcacgacggcac

SEQ ID NO: 447294 - DNA, 705 bp, Homo sapiens
tggggttcgaaccagcaagacaagcgggcatggccacagcagcgcgaggcgggcacggggtattgtccggctccggcggcggcggtcggtgctgcgagagcggcggcggcggcgcgggtcggcagcgggagggcgcgcggccgagcggaggcggagtcggcgccgagaacatggctggaggcaaagctggaaaggacagtgggaaggccaaggctaaggcagtatctcgctcacagagagctgggctacagtttcctgtgggccgcatccacagacacttgaagactcgcaccacaagccatggaagggtgggtgccactgctgccgtgtacagtgctgcgattctggagtacctcactgcagaggtgctggagctggcaggtaatgcttctaaggatctcaaagtaaagcgtatcactccgcgtcacttgcagcttgcaatccgtggtgatgaagagttggattctcttatcaaggctaccatagctgggggtggtatgtattactacttaagccttgattcttattggtctttctgactaatatatcgttcagatcaatgatatagtatatttgatcggttaactagaaagcatataaactttaatttcataaatactaaatctataacaattctaagcttttcataatgatctgaataaatatttcaccttctagccatatgtaatgctatttttattttag

SEQ ID NO: 447295 - DNA, 630 bp, Homo sapiens
gtttgggtttcagtcagatttaaaacttgcacctggtctgaaaacaagaaggcaagtttgatcagggccgtaggtgaacagcgggatactcttcttggcgacgctggcaacttgcagctcgggccgaatcggcacgaggttctttggcaatagcccagtctggacttactatgtacttttgaaaataaaactgcttatttgtaaactctgtaattaggaccttttgctatttgagttatattcctttctaacttcaaacgtctgcattcatgtataatagccattttatgcacagatgaggtgattcccacacttcttttcgcagatgtttcattatctggatgagtgtattacataataaatttgaataatggtagtcttccaaatgacaaaaagcaagctagttgatttgtcaattttgagtttaaatgttttgactgcttatcagcaaaaaaaatcaaagaatagcatactaatattaatggaaatgcagagtatatttaattggcatgattttttcatggatgtgtgcttcatttgatctattgtatgtagctcgtgatcacattttctgttggttaacattgttcctagcttatatgatggaattaaatatattctgtgtaaaaa

SEQ ID NO: 447296 - DNA, 8117 bp, Homo sapiens
  misc_feature (6)..(6): n is a, c, g, or t
  misc_feature (1833)..(1833): n is a, c, g, or t
  misc_feature (1990)..(1990): n is a, c, g, or t
  misc_feature (1998)..(1998): n is a, c, g, or t
  misc_feature (2036)..(2036): n is a, c, g, or t
  misc_feature (2088)..(2088): n is a, c, g, or t
  misc_feature (2090)..(2090): n is a, c, g, or t
  misc_feature (3696)..(3696): n is a, c, g, or t
aggcgnagtcggcgccgagaacatggctggaggcaaagctggaaaggacagtgggaaggccaaggctaaggcagtatctcgctcacagagagctgggctacagtttcctgtgggccgcatccacagacacttgaagactcgcaccacaagccatggaagggtgggtgccactgctgccgtgtacagtgctgcgattctggagtacctcactgcagaggtgctggagctggcaggtaatgcttctaaggatctcaaagtaaagcgtatcactccgcgtcacttgcagcttgcaatccgtggtgatgaagagttggattctcttatcaaggctaccatagctgggggtggtgtgatccctcacatccacaaatctctgattggaaagaagggacagcagaaaactgcttagagggatgctttaaccaaccctcttcctccccgtcattgtactgtaactgggacagaagaaataatggggatatgtggaatttttaacaacagttaaatggaaaagcatagacaattactgtagacatgataaaagaaacatttgtatgttcttagactcgaagtttgataaaagtaccttttcatgtggtgacagttgtgtgttgattggctaggtttctcccgtgtgttttatacaaaaatggaattgataaaccattttttacaaaattaatttgtctcaaaactgttctgttcatgatgtattagaaatattttactcagactttaaatattttaaatctcagattggttattcagagtaaccttagaacagaaattgggaatatatctttacaatgattgataccatggtatattgactcttagatgctattgatctgtagcaccattttttacaaacgactaaggaaaaaacctgccaattaaatcatgatatgccatcaattatgagacatcccaatttgagagatgttagattatagaaaagtatgcatttatgactgaaatggtagtggaattatttgaattctacaccaagcacttaccatgtgccaggccctttgcagagtgctctactgaccaagaaagttgttcctgccacattatagatgtggagcctaagggtcacagaaattgtgtgctatgccaaaaaacattgaactggtagatagaaaatgacagagctaggattcaaacctagatctggctgactccagagcctagttttacctggaattgatgttcagtttatcaaaggtttctccttttggtttaaaatcccaatttttggcctggcattgtggtttacgcctgtaatcccaacacttcgggagaccgaggctggtggaacacttgaggtcaggagtttgagaccagcctggccaacatggtaaaacgccgtctcggccaggcgcggtggctcacgcctgtaatcccagcactttgggaggccaaggtgggtgaatcacgaggtcaggaaatcgagaccatcctggctaacatggtgaaaccccgtctctatttaaaaaaatacaaaaaattggccgggtgtggtggcacgcgcctgtggtcccagctactcaggaggctgaggcatgagaatgacgtgaacccgggaggcggagcttgcagtgagccaagatggcgccactgcactccagcttggcgactgagcaagactccctctcaaaacaaacaaaaaaaagtctctactaaaaatacagaaattagccaggcatggtacacacatgttgtcccaactacttggggcactggggcacaaaaaatcacttgaacccaggaggcagaggttgcagtgagccaagatcacgccactacactccagcctaggtgacagagtgngactctgtctcaaaaaaaaaaatcccaacttttagtagtctcttagtcatgcaataacagtaatttgtacaatcttttaaaaattatatttatttatcagtttctaagaaacttttttgtttgttttgagacaggctcttgctcttttgcccaggtngaagtgcngtggcatgatcctggctcactgcagcctccacctctcnggcccaagcaatcctcttacctcagccctgcaaatagctgggaccacaggcncntgccaccatacctggctaattttttttatttatgtaagagacagaggtctccctatgttgcccaggttggtattgaactcctggctcaagccatcctcccaccttggcctcccaaagtgctgggattataggcataagccaccatgccctgccctaagtaactgttacttgagttaatgtactagttaattgacccttagaaaattatatttttctgcttgcaagtcttcattaaagaaggaaattttaaaatattttatagtataatgctatccaaactcatttttaaaaacattttattatggaaattttcacaaatgcacaaaaagaatagcagaatgaagctctgtgtacccatcctccaacagctgtcctgtggtcagtcttgtttacctgcatccccacctatcccctgccccaacccacagggatcagtttgagtcccattaacaggcatagtattttcatgtttgtgtgatcagagacattcaaatataactccaaagatagggtacttttttgaacataaccacaataccattgtgtaagactgctaaaacattttttgatgccaagtaccagtcaatattcaaacttcctgattgtctcgtaagttttttttaacagttggtttattcgagtcaagatccaggcaagatctagatcttgcattttgttaatataatctatagatttaactttcctgtttttaatttttgaagaaactaagttgtttgtcctatagaattgtccttcagtggattttactgaatgtatcctaatgggatcatgtacaccttttctgtcccctatatgttctataaactgacagatctagagggcttctgttgttctgttttgctttttcacaaaaataattcataggtgatatatgctccatgttgtatcacatcatggcacataatggctctcatcttgtaacattaagattgatagtgggtttggatgctgccagcccactccattcattacaaaagttctctatcagcttttcccctgatggatttagccatcattaatgatatttgcccacatctgggattccattagaggttgccaaccagtgatatcttgtcattccttctgcatctattagctggaatcctataaagaacttgtgctcattaattcacgaggcaggataaaatagaaatttcaaattctgattgaataggcgcccattttgaagtttctgtattgagagtcaggcctacagtaaaagtagcaatagaaagctgattgtttgaaaaaaaagaagcgggggggggagtgcaatataatcaacagactttcctttggctgaatcacttgattcagggcaatttttactacagttttatagataattgcttcaaatgtctaattcattttgatagtatagttacttgactacataatttcttcccagggttgtattttcaatttgttttctaacaaaaaacatagaaatagaacaactaggtcatgtactctgggcttagctctcacagttatgatcagtctcgtttcatttgtacccaaccccttgagttattttaaagcacgttccagctatcatatcacttcatgtataatatcttaatangtatctaaaagatagcttttttatgttttattttatttttattttttcagacaaagtattactctgtcgcccaggctggcatgcagtggcacaatctcagctcactgcaacctccacctcccaggttcaagtgattcttctgcctcagcctcctgagtagctggcattacaggtgcctgccaccatgcctggctaatgtttgtttgttcttttgtttttgtttctgagacaggatctcactctgttgcctaggctggagtccaatagcctaatcttggctcactgcaacctcagcctcccaggcaactgggactacaggcatgcgccaccatgcccagctaatctgtgtgtgttttttgtttgtttgtttatttgtgtagtagagatggggtttcaccatgttggccaggctggtctcaaactcctgacctcaagtgatccacccgcctcagcctcccaaagtgctgggattacaggcatgagccactgtgcctggcgtagaaagtatttcttataattaaaaacaacacccagtctaactagtataacacctaaaaaattgtcagatctgtattttagatagtacgacacagtgaaatgcaatggcacttaagcagagagaagaaggatttttctttttctttttttaaatagaaggtgttagaacctgaactgggcctggtttgcatttgggaagagtccagtggggaaacaacacaaataaggtcttgagaatgaagaattgcatttatatagggagttgtaacaaatggcctggagagtatctgactctttatgaaacatttaatgagaaatgtgacttgctttggtgcctatggttgaatttgttgcgatgcttctgacattatgaaaattttcaaacatgcaaaaaagttccagtagttatccagtgaattcttatactcaccacctatatctatagttaacattttacttgtattttatccagttatcagctcatctatgagatggcccttatttatttgcctgctgtttttattctctatttgtcctgttatttcttgttagagaagagaaggtgttcttagatcagaagatgccattgtattaggtgacggcaaggttttgctgatttagtggaacaagattctactgggatgtgtgctgagctgaaccaaggaactgcccgaatgtgctgaacaaggacatttgcttctcagatacgtgaattcaattttaagcaagattcttgatctgcttcagagcagctttgatttaaagtaatttcagagcacttttccttgcatgagtaattttctgaatgtataaaatattctatttatgtttgaccttttggataaactgtgttgctgcagtgttggtccacactaccatcctaagtgaagacttagtaagtctgaggatctccaggcactggaaagagtgagaacctgggagtgaaagggttatagttagtgttcatttttcgggttttgtttcatagggagtcctgagtggggtaacctgaaatgttttaacagttgaagatcatcccattcctatccccagtaaaaataggcctttccacaatcttctaccagttaacttagcttttttttttttttttccttaatagagtctcattcttgtcacccagactggagtgcgatggcacgatcttggctcactgcaaccctccctcccgggttccagcgattctcctgcctcagcctcccaagtagctgggattacaggcgcacgccaccatgcccagctaatttttgtatttttagtagacgtggggtttcaccatgttggccagactggtctcaaactcctgacctcaggcgatccgcccgtctaagccttccaaagtgctgggattactggcaggaaccaccaggcccagccaaccagcatttcttaaggtgaaaatacatggtgttaatttatattttgagtgagacccagtccagctgctataactgcttggacacttggcagaggacagagtactgcaaaagtgtctaagggagacagcattttgccttgggtgctgtagatgtacaagagaggttccaggagggggtgataggcagaattttggtccccatcaccttccctgcccagtgttatgcctatgaatgtgttacattatgtggtaaaagggactttgcagatgtaactaaaatttctaaaatagagatattatcctggattacctgggggaacccagtgtaattacatgaacccttaaaaatggaagaggatgcaggagtcagattcaaaggaaggcccaaggtgctattgctgacttgaagatagaggggccatgtggaaatcaagagaaggaagtgaatccttccagtgagcttggaagagagcaccttgaggcacagatgagaagcttggccttacctgatgccttgattttagcctggtgagaccccgagcatataaatttgctgtgctatgccacacttctcacctacagaaacttagtttaaagccactaagtttgtggtaatttgttggctttaggcccctgagggtagagatttatggcttgtgttacaagtagagagcagtggagagttgggctttgtaattctttcaagggtgattgtagttctggagtcctatctacctgggttcagatctttgttggccagtccctggctgtgtgacttcactgctttaagcctctgtcttcatccttaaagtggcgatgatagtacctacctcactctgatctctgaatgagaacacatgtaagacacttagcacagttcctggtgctcaaagagttccaacacctgaaagcaccatggccctgtttgtttttcagtcaagatttctaaaagccgttattaccagaggttcagtgagaacatgggcagggtaaactcaaaatggagaacataaaaactgggactcccagaccagtcacttagaagactgctgcaggaagtaccaaggtcgttaagaatcagtaataataataagtaatgtgtgaatccattagaatgttgagaagtagacctttgacatttcagaaaaatgtatatctcagacacagccatatgtattgttatccctgagttggaagagcatcacagggcatagtttcacaaaagcttcaaaaaatatactaattgctggtaatatgtgaactaacagaaaaaaatagccatgttaaaataggagtgcctgacaattagctctattcatcttgtctcctagctgtaagcaccctagattcaaattatgcacctagaaaactaaattactatgtatgttataggcctttgaaatggatacatgaaaattagtgaaatcagaatgaacgtttcgcctgccaaagatatgtatttttataagtgatacaagggccccatgagctccatggccacatctgtacaaaacaggccctcctttcaggaactggtctcgagagagcaaaggggtcaactccctaaatggcagctgagacagtcctccctggtggcatggccctgtttcctgttgatatggtgatagttggagagtcaaatttttaccagaatttgtgaatatcatctctggttaatgattacacaaaaccttttaaaattttaaaaaattatttctaattctataaataaactctgcagttgtacagccactgtacagctaacatctcaacactggaaatgaggctggtttcttccagtttggctcagattcttcagggaagcccagttaagacaaacagctctctatactcaatccttactttgctgagaagatacaggcctgcccactcgctcccacctgctcttcatgaggagtcctttattcctgcatgtttcctgttctttgggacctttaggagctaacctccacagatgctgatagtctgtagagtcaggaataccatgtaacatgttgaagtagactaaagattagttctttggcaatagcccagtctggacttactatgtacttttgaaaataaaactgcttatttgtaaactctgtaattaggaccttttgctatttgagttatattcctttctaacttcaaacgtctgcattcatgtataatagccattttatgcacagatgaggtgattcccacacttcttttcgcagatgtttcattatctggatgagtgtattacataataaatttgaataatggtagtcttccaaatgacaaaaagcaagctagttgatttgtcaattttgagtttaaatgttttgactgcttatcagcaaaaaaaatcaaagaatagcatactaatattaatggaaatgcagagtatatttaattggcatgattttttcatggatgtgtgcttcatttgatctattgtatgtagctcgtgatcacattttctgttggttaacattgttcctagcttatatgatggaattaaatatattctgtgtaaaaa

SEQ ID NO: 447297 - DNA, 8039 bp, Homo sapiens
  misc_feature (6)..(6): n is a, c, g, or t
  misc_feature (1755)..(1755): n is a, c, g, or t
  misc_feature (1912)..(1912): n is a, c, g, or t
  misc_feature (1920)..(1920): n is a, c, g, or t
  misc_feature (1958)..(1958): n is a, c, g, or t
  misc_feature (2010)..(2010): n is a, c, g, or t
  misc_feature (2012)..(2012): n is a, c, g, or t
  misc_feature (3618)..(3618): n is a, c, g, or t
aggcgnagtcggcgccgagaacatgtttcctgtgggccgcatccacagacacttgaagactcgcaccacaagccatggaagggtgggtgccactgctgccgtgtacagtgctgcgattctggagtacctcactgcagaggtgctggagctggcaggtaatgcttctaaggatctcaaagtaaagcgtatcactccgcgtcacttgcagcttgcaatccgtggtgatgaagagttggattctcttatcaaggctaccatagctgggggtggtgtgatccctcacatccacaaatctctgattggaaagaagggacagcagaaaactgcttagagggatgctttaaccaaccctcttcctccccgtcattgtactgtaactgggacagaagaaataatggggatatgtggaatttttaacaacagttaaatggaaaagcatagacaattactgtagacatgataaaagaaacatttgtatgttcttagactcgaagtttgataaaagtaccttttcatgtggtgacagttgtgtgttgattggctaggtttctcccgtgtgttttatacaaaaatggaattgataaaccattttttacaaaattaatttgtctcaaaactgttctgttcatgatgtattagaaatattttactcagactttaaatattttaaatctcagattggttattcagagtaaccttagaacagaaattgggaatatatctttacaatgattgataccatggtatattgactcttagatgctattgatctgtagcaccattttttacaaacgactaaggaaaaaacctgccaattaaatcatgatatgccatcaattatgagacatcccaatttgagagatgttagattatagaaaagtatgcatttatgactgaaatggtagtggaattatttgaattctacaccaagcacttaccatgtgccaggccctttgcagagtgctctactgaccaagaaagttgttcctgccacattatagatgtggagcctaagggtcacagaaattgtgtgctatgccaaaaaacattgaactggtagatagaaaatgacagagctaggattcaaacctagatctggctgactccagagcctagttttacctggaattgatgttcagtttatcaaaggtttctccttttggtttaaaatcccaatttttggcctggcattgtggtttacgcctgtaatcccaacacttcgggagaccgaggctggtggaacacttgaggtcaggagtttgagaccagcctggccaacatggtaaaacgccgtctcggccaggcgcggtggctcacgcctgtaatcccagcactttgggaggccaaggtgggtgaatcacgaggtcaggaaatcgagaccatcctggctaacatggtgaaaccccgtctctatttaaaaaaatacaaaaaattggccgggtgtggtggcacgcgcctgtggtcccagctactcaggaggctgaggcatgagaatgacgtgaacccgggaggcggagcttgcagtgagccaagatggcgccactgcactccagcttggcgactgagcaagactccctctcaaaacaaacaaaaaaaagtctctactaaaaatacagaaattagccaggcatggtacacacatgttgtcccaactacttggggcactggggcacaaaaaatcacttgaacccaggaggcagaggttgcagtgagccaagatcacgccactacactccagcctaggtgacagagtgngactctgtctcaaaaaaaaaaatcccaacttttagtagtctcttagtcatgcaataacagtaatttgtacaatcttttaaaaattatatttatttatcagtttctaagaaacttttttgtttgttttgagacaggctcttgctcttttgcccaggtngaagtgcngtggcatgatcctggctcactgcagcctccacctctcnggcccaagcaatcctcttacctcagccctgcaaatagctgggaccacaggcncntgccaccatacctggctaattttttttatttatgtaagagacagaggtctccctatgttgcccaggttggtattgaactcctggctcaagccatcctcccaccttggcctcccaaagtgctgggattataggcataagccaccatgccctgccctaagtaactgttacttgagttaatgtactagttaattgacccttagaaaattatatttttctgcttgcaagtcttcattaaagaaggaaattttaaaatattttatagtataatgctatccaaactcatttttaaaaacattttattatggaaattttcacaaatgcacaaaaagaatagcagaatgaagctctgtgtacccatcctccaacagctgtcctgtggtcagtcttgtttacctgcatccccacctatcccctgccccaacccacagggatcagtttgagtcccattaacaggcatagtattttcatgtttgtgtgatcagagacattcaaatataactccaaagatagggtacttttttgaacataaccacaataccattgtgtaagactgctaaaacattttttgatgccaagtaccagtcaatattcaaacttcctgattgtctcgtaagttttttttaacagttggtttattcgagtcaagatccaggcaagatctagatcttgcattttgttaatataatctatagatttaactttcctgtttttaatttttgaagaaactaagttgtttgtcctatagaattgtccttcagtggattttactgaatgtatcctaatgggatcatgtacaccttttctgtcccctatatgttctataaactgacagatctagagggcttctgttgttctgttttgctttttcacaaaaataattcataggtgatatatgctccatgttgtatcacatcatggcacataatggctctcatcttgtaacattaagattgatagtgggtttggatgctgccagcccactccattcattacaaaagttctctatcagcttttcccctgatggatttagccatcattaatgatatttgcccacatctgggattccattagaggttgccaaccagtgatatcttgtcattccttctgcatctattagctggaatcctataaagaacttgtgctcattaattcacgaggcaggataaaatagaaatttcaaattctgattgaataggcgcccattttgaagtttctgtattgagagtcaggcctacagtaaaagtagcaatagaaagctgattgtttgaaaaaaaagaagcgggggggggagtgcaatataatcaacagactttcctttggctgaatcacttgattcagggcaatttttactacagttttatagataattgcttcaaatgtctaattcattttgatagtatagttacttgactacataatttcttcccagggttgtattttcaatttgttttctaacaaaaaacatagaaatagaacaactaggtcatgtactctgggcttagctctcacagttatgatcagtctcgtttcatttgtacccaaccccttgagttattttaaagcacgttccagctatcatatcacttcatgtataatatcttaatangtatctaaaagatagcttttttatgttttattttatttttattttttcagacaaagtattactctgtcgcccaggctggcatgcagtggcacaatctcagctcactgcaacctccacctcccaggttcaagtgattcttctgcctcagcctcctgagtagctggcattacaggtgcctgccaccatgcctggctaatgtttgtttgttcttttgtttttgtttctgagacaggatctcactctgttgcctaggctggagtccaatagcctaatcttggctcactgcaacctcagcctcccaggcaactgggactacaggcatgcgccaccatgcccagctaatctgtgtgtgttttttgtttgtttgtttatttgtgtagtagagatggggtttcaccatgttggccaggctggtctcaaactcctgacctcaagtgatccacccgcctcagcctcccaaagtgctgggattacaggcatgagccactgtgcctggcgtagaaagtatttcttataattaaaaacaacacccagtctaactagtataacacctaaaaaattgtcagatctgtattttagatagtacgacacagtgaaatgcaatggcacttaagcagagagaagaaggatttttctttttctttttttaaatagaaggtgttagaacctgaactgggcctggtttgcatttgggaagagtccagtggggaaacaacacaaataaggtcttgagaatgaagaattgcatttatatagggagttgtaacaaatggcctggagagtatctgactctttatgaaacatttaatgagaaatgtgacttgctttggtgcctatggttgaatttgttgcgatgcttctgacattatgaaaattttcaaacatgcaaaaaagttccagtagttatccagtgaattcttatactcaccacctatatctatagttaacattttacttgtattttatccagttatcagctcatctatgagatggcccttatttatttgcctgctgtttttattctctatttgtcctgttatttcttgttagagaagagaaggtgttcttagatcagaagatgccattgtattaggtgacggcaaggttttgctgatttagtggaacaagattctactgggatgtgtgctgagctgaaccaaggaactgcccgaatgtgctgaacaaggacatttgcttctcagatacgtgaattcaattttaagcaagattcttgatctgcttcagagcagctttgatttaaagtaatttcagagcacttttccttgcatgagtaattttctgaatgtataaaatattctatttatgtttgaccttttggataaactgtgttgctgcagtgttggtccacactaccatcctaagtgaagacttagtaagtctgaggatctccaggcactggaaagagtgagaacctgggagtgaaagggttatagttagtgttcatttttcgggttttgtttcatagggagtcctgagtggggtaacctgaaatgttttaacagttgaagatcatcccattcctatccccagtaaaaataggcctttccacaatcttctaccagttaacttagcttttttttttttttttccttaatagagtctcattcttgtcacccagactggagtgcgatggcacgatcttggctcactgcaaccctccctcccgggttccagcgattctcctgcctcagcctcccaagtagctgggattacaggcgcacgccaccatgcccagctaatttttgtatttttagtagacgtggggtttcaccatgttggccagactggtctcaaactcctgacctcaggcgatccgcccgtctaagccttccaaagtgctgggattactggcaggaaccaccaggcccagccaaccagcatttcttaaggtgaaaatacatggtgttaatttatattttgagtgagacccagtccagctgctataactgcttggacacttggcagaggacagagtactgcaaaagtgtctaagggagacagcattttgccttgggtgctgtagatgtacaagagaggttccaggagggggtgataggcagaattttggtccccatcaccttccctgcccagtgttatgcctatgaatgtgttacattatgtggtaaaagggactttgcagatgtaactaaaatttctaaaatagagatattatcctggattacctgggggaacccagtgtaattacatgaacccttaaaaatggaagaggatgcaggagtcagattcaaaggaaggcccaaggtgctattgctgacttgaagatagaggggccatgtggaaatcaagagaaggaagtgaatccttccagtgagcttggaagagagcaccttgaggcacagatgagaagcttggccttacctgatgccttgattttagcctggtgagaccccgagcatataaatttgctgtgctatgccacacttctcacctacagaaacttagtttaaagccactaagtttgtggtaatttgttggctttaggcccctgagggtagagatttatggcttgtgttacaagtagagagcagtggagagttgggctttgtaattctttcaagggtgattgtagttctggagtcctatctacctgggttcagatctttgttggccagtccctggctgtgtgacttcactgctttaagcctctgtcttcatccttaaagtggcgatgatagtacctacctcactctgatctctgaatgagaacacatgtaagacacttagcacagttcctggtgctcaaagagttccaacacctgaaagcaccatggccctgtttgtttttcagtcaagatttctaaaagccgttattaccagaggttcagtgagaacatgggcagggtaaactcaaaatggagaacataaaaactgggactcccagaccagtcacttagaagactgctgcaggaagtaccaaggtcgttaagaatcagtaataataataagtaatgtgtgaatccattagaatgttgagaagtagacctttgacatttcagaaaaatgtatatctcagacacagccatatgtattgttatccctgagttggaagagcatcacagggcatagtttcacaaaagcttcaaaaaatatactaattgctggtaatatgtgaactaacagaaaaaaatagccatgttaaaataggagtgcctgacaattagctctattcatcttgtctcctagctgtaagcaccctagattcaaattatgcacctagaaaactaaattactatgtatgttataggcctttgaaatggatacatgaaaattagtgaaatcagaatgaacgtttcgcctgccaaagatatgtatttttataagtgatacaagggccccatgagctccatggccacatctgtacaaaacaggccctcctttcaggaactggtctcgagagagcaaaggggtcaactccctaaatggcagctgagacagtcctccctggtggcatggccctgtttcctgttgatatggtgatagttggagagtcaaatttttaccagaatttgtgaatatcatctctggttaatgattacacaaaaccttttaaaattttaaaaaattatttctaattctataaataaactctgcagttgtacagccactgtacagctaacatctcaacactggaaatgaggctggtttcttccagtttggctcagattcttcagggaagcccagttaagacaaacagctctctatactcaatccttactttgctgagaagatacaggcctgcccactcgctcccacctgctcttcatgaggagtcctttattcctgcatgtttcctgttctttgggacctttaggagctaacctccacagatgctgatagtctgtagagtcaggaataccatgtaacatgttgaagtagactaaagattagttctttggcaatagcccagtctggacttactatgtacttttgaaaataaaactgcttatttgtaaactctgtaattaggaccttttgctatttgagttatattcctttctaacttcaaacgtctgcattcatgtataatagccattttatgcacagatgaggtgattcccacacttcttttcgcagatgtttcattatctggatgagtgtattacataataaatttgaataatggtagtcttccaaatgacaaaaagcaagctagttgatttgtcaattttgagtttaaatgttttgactgcttatcagcaaaaaaaatcaaagaatagcatactaatattaatggaaatgcagagtatatttaattggcatgattttttcatggatgtgtgcttcatttgatctattgtatgtagctcgtgatcacattttctgttggttaacattgttcctagcttatatgatggaattaaatatattctgtgtaaaaa

SEQ ID NO: 447298 - DNA, 8151 bp, Homo sapiens
  misc_feature (1867)..(1867): n is a, c, g, or t
  misc_feature (2024)..(2024): n is a, c, g, or t
  misc_feature (2032)..(2032): n is a, c, g, or t
  misc_feature (2070)..(2070): n is a, c, g, or t
  misc_feature (2122)..(2122): n is a, c, g, or t
  misc_feature (2124)..(2124): n is a, c, g, or t
  misc_feature (3730)..(3730): n is a, c, g, or t
tggggttcgaaccagcaagacaagcgggcatggccacagcagcgcgaggcgggcacggggtattgtccggctccggcggcggcggtcggtgctgcgagagcggcggcggcggcgcgggtcggcagcgggagggcgcgcggccgagcggaggcggagtcggcgccgagaacatggctggaggcaaagctggaaaggacagtgggaaggccaaggctaaggcagtatctcgctcacagagagctgggctacaggtgctggagctggcaggtaatgcttctaaggatctcaaagtaaagcgtatcactccgcgtcacttgcagcttgcaatccgtggtgatgaagagttggattctcttatcaaggctaccatagctgggggtggtgtgatccctcacatccacaaatctctgattggaaagaagggacagcagaaaactgcttagagggatgctttaaccaaccctcttcctccccgtcattgtactgtaactgggacagaagaaataatggggatatgtggaatttttaacaacagttaaatggaaaagcatagacaattactgtagacatgataaaagaaacatttgtatgttcttagactcgaagtttgataaaagtaccttttcatgtggtgacagttgtgtgttgattggctaggtttctcccgtgtgttttatacaaaaatggaattgataaaccattttttacaaaattaatttgtctcaaaactgttctgttcatgatgtattagaaatattttactcagactttaaatattttaaatctcagattggttattcagagtaaccttagaacagaaattgggaatatatctttacaatgattgataccatggtatattgactcttagatgctattgatctgtagcaccattttttacaaacgactaaggaaaaaacctgccaattaaatcatgatatgccatcaattatgagacatcccaatttgagagatgttagattatagaaaagtatgcatttatgactgaaatggtagtggaattatttgaattctacaccaagcacttaccatgtgccaggccctttgcagagtgctctactgaccaagaaagttgttcctgccacattatagatgtggagcctaagggtcacagaaattgtgtgctatgccaaaaaacattgaactggtagatagaaaatgacagagctaggattcaaacctagatctggctgactccagagcctagttttacctggaattgatgttcagtttatcaaaggtttctccttttggtttaaaatcccaatttttggcctggcattgtggtttacgcctgtaatcccaacacttcgggagaccgaggctggtggaacacttgaggtcaggagtttgagaccagcctggccaacatggtaaaacgccgtctcggccaggcgcggtggctcacgcctgtaatcccagcactttgggaggccaaggtgggtgaatcacgaggtcaggaaatcgagaccatcctggctaacatggtgaaaccccgtctctatttaaaaaaatacaaaaaattggccgggtgtggtggcacgcgcctgtggtcccagctactcaggaggctgaggcatgagaatgacgtgaacccgggaggcggagcttgcagtgagccaagatggcgccactgcactccagcttggcgactgagcaagactccctctcaaaacaaacaaaaaaaagtctctactaaaaatacagaaattagccaggcatggtacacacatgttgtcccaactacttggggcactggggcacaaaaaatcacttgaacccaggaggcagaggttgcagtgagccaagatcacgccactacactccagcctaggtgacagagtgngactctgtctcaaaaaaaaaaatcccaacttttagtagtctcttagtcatgcaataacagtaatttgtacaatcttttaaaaattatatttatttatcagtttctaagaaacttttttgtttgttttgagacaggctcttgctcttttgcccaggtngaagtgcngtggcatgatcctggctcactgcagcctccacctctcnggcccaagcaatcctcttacctcagccctgcaaatagctgggaccacaggcncntgccaccatacctggctaattttttttatttatgtaagagacagaggtctccctatgttgcccaggttggtattgaactcctggctcaagccatcctcccaccttggcctcccaaagtgctgggattataggcataagccaccatgccctgccctaagtaactgttacttgagttaatgtactagttaattgacccttagaaaattatatttttctgcttgcaagtcttcattaaagaaggaaattttaaaatattttatagtataatgctatccaaactcatttttaaaaacattttattatggaaattttcacaaatgcacaaaaagaatagcagaatgaagctctgtgtacccatcctccaacagctgtcctgtggtcagtcttgtttacctgcatccccacctatcccctgccccaacccacagggatcagtttgagtcccattaacaggcatagtattttcatgtttgtgtgatcagagacattcaaatataactccaaagatagggtacttttttgaacataaccacaataccattgtgtaagactgctaaaacattttttgatgccaagtaccagtcaatattcaaacttcctgattgtctcgtaagttttttttaacagttggtttattcgagtcaagatccaggcaagatctagatcttgcattttgttaatataatctatagatttaactttcctgtttttaatttttgaagaaactaagttgtttgtcctatagaattgtccttcagtggattttactgaatgtatcctaatgggatcatgtacaccttttctgtcccctatatgttctataaactgacagatctagagggcttctgttgttctgttttgctttttcacaaaaataattcataggtgatatatgctccatgttgtatcacatcatggcacataatggctctcatcttgtaacattaagattgatagtgggtttggatgctgccagcccactccattcattacaaaagttctctatcagcttttcccctgatggatttagccatcattaatgatatttgcccacatctgggattccattagaggttgccaaccagtgatatcttgtcattccttctgcatctattagctggaatcctataaagaacttgtgctcattaattcacgaggcaggataaaatagaaatttcaaattctgattgaataggcgcccattttgaagtttctgtattgagagtcaggcctacagtaaaagtagcaatagaaagctgattgtttgaaaaaaaagaagcgggggggggagtgcaatataatcaacagactttcctttggctgaatcacttgattcagggcaatttttactacagttttatagataattgcttcaaatgtctaattcattttgatagtatagttacttgactacataatttcttcccagggttgtattttcaatttgttttctaacaaaaaacatagaaatagaacaactaggtcatgtactctgggcttagctctcacagttatgatcagtctcgtttcatttgtacccaaccccttgagttattttaaagcacgttccagctatcatatcacttcatgtataatatcttaatangtatctaaaagatagcttttttatgttttattttatttttattttttcagacaaagtattactctgtcgcccaggctggcatgcagtggcacaatctcagctcactgcaacctccacctcccaggttcaagtgattcttctgcctcagcctcctgagtagctggcattacaggtgcctgccaccatgcctggctaatgtttgtttgttcttttgtttttgtttctgagacaggatctcactctgttgcctaggctggagtccaatagcctaatcttggctcactgcaacctcagcctcccaggcaactgggactacaggcatgcgccaccatgcccagctaatctgtgtgtgttttttgtttgtttgtttatttgtgtagtagagatggggtttcaccatgttggccaggctggtctcaaactcctgacctcaagtgatccacccgcctcagcctcccaaagtgctgggattacaggcatgagccactgtgcctggcgtagaaagtatttcttataattaaaaacaacacccagtctaactagtataacacctaaaaaattgtcagatctgtattttagatagtacgacacagtgaaatgcaatggcacttaagcagagagaagaaggatttttctttttctttttttaaatagaaggtgttagaacctgaactgggcctggtttgcatttgggaagagtccagtggggaaacaacacaaataaggtcttgagaatgaagaattgcatttatatagggagttgtaacaaatggcctggagagtatctgactctttatgaaacatttaatgagaaatgtgacttgctttggtgcctatggttgaatttgttgcgatgcttctgacattatgaaaattttcaaacatgcaaaaaagttccagtagttatccagtgaattcttatactcaccacctatatctatagttaacattttacttgtattttatccagttatcagctcatctatgagatggcccttatttatttgcctgctgtttttattctctatttgtcctgttatttcttgttagagaagagaaggtgttcttagatcagaagatgccattgtattaggtgacggcaaggttttgctgatttagtggaacaagattctactgggatgtgtgctgagctgaaccaaggaactgcccgaatgtgctgaacaaggacatttgcttctcagatacgtgaattcaattttaagcaagattcttgatctgcttcagagcagctttgatttaaagtaatttcagagcacttttccttgcatgagtaattttctgaatgtataaaatattctatttatgtttgaccttttggataaactgtgttgctgcagtgttggtccacactaccatcctaagtgaagacttagtaagtctgaggatctccaggcactggaaagagtgagaacctgggagtgaaagggttatagttagtgttcatttttcgggttttgtttcatagggagtcctgagtggggtaacctgaaatgttttaacagttgaagatcatcccattcctatccccagtaaaaataggcctttccacaatcttctaccagttaacttagcttttttttttttttttccttaatagagtctcattcttgtcacccagactggagtgcgatggcacgatcttggctcactgcaaccctccctcccgggttccagcgattctcctgcctcagcctcccaagtagctgggattacaggcgcacgccaccatgcccagctaatttttgtatttttagtagacgtggggtttcaccatgttggccagactggtctcaaactcctgacctcaggcgatccgcccgtctaagccttccaaagtgctgggattactggcaggaaccaccaggcccagccaaccagcatttcttaaggtgaaaatacatggtgttaatttatattttgagtgagacccagtccagctgctataactgcttggacacttggcagaggacagagtactgcaaaagtgtctaagggagacagcattttgccttgggtgctgtagatgtacaagagaggttccaggagggggtgataggcagaattttggtccccatcaccttccctgcccagtgttatgcctatgaatgtgttacattatgtggtaaaagggactttgcagatgtaactaaaatttctaaaatagagatattatcctggattacctgggggaacccagtgtaattacatgaacccttaaaaatggaagaggatgcaggagtcagattcaaaggaaggcccaaggtgctattgctgacttgaagatagaggggccatgtggaaatcaagagaaggaagtgaatccttccagtgagcttggaagagagcaccttgaggcacagatgagaagcttggccttacctgatgccttgattttagcctggtgagaccccgagcatataaatttgctgtgctatgccacacttctcacctacagaaacttagtttaaagccactaagtttgtggtaatttgttggctttaggcccctgagggtagagatttatggcttgtgttacaagtagagagcagtggagagttgggctttgtaattctttcaagggtgattgtagttctggagtcctatctacctgggttcagatctttgttggccagtccctggctgtgtgacttcactgctttaagcctctgtcttcatccttaaagtggcgatgatagtacctacctcactctgatctctgaatgagaacacatgtaagacacttagcacagttcctggtgctcaaagagttccaacacctgaaagcaccatggccctgtttgtttttcagtcaagatttctaaaagccgttattaccagaggttcagtgagaacatgggcagggtaaactcaaaatggagaacataaaaactgggactcccagaccagtcacttagaagactgctgcaggaagtaccaaggtcgttaagaatcagtaataataataagtaatgtgtgaatccattagaatgttgagaagtagacctttgacatttcagaaaaatgtatatctcagacacagccatatgtattgttatccctgagttggaagagcatcacagggcatagtttcacaaaagcttcaaaaaatatactaattgctggtaatatgtgaactaacagaaaaaaatagccatgttaaaataggagtgcctgacaattagctctattcatcttgtctcctagctgtaagcaccctagattcaaattatgcacctagaaaactaaattactatgtatgttataggcctttgaaatggatacatgaaaattagtgaaatcagaatgaacgtttcgcctgccaaagatatgtatttttataagtgatacaagggccccatgagctccatggccacatctgtacaaaacaggccctcctttcaggaactggtctcgagagagcaaaggggtcaactccctaaatggcagctgagacagtcctccctggtggcatggccctgtttcctgttgatatggtgatagttggagagtcaaatttttaccagaatttgtgaatatcatctctggttaatgattacacaaaaccttttaaaattttaaaaaattatttctaattctataaataaactctgcagttgtacagccactgtacagctaacatctcaacactggaaatgaggctggtttcttccagtttggctcagattcttcagggaagcccagttaagacaaacagctctctatactcaatccttactttgctgagaagatacaggcctgcccactcgctcccacctgctcttcatgaggagtcctttattcctgcatgtttcctgttctttgggacctttaggagctaacctccacagatgctgatagtctgtagagtcaggaataccatgtaacatgttgaagtagactaaagattagttctttggcaatagcccagtctggacttactatgtacttttgaaaataaaactgcttatttgtaaactctgtaattaggaccttttgctatttgagttatattcctttctaacttcaaacgtctgcattcatgtataatagccattttatgcacagatgaggtgattcccacacttcttttcgcagatgtttcattatctggatgagtgtattacataataaatttgaataatggtagtcttccaaatgacaaaaagcaagctagttgatttgtcaattttgagtttaaatgttttgactgcttatcagcaaaaaaaatcaaagaatagcatactaatattaatggaaatgcagagtatatttaattggcatgattttttcatggatgtgtgcttcatttgatctattgtatgtagctcgtgatcacattttctgttggttaacattgttcctagcttatatgatggaattaaatatattctgtgtaaaaa

SEQ ID NO: 447299 - DNA, 8169 bp, Homo sapiens
  misc_feature (4)..(4): n is a, c, g, or t
  misc_feature (101)..(101): n is a, c, g, or t
  misc_feature (1885)..(1885): n is a, c, g, or t
  misc_feature (2042)..(2042): n is a, c, g, or t
  misc_feature (2050)..(2050): n is a, c, g, or t
  misc_feature (2088)..(2088): n is a, c, g, or t
  misc_feature (2140)..(2140): n is a, c, g, or t
  misc_feature (2142)..(2142): n is a, c, g, or t
  misc_feature (3748)..(3748): n is a, c, g, or t
tgtnagggaggtttcttcgtggccgcagttctcggggcggattccgaggaggcaggggcaatgggaccacccgtcgcaaccccacttcccacagggccggnactggcagggtgtgagggtgcagccaaaggctcctactgaagtggcgcgggtcggcagcgggagggcgcgcggccgagcggaggcggagtcggcgccgagaacatggctggaggcaaagctggaaaggacagtgggaaggccaaggctaaggcagtatctcgctcacagagagctgggctacagtttcctgtgggccgcatccacagacacttgaagactcgcaccacaagccatggaagggtgggtgccactgctgccgtgtacagtgctgcgattctggagtacctcactgcagaggtgtgatccctcacatccacaaatctctgattggaaagaagggacagcagaaaactgcttagagggatgctttaaccaaccctcttcctccccgtcattgtactgtaactgggacagaagaaataatggggatatgtggaatttttaacaacagttaaatggaaaagcatagacaattactgtagacatgataaaagaaacatttgtatgttcttagactcgaagtttgataaaagtaccttttcatgtggtgacagttgtgtgttgattggctaggtttctcccgtgtgttttatacaaaaatggaattgataaaccattttttacaaaattaatttgtctcaaaactgttctgttcatgatgtattagaaatattttactcagactttaaatattttaaatctcagattggttattcagagtaaccttagaacagaaattgggaatatatctttacaatgattgataccatggtatattgactcttagatgctattgatctgtagcaccattttttacaaacgactaaggaaaaaacctgccaattaaatcatgatatgccatcaattatgagacatcccaatttgagagatgttagattatagaaaagtatgcatttatgactgaaatggtagtggaattatttgaattctacaccaagcacttaccatgtgccaggccctttgcagagtgctctactgaccaagaaagttgttcctgccacattatagatgtggagcctaagggtcacagaaattgtgtgctatgccaaaaaacattgaactggtagatagaaaatgacagagctaggattcaaacctagatctggctgactccagagcctagttttacctggaattgatgttcagtttatcaaaggtttctccttttggtttaaaatcccaatttttggcctggcattgtggtttacgcctgtaatcccaacacttcgggagaccgaggctggtggaacacttgaggtcaggagtttgagaccagcctggccaacatggtaaaacgccgtctcggccaggcgcggtggctcacgcctgtaatcccagcactttgggaggccaaggtgggtgaatcacgaggtcaggaaatcgagaccatcctggctaacatggtgaaaccccgtctctatttaaaaaaatacaaaaaattggccgggtgtggtggcacgcgcctgtggtcccagctactcaggaggctgaggcatgagaatgacgtgaacccgggaggcggagcttgcagtgagccaagatggcgccactgcactccagcttggcgactgagcaagactccctctcaaaacaaacaaaaaaaagtctctactaaaaatacagaaattagccaggcatggtacacacatgttgtcccaactacttggggcactggggcacaaaaaatcacttgaacccaggaggcagaggttgcagtgagccaagatcacgccactacactccagcctaggtgacagagtgngactctgtctcaaaaaaaaaaatcccaacttttagtagtctcttagtcatgcaataacagtaatttgtacaatcttttaaaaattatatttatttatcagtttctaagaaacttttttgtttgttttgagacaggctcttgctcttttgcccaggtngaagtgcngtggcatgatcctggctcactgcagcctccacctctcnggcccaagcaatcctcttacctcagccctgcaaatagctgggaccacaggcncntgccaccatacctggctaattttttttatttatgtaagagacagaggtctccctatgttgcccaggttggtattgaactcctggctcaagccatcctcccaccttggcctcccaaagtgctgggattataggcataagccaccatgccctgccctaagtaactgttacttgagttaatgtactagttaattgacccttagaaaattatatttttctgcttgcaagtcttcattaaagaaggaaattttaaaatattttatagtataatgctatccaaactcatttttaaaaacattttattatggaaattttcacaaatgcacaaaaagaatagcagaatgaagctctgtgtacccatcctccaacagctgtcctgtggtcagtcttgtttacctgcatccccacctatcccctgccccaacccacagggatcagtttgagtcccattaacaggcatagtattttcatgtttgtgtgatcagagacattcaaatataactccaaagatagggtacttttttgaacataaccacaataccattgtgtaagactgctaaaacattttttgatgccaagtaccagtcaatattcaaacttcctgattgtctcgtaagttttttttaacagttggtttattcgagtcaagatccaggcaagatctagatcttgcattttgttaatataatctatagatttaactttcctgtttttaatttttgaagaaactaagttgtttgtcctatagaattgtccttcagtggattttactgaatgtatcctaatgggatcatgtacaccttttctgtcccctatatgttctataaactgacagatctagagggcttctgttgttctgttttgctttttcacaaaaataattcataggtgatatatgctccatgttgtatcacatcatggcacataatggctctcatcttgtaacattaagattgatagtgggtttggatgctgccagcccactccattcattacaaaagttctctatcagcttttcccctgatggatttagccatcattaatgatatttgcccacatctgggattccattagaggttgccaaccagtgatatcttgtcattccttctgcatctattagctggaatcctataaagaacttgtgctcattaattcacgaggcaggataaaatagaaatttcaaattctgattgaataggcgcccattttgaagtttctgtattgagagtcaggcctacagtaaaagtagcaatagaaagctgattgtttgaaaaaaaagaagcgggggggggagtgcaatataatcaacagactttcctttggctgaatcacttgattcagggcaatttttactacagttttatagataattgcttcaaatgtctaattcattttgatagtatagttacttgactacataatttcttcccagggttgtattttcaatttgttttctaacaaaaaacatagaaatagaacaactaggtcatgtactctgggcttagctctcacagttatgatcagtctcgtttcatttgtacccaaccccttgagttattttaaagcacgttccagctatcatatcacttcatgtataatatcttaatangtatctaaaagatagcttttttatgttttattttatttttattttttcagacaaagtattactctgtcgcccaggctggcatgcagtggcacaatctcagctcactgcaacctccacctcccaggttcaagtgattcttctgcctcagcctcctgagtagctggcattacaggtgcctgccaccatgcctggctaatgtttgtttgttcttttgtttttgtttctgagacaggatctcactctgttgcctaggctggagtccaatagcctaatcttggctcactgcaacctcagcctcccaggcaactgggactacaggcatgcgccaccatgcccagctaatctgtgtgtgttttttgtttgtttgtttatttgtgtagtagagatggggtttcaccatgttggccaggctggtctcaaactcctgacctcaagtgatccacccgcctcagcctcccaaagtgctgggattacaggcatgagccactgtgcctggcgtagaaagtatttcttataattaaaaacaacacccagtctaactagtataacacctaaaaaattgtcagatctgtattttagatagtacgacacagtgaaatgcaatggcacttaagcagagagaagaaggatttttctttttctttttttaaatagaaggtgttagaacctgaactgggcctggtttgcatttgggaagagtccagtggggaaacaacacaaataaggtcttgagaatgaagaattgcatttatatagggagttgtaacaaatggcctggagagtatctgactctttatgaaacatttaatgagaaatgtgacttgctttggtgcctatggttgaatttgttgcgatgcttctgacattatgaaaattttcaaacatgcaaaaaagttccagtagttatccagtgaattcttatactcaccacctatatctatagttaacattttacttgtattttatccagttatcagctcatctatgagatggcccttatttatttgcctgctgtttttattctctatttgtcctgttatttcttgttagagaagagaaggtgttcttagatcagaagatgccattgtattaggtgacggcaaggttttgctgatttagtggaacaagattctactgggatgtgtgctgagctgaaccaaggaactgcccgaatgtgctgaacaaggacatttgcttctcagatacgtgaattcaattttaagcaagattcttgatctgcttcagagcagctttgatttaaagtaatttcagagcacttttccttgcatgagtaattttctgaatgtataaaatattctatttatgtttgaccttttggataaactgtgttgctgcagtgttggtccacactaccatcctaagtgaagacttagtaagtctgaggatctccaggcactggaaagagtgagaacctgggagtgaaagggttatagttagtgttcatttttcgggttttgtttcatagggagtcctgagtggggtaacctgaaatgttttaacagttgaagatcatcccattcctatccccagtaaaaataggcctttccacaatcttctaccagttaacttagcttttttttttttttttccttaatagagtctcattcttgtcacccagactggagtgcgatggcacgatcttggctcactgcaaccctccctcccgggttccagcgattctcctgcctcagcctcccaagtagctgggattacaggcgcacgccaccatgcccagctaatttttgtatttttagtagacgtggggtttcaccatgttggccagactggtctcaaactcctgacctcaggcgatccgcccgtctaagccttccaaagtgctgggattactggcaggaaccaccaggcccagccaaccagcatttcttaaggtgaaaatacatggtgttaatttatattttgagtgagacccagtccagctgctataactgcttggacacttggcagaggacagagtactgcaaaagtgtctaagggagacagcattttgccttgggtgctgtagatgtacaagagaggttccaggagggggtgataggcagaattttggtccccatcaccttccctgcccagtgttatgcctatgaatgtgttacattatgtggtaaaagggactttgcagatgtaactaaaatttctaaaatagagatattatcctggattacctgggggaacccagtgtaattacatgaacccttaaaaatggaagaggatgcaggagtcagattcaaaggaaggcccaaggtgctattgctgacttgaagatagaggggccatgtggaaatcaagagaaggaagtgaatccttccagtgagcttggaagagagcaccttgaggcacagatgagaagcttggccttacctgatgccttgattttagcctggtgagaccccgagcatataaatttgctgtgctatgccacacttctcacctacagaaacttagtttaaagccactaagtttgtggtaatttgttggctttaggcccctgagggtagagatttatggcttgtgttacaagtagagagcagtggagagttgggctttgtaattctttcaagggtgattgtagttctggagtcctatctacctgggttcagatctttgttggccagtccctggctgtgtgacttcactgctttaagcctctgtcttcatccttaaagtggcgatgatagtacctacctcactctgatctctgaatgagaacacatgtaagacacttagcacagttcctggtgctcaaagagttccaacacctgaaagcaccatggccctgtttgtttttcagtcaagatttctaaaagccgttattaccagaggttcagtgagaacatgggcagggtaaactcaaaatggagaacataaaaactgggactcccagaccagtcacttagaagactgctgcaggaagtaccaaggtcgttaagaatcagtaataataataagtaatgtgtgaatccattagaatgttgagaagtagacctttgacatttcagaaaaatgtatatctcagacacagccatatgtattgttatccctgagttggaagagcatcacagggcatagtttcacaaaagcttcaaaaaatatactaattgctggtaatatgtgaactaacagaaaaaaatagccatgttaaaataggagtgcctgacaattagctctattcatcttgtctcctagctgtaagcaccctagattcaaattatgcacctagaaaactaaattactatgtatgttataggcctttgaaatggatacatgaaaattagtgaaatcagaatgaacgtttcgcctgccaaagatatgtatttttataagtgatacaagggccccatgagctccatggccacatctgtacaaaacaggccctcctttcaggaactggtctcgagagagcaaaggggtcaactccctaaatggcagctgagacagtcctccctggtggcatggccctgtttcctgttgatatggtgatagttggagagtcaaatttttaccagaatttgtgaatatcatctctggttaatgattacacaaaaccttttaaaattttaaaaaattatttctaattctataaataaactctgcagttgtacagccactgtacagctaacatctcaacactggaaatgaggctggtttcttccagtttggctcagattcttcagggaagcccagttaagacaaacagctctctatactcaatccttactttgctgagaagatacaggcctgcccactcgctcccacctgctcttcatgaggagtcctttattcctgcatgtttcctgttctttgggacctttaggagctaacctccacagatgctgatagtctgtagagtcaggaataccatgtaacatgttgaagtagactaaagattagttctttggcaatagcccagtctggacttactatgtacttttgaaaataaaactgcttatttgtaaactctgtaattaggaccttttgctatttgagttatattcctttctaacttcaaacgtctgcattcatgtataatagccattttatgcacagatgaggtgattcccacacttcttttcgcagatgtttcattatctggatgagtgtattacataataaatttgaataatggtagtcttccaaatgacaaaaagcaagctagttgatttgtcaattttgagtttaaatgttttgactgcttatcagcaaaaaaaatcaaagaatagcatactaatattaatggaaatgcagagtatatttaattggcatgattttttcatggatgtgtgcttcatttgatctattgtatgtagctcgtgatcacattttctgttggttaacattgttcctagcttatatgatggaattaaatatattctgtgtaaaaa

SEQ ID NO: 447300 - DNA, 1092 bp, Homo sapiens
tggggttcgaaccagcaagacaagcgggcatggccacagcagcgcgaggcgggcacggggtattgtccggctccggcggcggcggtcggtgctgcgagagcggcggcggcggcgcgggtcggcagcgggagggcgcgcggccgagcggaggcggagtcggcgccgagaacatggctggaggcaaagctggaaaggacagtgggaaggccaaggctaaggcagtatctcgctcacagagagctgggctacagtttcctgtgggccgcatccacagacacttgaagactcgcaccacaagccatggaagggtgggtgccactgctgccgtgtacagtgctgcgattctggagtacctcactgcagaggtgctggagctggcaggtaatgcttctaaggatctcaaagtaaagcgtatcactccgcgtcacttgcagcttgcaatccgtggtgatgaagagttggattctcttatcaaggctaccatagctgggggtggtgtgatccctcacatccacaaatctctgattggaaagaagggacagcagaaaactgcttagagggatgctttaaccaaccctcttcctccccgtcattgtactgtaactgggacagaagaaataatggggatatgtggaatttttaacaacagttaaatggaaaagcatagacaattactgtagacatgataaaagaaacatttgtatgttcttagactcgaagtttgataaaagtaccttttcatgtggtgacagttgtgtgttgattggctaggtttctcccgtgtgttttatacaaaaatggaattgataaaccaaaaaaaaaaaaaaaaaaaaaaaaaaaccctcgtgccgaattcggcacgagctcgtgccgaattcggcacgagaaataacagagaaactgttatatctttttaatgatttatttgcaagtattgagatttgacctgaaaaacaatgaaacacatgaaccacacttccgattttcttcctcgctgattagccttcctgccctgctgtacagtgcttggaacaaaatggcttttaacctacttttatggtaacaattaccagaaaccagctttgagggtcc

SEQ ID NO: 447301 - DNA, 1014 bp, Homo sapiens
tggggttcgaaccagcaagacaagcgggcatggccacagcagcgcgaggcgggcacggggtattgtccggctccggcggcggcggtcggtgctgcgagagcggcggcggcggcgcgggtcggcagcgggagggcgcgcggccgagcggaggcggagtcggcgccgagaacatgtttcctgtgggccgcatccacagacacttgaagactcgcaccacaagccatggaagggtgggtgccactgctgccgtgtacagtgctgcgattctggagtacctcactgcagaggtgctggagctggcaggtaatgcttctaaggatctcaaagtaaagcgtatcactccgcgtcacttgcagcttgcaatccgtggtgatgaagagttggattctcttatcaaggctaccatagctgggggtggtgtgatccctcacatccacaaatctctgattggaaagaagggacagcagaaaactgcttagagggatgctttaaccaaccctcttcctccccgtcattgtactgtaactgggacagaagaaataatggggatatgtggaatttttaacaacagttaaatggaaaagcatagacaattactgtagacatgataaaagaaacatttgtatgttcttagactcgaagtttgataaaagtaccttttcatgtggtgacagttgtgtgttgattggctaggtttctcccgtgtgttttatacaaaaatggaattgataaaccaaaaaaaaaaaaaaaaaaaaaaaaaaaccctcgtgccgaattcggcacgagctcgtgccgaattcggcacgagaaataacagagaaactgttatatctttttaatgatttatttgcaagtattgagatttgacctgaaaaacaatgaaacacatgaaccacacttccgattttcttcctcgctgattagccttcctgccctgctgtacagtgcttggaacaaaatggcttttaacctacttttatggtaacaattaccagaaaccagctttgagggtcc

SEQ ID NO: 447302 - DNA, 9132 bp, Homo sapiens
  misc_feature (1981)..(1981): n is a, c, g, or t
  misc_feature (2138)..(2138): n is a, c, g, or t
  misc_feature (2146)..(2146): n is a, c, g, or t
  misc_feature (2184)..(2184): n is a, c, g, or t
  misc_feature (2236)..(2236): n is a, c, g, or t
  misc_feature (2238)..(2238): n is a, c, g, or t
  misc_feature (3844)..(3844): n is a, c, g, or t
  misc_feature (8602)..(8602): n is a, c, g, or t
tggggttcgaaccagcaagacaagcgggcatggccacagcagcgcgaggcgggcacggggtattgtccggctccggcggcggcggtcggtgctgcgagagcggcggcggcggcgcgggtcggcagcgggagggcgcgcggccgagcggaggcggagtcggcgccgagaacatggctggaggcaaagctggaaaggacagtgggaaggccaaggctaaggcagtatctcgctcacagagagctgggctacagtttcctgtgggccgcatccacagacacttgaagactcgcaccacaagccatggaagggtgggtgccactgctgccgtgtacagtgctgcgattctggagtacctcactgcagaggtgctggagctggcaggtaatgcttctaaggatctcaaagtaaagcgtatcactccgcgtcacttgcagcttgcaatccgtggtgatgaagagttggattctcttatcaaggctaccatagctgggggtggtgtgatccctcacatccacaaatctctgattggaaagaagggacagcagaaaactgcttagagggatgctttaaccaaccctcttcctccccgtcattgtactgtaactgggacagaagaaataatggggatatgtggaatttttaacaacagttaaatggaaaagcatagacaattactgtagacatgataaaagaaacatttgtatgttcttagactcgaagtttgataaaagtaccttttcatgtggtgacagttgtgtgttgattggctaggtttctcccgtgtgttttatacaaaaatggaattgataaaccattttttacaaaattaatttgtctcaaaactgttctgttcatgatgtattagaaatattttactcagactttaaatattttaaatctcagattggttattcagagtaaccttagaacagaaattgggaatatatctttacaatgattgataccatggtatattgactcttagatgctattgatctgtagcaccattttttacaaacgactaaggaaaaaacctgccaattaaatcatgatatgccatcaattatgagacatcccaatttgagagatgttagattatagaaaagtatgcatttatgactgaaatggtagtggaattatttgaattctacaccaagcacttaccatgtgccaggccctttgcagagtgctctactgaccaagaaagttgttcctgccacattatagatgtggagcctaagggtcacagaaattgtgtgctatgccaaaaaacattgaactggtagatagaaaatgacagagctaggattcaaacctagatctggctgactccagagcctagttttacctggaattgatgttcagtttatcaaaggtttctccttttggtttaaaatcccaatttttggcctggcattgtggtttacgcctgtaatcccaacacttcgggagaccgaggctggtggaacacttgaggtcaggagtttgagaccagcctggccaacatggtaaaacgccgtctcggccaggcgcggtggctcacgcctgtaatcccagcactttgggaggccaaggtgggtgaatcacgaggtcaggaaatcgagaccatcctggctaacatggtgaaaccccgtctctatttaaaaaaatacaaaaaattggccgggtgtggtggcacgcgcctgtggtcccagctactcaggaggctgaggcatgagaatgacgtgaacccgggaggcggagcttgcagtgagccaagatggcgccactgcactccagcttggcgactgagcaagactccctctcaaaacaaacaaaaaaaagtctctactaaaaatacagaaattagccaggcatggtacacacatgttgtcccaactacttggggcactggggcacaaaaaatcacttgaacccaggaggcagaggttgcagtgagccaagatcacgccactacactccagcctaggtgacagagtgngactctgtctcaaaaaaaaaaatcccaacttttagtagtctcttagtcatgcaataacagtaatttgtacaatcttttaaaaattatatttatttatcagtttctaagaaacttttttgtttgttttgagacaggctcttgctcttttgcccaggtngaagtgcngtggcatgatcctggctcactgcagcctccacctctcnggcccaagcaatcctcttacctcagccctgcaaatagctgggaccacaggcncntgccaccatacctggctaattttttttatttatgtaagagacagaggtctccctatgttgcccaggttggtattgaactcctggctcaagccatcctcccaccttggcctcccaaagtgctgggattataggcataagccaccatgccctgccctaagtaactgttacttgagttaatgtactagttaattgacccttagaaaattatatttttctgcttgcaagtcttcattaaagaaggaaattttaaaatattttatagtataatgctatccaaactcatttttaaaaacattttattatggaaattttcacaaatgcacaaaaagaatagcagaatgaagctctgtgtacccatcctccaacagctgtcctgtggtcagtcttgtttacctgcatccccacctatcccctgccccaacccacagggatcagtttgagtcccattaacaggcatagtattttcatgtttgtgtgatcagagacattcaaatataactccaaagatagggtacttttttgaacataaccacaataccattgtgtaagactgctaaaacattttttgatgccaagtaccagtcaatattcaaacttcctgattgtctcgtaagttttttttaacagttggtttattcgagtcaagatccaggcaagatctagatcttgcattttgttaatataatctatagatttaactttcctgtttttaatttttgaagaaactaagttgtttgtcctatagaattgtccttcagtggattttactgaatgtatcctaatgggatcatgtacaccttttctgtcccctatatgttctataaactgacagatctagagggcttctgttgttctgttttgctttttcacaaaaataattcataggtgatatatgctccatgttgtatcacatcatggcacataatggctctcatcttgtaacattaagattgatagtgggtttggatgctgccagcccactccattcattacaaaagttctctatcagcttttcccctgatggatttagccatcattaatgatatttgcccacatctgggattccattagaggttgccaaccagtgatatcttgtcattccttctgcatctattagctggaatcctataaagaacttgtgctcattaattcacgaggcaggataaaatagaaatttcaaattctgattgaataggcgcccattttgaagtttctgtattgagagtcaggcctacagtaaaagtagcaatagaaagctgattgtttgaaaaaaaagaagcgggggggggagtgcaatataatcaacagactttcctttggctgaatcacttgattcagggcaatttttactacagttttatagataattgcttcaaatgtctaattcattttgatagtatagttacttgactacataatttcttcccagggttgtattttcaatttgttttctaacaaaaaacatagaaatagaacaactaggtcatgtactctgggcttagctctcacagttatgatcagtctcgtttcatttgtacccaaccccttgagttattttaaagcacgttccagctatcatatcacttcatgtataatatcttaatangtatctaaaagatagcttttttatgttttattttatttttattttttcagacaaagtattactctgtcgcccaggctggcatgcagtggcacaatctcagctcactgcaacctccacctcccaggttcaagtgattcttctgcctcagcctcctgagtagctggcattacaggtgcctgccaccatgcctggctaatgtttgtttgttcttttgtttttgtttctgagacaggatctcactctgttgcctaggctggagtccaatagcctaatcttggctcactgcaacctcagcctcccaggcaactgggactacaggcatgcgccaccatgcccagctaatctgtgtgtgttttttgtttgtttgtttatttgtgtagtagagatggggtttcaccatgttggccaggctggtctcaaactcctgacctcaagtgatccacccgcctcagcctcccaaagtgctgggattacaggcatgagccactgtgcctggcgtagaaagtatttcttataattaaaaacaacacccagtctaactagtataacacctaaaaaattgtcagatctgtattttagatagtacgacacagtgaaatgcaatggcacttaagcagagagaagaaggatttttctttttctttttttaaatagaaggtgttagaacctgaactgggcctggtttgcatttgggaagagtccagtggggaaacaacacaaataaggtcttgagaatgaagaattgcatttatatagggagttgtaacaaatggcctggagagtatctgactctttatgaaacatttaatgagaaatgtgacttgctttggtgcctatggttgaatttgttgcgatgcttctgacattatgaaaattttcaaacatgcaaaaaagttccagtagttatccagtgaattcttatactcaccacctatatctatagttaacattttacttgtattttatccagttatcagctcatctatgagatggcccttatttatttgcctgctgtttttattctctatttgtcctgttatttcttgttagagaagagaaggtgttcttagatcagaagatgccattgtattaggtgacggcaaggttttgctgatttagtggaacaagattctactgggatgtgtgctgagctgaaccaaggaactgcccgaatgtgctgaacaaggacatttgcttctcagatacgtgaattcaattttaagcaagattcttgatctgcttcagagcagctttgatttaaagtaatttcagagcacttttccttgcatgagtaattttctgaatgtataaaatattctatttatgtttgaccttttggataaactgtgttgctgcagtgttggtccacactaccatcctaagtgaagacttagtaagtctgaggatctccaggcactggaaagagtgagaacctgggagtgaaagggttatagttagtgttcatttttcgggttttgtttcatagggagtcctgagtggggtaacctgaaatgttttaacagttgaagatcatcccattcctatccccagtaaaaataggcctttccacaatcttctaccagttaacttagcttttttttttttttttccttaatagagtctcattcttgtcacccagactggagtgcgatggcacgatcttggctcactgcaaccctccctcccgggttccagcgattctcctgcctcagcctcccaagtagctgggattacaggcgcacgccaccatgcccagctaatttttgtatttttagtagacgtggggtttcaccatgttggccagactggtctcaaactcctgacctcaggcgatccgcccgtctaagccttccaaagtgctgggattactggcaggaaccaccaggcccagccaaccagcatttcttaaggtgaaaatacatggtgttaatttatattttgagtgagacccagtccagctgctataactgcttggacacttggcagaggacagagtactgcaaaagtgtctaagggagacagcattttgccttgggtgctgtagatgtacaagagaggttccaggagggggtgataggcagaattttggtccccatcaccttccctgcccagtgttatgcctatgaatgtgttacattatgtggtaaaagggactttgcagatgtaactaaaatttctaaaatagagatattatcctggattacctgggggaacccagtgtaattacatgaacccttaaaaatggaagaggatgcaggagtcagattcaaaggaaggcccaaggtgctattgctgacttgaagatagaggggccatgtggaaatcaagagaaggaagtgaatccttccagtgagcttggaagagagcaccttgaggcacagatgagaagcttggccttacctgatgccttgattttagcctggtgagaccccgagcatataaatttgctgtgctatgccacacttctcacctacagaaacttagtttaaagccactaagtttgtggtaatttgttggctttaggcccctgagggtagagatttatggcttgtgttacaagtagagagcagtggagagttgggctttgtaattctttcaagggtgattgtagttctggagtcctatctacctgggttcagatctttgttggccagtccctggctgtgtgacttcactgctttaagcctctgtcttcatccttaaagtggcgatgatagtacctacctcactctgatctctgaatgagaacacatgtaagacacttagcacagttcctggtgctcaaagagttccaacacctgaaagcaccatggccctgtttgtttttcagtcaagatttctaaaagccgttattaccagaggttcagtgagaacatgggcagggtaaactcaaaatggagaacataaaaactgggactcccagaccagtcacttagaagactgctgcaggaagtaccaaggtcgttaagaatcagtaataataataagtaatgtgtgaatccattagaatgttgagaagtagacctttgacatttcagaaaaatgtatatctcagacacagccatatgtattgttatccctgagttggaagagcatcacagggcatagtttcacaaaagcttcaaaaaatatactaattgctggtaatatgtgaactaacagaaaaaaatagccatgttaaaataggagtgcctgacaattagctctattcatcttgtctcctagctgtaagcaccctagattcaaattatgcacctagaaaactaaattactatgtatgttataggcctttgaaatggatacatgaaaattagtgaaatcagaatgaacgtttcgcctgccaaagatatgtatttttataagtgatacaagggccccatgagctccatggccacatctgtacaaaacaggccctcctttcaggaactggtctcgagagagcaaaggggtcaactccctaaatggcagctgagacagtcctccctggtggcatggccctgtttcctgttgatatggtgatagttggagagtcaaatttttaccagaatttgtgaatatcatctctggttaatgattacacaaaaccttttaaaattttaaaaaattatttctaattctataaataaactctgcagttgtacagccactgtacagctaacatctcaacactggaaatgaggctggtttcttccagtttggctcagattcttcagggaagcccagttaagacaaacagctctctatactcaatccttactttgctgagaagatacaggcctgcccactcgctcccacctgctcttcatgaggagtcctttattcctgcatgtttcctgttctttgggacctttaggagctaacctccacagatgctgatagtctgtagagtcaggaataccatgtaacatgttgaagtagactaaagattagttctttggcaatagcccagtctggacttactatgtacttttgaaaataaaactgcttatttgtaaactctgtaattaggaccttttgctatttgagttatattcctttctaacttcaaacgtctgcattcatgtataatagccattttatgcacagatgaggtgattcccacacttcttttcgcagatgtttcattatctggatgagtgtattacataataaatttgaataatggtagtcttccaaatgacaaaaagcaagctagttgatttgtcaattttgagtttaaatgttttgactgcttatcagcaaaaaaaatcaaagaatagcatactaatattaatggaaatgcagagtatatttaattggcatgattttttcatggatgtgtgcttcatttgatctattgtatgtagctcgtgatcacattttctgttggttaacattgttcctagcttatatgatggaattaaatatattctgtgtaaaaaaaaaaaaaaaaaaaaaaaaaaaaaaacaaaaaaaaaaaaaaaaagaggggcggcgcgcgcggcaaaaaaattccccccgggggggcccacatttctaccgcgccccccttttttttttaaaaggggggcccccaaaatagggggggcttattatataaaacaaggagcgggggcgcggtttaaaaaaaacggggagcagggaaacacaacgcagtacaagtgagaaatcctgagtgagagaggcccacctatcttcggggggggcgagcacacaatgtgggagcccacactccctcagagagtatataagagccgcagtacggaataaaatctaccntggaaagggtaactcgggggtgcgaccaccacacggaaaaattacgctggagcggtgaaagagagtttgcggacacacgcgaagatcatatactgacacaaacttttctccaggcgggcgcatgatctaacaacaagaaaaaataggttagtacataggaaagagagggaaatcaaagcgatagagtacgtaatcacagataaaagaagaaagagaaaggaacagaaaacaaagaggatagatagagcgaaactagacagcatagagaagatacaaaaaaaagacgaggactaacacagaaagaagcaaaaacagaaaaacaaaaaacagacgaagaaaaaagaaaagtaaaagaacaacagagaatagacagcagtaacaaaaataaaagacagagcagagcaagaagatgtaagtaagagctagaagatatagcacaaacagacaggcatagaaaacagacatgaggaacgataagacataggaaaaaggaagaaacgacagaagaagataataacaaccgaatcagt

SEQ ID NO: 447303 - DNA, 8265 bp, Homo sapiens
  misc_feature (1981)..(1981): n is a, c, g, or t
  misc_feature (2138)..(2138): n is a, c, g, or t
  misc_feature (2146)..(2146): n is a, c, g, or t
  misc_feature (2184)..(2184): n is a, c, g, or t
  misc_feature (2236)..(2236): n is a, c, g, or t
  misc_feature (2238)..(2238): n is a, c, g, or t
  misc_feature (3844)..(3844): n is a, c, g, or t
tggggttcgaaccagcaagacaagcgggcatggccacagcagcgcgaggcgggcacggggtattgtccggctccggcggcggcggtcggtgctgcgagagcggcggcggcggcgcgggtcggcagcgggagggcgcgcggccgagcggaggcggagtcggcgccgagaacatggctggaggcaaagctggaaaggacagtgggaaggccaaggctaaggcagtatctcgctcacagagagctgggctacagtttcctgtgggccgcatccacagacacttgaagactcgcaccacaagccatggaagggtgggtgccactgctgccgtgtacagtgctgcgattctggagtacctcactgcagaggtgctggagctggcaggtaatgcttctaaggatctcaaagtaaagcgtatcactccgcgtcacttgcagcttgcaatccgtggtgatgaagagttggattctcttatcaaggctaccatagctgggggtggtgtgatccctcacatccacaaatctctgattggaaagaagggacagcagaaaactgcttagagggatgctttaaccaaccctcttcctccccgtcattgtactgtaactgggacagaagaaataatggggatatgtggaatttttaacaacagttaaatggaaaagcatagacaattactgtagacatgataaaagaaacatttgtatgttcttagactcgaagtttgataaaagtaccttttcatgtggtgacagttgtgtgttgattggctaggtttctcccgtgtgttttatacaaaaatggaattgataaaccattttttacaaaattaatttgtctcaaaactgttctgttcatgatgtattagaaatattttactcagactttaaatattttaaatctcagattggttattcagagtaaccttagaacagaaattgggaatatatctttacaatgattgataccatggtatattgactcttagatgctattgatctgtagcaccattttttacaaacgactaaggaaaaaacctgccaattaaatcatgatatgccatcaattatgagacatcccaatttgagagatgttagattatagaaaagtatgcatttatgactgaaatggtagtggaattatttgaattctacaccaagcacttaccatgtgccaggccctttgcagagtgctctactgaccaagaaagttgttcctgccacattatagatgtggagcctaagggtcacagaaattgtgtgctatgccaaaaaacattgaactggtagatagaaaatgacagagctaggattcaaacctagatctggctgactccagagcctagttttacctggaattgatgttcagtttatcaaaggtttctccttttggtttaaaatcccaatttttggcctggcattgtggtttacgcctgtaatcccaacacttcgggagaccgaggctggtggaacacttgaggtcaggagtttgagaccagcctggccaacatggtaaaacgccgtctcggccaggcgcggtggctcacgcctgtaatcccagcactttgggaggccaaggtgggtgaatcacgaggtcaggaaatcgagaccatcctggctaacatggtgaaaccccgtctctatttaaaaaaatacaaaaaattggccgggtgtggtggcacgcgcctgtggtcccagctactcaggaggctgaggcatgagaatgacgtgaacccgggaggcggagcttgcagtgagccaagatggcgccactgcactccagcttggcgactgagcaagactccctctcaaaacaaacaaaaaaaagtctctactaaaaatacagaaattagccaggcatggtacacacatgttgtcccaactacttggggcactggggcacaaaaaatcacttgaacccaggaggcagaggttgcagtgagccaagatcacgccactacactccagcctaggtgacagagtgngactctgtctcaaaaaaaaaaatcccaacttttagtagtctcttagtcatgcaataacagtaatttgtacaatcttttaaaaattatatttatttatcagtttctaagaaacttttttgtttgttttgagacaggctcttgctcttttgcccaggtngaagtgcngtggcatgatcctggctcactgcagcctccacctctcnggcccaagcaatcctcttacctcagccctgcaaatagctgggaccacaggcncntgccaccatacctggctaattttttttatttatgtaagagacagaggtctccctatgttgcccaggttggtattgaactcctggctcaagccatcctcccaccttggcctcccaaagtgctgggattataggcataagccaccatgccctgccctaagtaactgttacttgagttaatgtactagttaattgacccttagaaaattatatttttctgcttgcaagtcttcattaaagaaggaaattttaaaatattttatagtataatgctatccaaactcatttttaaaaacattttattatggaaattttcacaaatgcacaaaaagaatagcagaatgaagctctgtgtacccatcctccaacagctgtcctgtggtcagtcttgtttacctgcatccccacctatcccctgccccaacccacagggatcagtttgagtcccattaacaggcatagtattttcatgtttgtgtgatcagagacattcaaatataactccaaagatagggtacttttttgaacataaccacaataccattgtgtaagactgctaaaacattttttgatgccaagtaccagtcaatattcaaacttcctgattgtctcgtaagttttttttaacagttggtttattcgagtcaagatccaggcaagatctagatcttgcattttgttaatataatctatagatttaactttcctgtttttaatttttgaagaaactaagttgtttgtcctatagaattgtccttcagtggattttactgaatgtatcctaatgggatcatgtacaccttttctgtcccctatatgttctataaactgacagatctagagggcttctgttgttctgttttgctttttcacaaaaataattcataggtgatatatgctccatgttgtatcacatcatggcacataatggctctcatcttgtaacattaagattgatagtgggtttggatgctgccagcccactccattcattacaaaagttctctatcagcttttcccctgatggatttagccatcattaatgatatttgcccacatctgggattccattagaggttgccaaccagtgatatcttgtcattccttctgcatctattagctggaatcctataaagaacttgtgctcattaattcacgaggcaggataaaatagaaatttcaaattctgattgaataggcgcccattttgaagtttctgtattgagagtcaggcctacagtaaaagtagcaatagaaagctgattgtttgaaaaaaaagaagcgggggggggagtgcaatataatcaacagactttcctttggctgaatcacttgattcagggcaatttttactacagttttatagataattgcttcaaatgtctaattcattttgatagtatagttacttgactacataatttcttcccagggttgtattttcaatttgttttctaacaaaaaacatagaaatagaacaactaggtcatgtactctgggcttagctctcacagttatgatcagtctcgtttcatttgtacccaaccccttgagttattttaaagcacgttccagctatcatatcacttcatgtataatatcttaatangtatctaaaagatagcttttttatgttttattttatttttattttttcagacaaagtattactctgtcgcccaggctggcatgcagtggcacaatctcagctcactgcaacctccacctcccaggttcaagtgattcttctgcctcagcctcctgagtagctggcattacaggtgcctgccaccatgcctggctaatgtttgtttgttcttttgtttttgtttctgagacaggatctcactctgttgcctaggctggagtccaatagcctaatcttggctcactgcaacctcagcctcccaggcaactgggactacaggcatgcgccaccatgcccagctaatctgtgtgtgttttttgtttgtttgtttatttgtgtagtagagatggggtttcaccatgttggccaggctggtctcaaactcctgacctcaagtgatccacccgcctcagcctcccaaagtgctgggattacaggcatgagccactgtgcctggcgtagaaagtatttcttataattaaaaacaacacccagtctaactagtataacacctaaaaaattgtcagatctgtattttagatagtacgacacagtgaaatgcaatggcacttaagcagagagaagaaggatttttctttttctttttttaaatagaaggtgttagaacctgaactgggcctggtttgcatttgggaagagtccagtggggaaacaacacaaataaggtcttgagaatgaagaattgcatttatatagggagttgtaacaaatggcctggagagtatctgactctttatgaaacatttaatgagaaatgtgacttgctttggtgcctatggttgaatttgttgcgatgcttctgacattatgaaaattttcaaacatgcaaaaaagttccagtagttatccagtgaattcttatactcaccacctatatctatagttaacattttacttgtattttatccagttatcagctcatctatgagatggcccttatttatttgcctgctgtttttattctctatttgtcctgttatttcttgttagagaagagaaggtgttcttagatcagaagatgccattgtattaggtgacggcaaggttttgctgatttagtggaacaagattctactgggatgtgtgctgagctgaaccaaggaactgcccgaatgtgctgaacaaggacatttgcttctcagatacgtgaattcaattttaagcaagattcttgatctgcttcagagcagctttgatttaaagtaatttcagagcacttttccttgcatgagtaattttctgaatgtataaaatattctatttatgtttgaccttttggataaactgtgttgctgcagtgttggtccacactaccatcctaagtgaagacttagtaagtctgaggatctccaggcactggaaagagtgagaacctgggagtgaaagggttatagttagtgttcatttttcgggttttgtttcatagggagtcctgagtggggtaacctgaaatgttttaacagttgaagatcatcccattcctatccccagtaaaaataggcctttccacaatcttctaccagttaacttagcttttttttttttttttccttaatagagtctcattcttgtcacccagactggagtgcgatggcacgatcttggctcactgcaaccctccctcccgggttccagcgattctcctgcctcagcctcccaagtagctgggattacaggcgcacgccaccatgcccagctaatttttgtatttttagtagacgtggggtttcaccatgttggccagactggtctcaaactcctgacctcaggcgatccgcccgtctaagccttccaaagtgctgggattactggcaggaaccaccaggcccagccaaccagcatttcttaaggtgaaaatacatggtgttaatttatattttgagtgagacccagtccagctgctataactgcttggacacttggcagaggacagagtactgcaaaagtgtctaagggagacagcattttgccttgggtgctgtagatgtacaagagaggttccaggagggggtgataggcagaattttggtccccatcaccttccctgcccagtgttatgcctatgaatgtgttacattatgtggtaaaagggactttgcagatgtaactaaaatttctaaaatagagatattatcctggattacctgggggaacccagtgtaattacatgaacccttaaaaatggaagaggatgcaggagtcagattcaaaggaaggcccaaggtgctattgctgacttgaagatagaggggccatgtggaaatcaagagaaggaagtgaatccttccagtgagcttggaagagagcaccttgaggcacagatgagaagcttggccttacctgatgccttgattttagcctggtgagaccccgagcatataaatttgctgtgctatgccacacttctcacctacagaaacttagtttaaagccactaagtttgtggtaatttgttggctttaggcccctgagggtagagatttatggcttgtgttacaagtagagagcagtggagagttgggctttgtaattctttcaagggtgattgtagttctggagtcctatctacctgggttcagatctttgttggccagtccctggctgtgtgacttcactgctttaagcctctgtcttcatccttaaagtggcgatgatagtacctacctcactctgatctctgaatgagaacacatgtaagacacttagcacagttcctggtgctcaaagagttccaacacctgaaagcaccatggccctgtttgtttttcagtcaagatttctaaaagccgttattaccagaggttcagtgagaacatgggcagggtaaactcaaaatggagaacataaaaactgggactcccagaccagtcacttagaagactgctgcaggaagtaccaaggtcgttaagaatcagtaataataataagtaatgtgtgaatccattagaatgttgagaagtagacctttgacatttcagaaaaatgtatatctcagacacagccatatgtattgttatccctgagttggaagagcatcacagggcatagtttcacaaaagcttcaaaaaatatactaattgctggtaatatgtgaactaacagaaaaaaatagccatgttaaaataggagtgcctgacaattagctctattcatcttgtctcctagctgtaagcaccctagattcaaattatgcacctagaaaactaaattactatgtatgttataggcctttgaaatggatacatgaaaattagtgaaatcagaatgaacgtttcgcctgccaaagatatgtatttttataagtgatacaagggccccatgagctccatggccacatctgtacaaaacaggccctcctttcaggaactggtctcgagagagcaaaggggtcaactccctaaatggcagctgagacagtcctccctggtggcatggccctgtttcctgttgatatggtgatagttggagagtcaaatttttaccagaatttgtgaatatcatctctggttaatgattacacaaaaccttttaaaattttaaaaaattatttctaattctataaataaactctgcagttgtacagccactgtacagctaacatctcaacactggaaatgaggctggtttcttccagtttggctcagattcttcagggaagcccagttaagacaaacagctctctatactcaatccttactttgctgagaagatacaggcctgcccactcgctcccacctgctcttcatgaggagtcctttattcctgcatgtttcctgttctttgggacctttaggagctaacctccacagatgctgatagtctgtagagtcaggaataccatgtaacatgttgaagtagactaaagattagttctttggcaatagcccagtctggacttactatgtacttttgaaaataaaactgcttatttgtaaactctgtaattaggaccttttgctatttgagttatattcctttctaacttcaaacgtctgcattcatgtataatagccattttatgcacagatgaggtgattcccacacttcttttcgcagatgtttcattatctggatgagtgtattacataataaatttgaataatggtagtcttccaaatgacaaaaagcaagctagttgatttgtcaattttgagtttaaatgttttgactgcttatcagcaaaaaaaatcaaagaatagcatactaatattaatggaaatgcagagtatatttaattggcatgattttttcatggatgtgtgcttcatttgatctattgtatgtagctcgtgatcacattttctgttggttaacattgttcctagcttatatgatggaattaaatatattctgtgtaaaaa

SEQ ID NO: 447304 - DNA, 2378 bp, Homo sapiens
gcggccgcggcggcggcggcgagagcgaaagaggaaactgcagaggaggaagctgcgccgcagcccgagccgcccggcatccccgccgcctctgcgcccgcgccgcgcccccggcgccccctccccagcgcgcccccggccgctcctccgcgccgcgctcgtcggccatggcccgggagaacggcgagagcagctcctcctggaaaaagcaagctgaagacatcaagaagatcttcgagttcaaagagaccctcggaaccggggccttttccgaagtggttttagctgaagagaaggcaactggcaagctctttgctgtgaagtgtatccctaagaaggcgctgaagggcaaggaaagcagcatagagaatgagatagccgtcctgagaaagattaagcatgaaaatattgttgccctggaagacatttatgaaagcccaaatcacctgtacttggtcatgcagctggtgtccggtggagagctgtttgaccggatagtggagaaggggttttatacagagaaggatgccagcactctgatccgccaagtcttggacgccgtgtactatctccacagaatgggcatcgtccacagagacctcaagcccgaaaatctcttgtactacagtcaagatgaggagtccaaaataatgatcagtgactttggattgtcaaaaatggagggcaaaggagatgtgatgtccactgcctgtggaactccaggctatgtcgctcctgaagtcctcgcccagaaaccttacagcaaagccgttgactgctggtccatcggagtgattgcctacatcttgctctgcggctaccctcctttttatgatgaaaatgactccaagctctttgagcagatcctcaaggcggaatatgagtttgactctccctactgggatgacatctccgactctgcaaaagacttcattcggaacctgatggagaaggacccgaataaaagatacacgtgtgagcaggcagctcggcacccatggatcgctggtgacacagccctcaacaaaaacatccacgagtccgtcagcgcccagatccggaaaaactttgccaagagcaaatggagacaagcatttaatgccacggccgtcgtgagacatatgagaaaactacacctcggcagcagcctggacagttcaaatgcaagtgtttcgagcagcctcagtttggccagccaaaaagactgtgcgtatgtagcaaaaccagaatccctcagctgacactgaagacgagcctggggtggagaggagggagccggcatctgccgagcacctcctgtttgccaggcgctttctatacttaatcccatgtcatgcgaccctaggactttttttaacatgtaatcactgggctgggtgcagtggctcacgcctgtaatcccaacactttgggaggctgaggcaggaggactgtttgagttcaggagttttaagaccagcctgaccaacatggtgaaaccccatctctactaaaatataaaaattagccgggtgtggtggcgagcacctgtaatgtcagctacttgggaggctgaggcaggagaatcacttgaacccaggaagcggaggttgcaatcagctgagatcacaccactgcactccagcctgggtgacagattgagactccctctcaaaaaaaaaaagaaaaatcattgaacactcgtggaaccctaggtattgctatttccatttacagttgaggaatccagggctcaagtcctcgcagccatgtctgtctggataaaggcctggactctttctcatctccatccttccctctgatttacctctcattgtacagtcactcttgcggattgaggaagggagagcagagcctcaggacagcctcctgccattgacttccataatgtatatattttggatgcagacaatgataatttgagctcatttatgtgaagtgcattgactttgcaataaaagtaatagtatttcattgtccttcgtctttgcatgggctattccatcatcgaaggcacacttactctctccttatctctctccccaactgctcctctctctgtggaaataatcccgtttggcccttcccatgggtcctctccacatcagagcagtggccctaatctccctaaccatggagcagccctgcagcctggtctcaccctgggcatcatgctccttcccatttggctcagaaaaggattcccttcctctctaaggaatcttcccatctcatttgggaccatccagcccttaaattttcccaagaaatctctgtgagtgtcccctgacataccatagctcccctttcaccctgaatcttttccaccctctggtcaaagggaaccccacgatggatcccttctttacagattcata

SEQ ID NO: 447305 - DNA, 473 bp, Homo sapiens
gcggccgcggcggcggcggcgagagcgaaagaggaaactgcagaggaggaagctgcgccgcagcccgagccgcccggcatccccgccgcctctgcgcccgcgccgcgcccccggcgccccctccccagcgcgcccccggccgctcctccgcgccgcgctcgtcggccatggcccgggagaacggcgagagcagctcctcctggaaaaagcaagctgaagacatcaagaagatcttcgagttcaaagagaccctcggaacgattaagcatgaaaatattgttgccctggaagacatttatgaaagcccaaatcacctgtacttggtcatgcagctgtaagtaccttgtttgattgatgagttttgaaccaacttgcaaactccaatgtctaaagggatcaggtgggaaaagaagtgattgaagtgggccaggtaaggcagtagggagcagggaggcctgtgggatactagagag

SEQ ID NO: 447306 - DNA, 1948 bp, Homo sapiens
agcggatgaatttgatgactttggacacctcctcggggccttttccgaagtggttttagctgaagagaaggcaactggcaagctctttgctgtgaagtgtatccctaagaaggcgctgaagggcaaggaaagcagcatagagaatgagatagccgtcctgagaaagattaagcatgaaaatattgttgccctggaagacatttatgaaagcccaaatcacctgtacttggtcatgcagctggtgtccggtggagagctgtttgaccggatagtggagaaggggttttatacagagaaggatgccagcactctgatccgccaagtcttggacgccgtgtactatctccacagaatgggcatcgtccacagagacctcaagcccgaaaatctcttgtactacagtcaagatgaggagtccaaaataatgatcagtgactttggattgtcaaaaatggagggcaaaggagatgtgatgtccactgcctgtggaactccaggctatgtcgctcctgaagtcctcgcccagaaaccttacagcaaagccgttgactgctggtccatcggagtgattgcctacatcttgctctgcggctaccctcctttttatgatgaaaatgactccaagctctttgagcagatcctcaaggcggaatatgagtttgactctccctactgggatgacatctccgactctgcaaaagacttcattcggaacctgatggagaaggacccgaataaaagatacacgtgtgagcaggcagctcggcacccatggatcgctggtgacacagccctcaacaaaaacatccacgagtccgtcagcgcccagatccggaaaaactttgccaagagcaaatggagacaagcatttaatgccacggccgtcgtgagacatatgagaaaactacacctcggcagcagcctggacagttcaaatgcaagtgtttcgagcagcctcagtttggccagccaaaaagactgtctggcaccttccacgctctgtagtttcatttcttcttcgtcgggggtctcaggagttggagccgagcggagacccaggcccaccactgtgacggcagtgcactctggaagcaagtgactggccctggaggtggggcccggggtcggggctggggaaggggagccccagggtcgccagagccgcgagccactccagcgagaccccaccttgcatggtgccccttcctgcataggactggaagaccgaagtttttttatggccatattttctactgcaattctgaagtgttcatttctcacaaactgtactgactcgaggggcgctgatttcataggatctggtgctgtatatacgaatcttgcaaagctctaactgaacggaccttcttattcctctcccctaacaccatcgtttccactcttctcagtgtaggtaaccgtctatggtgtgttttttcattaatgacaaaaaaaaaaaggtttcaactggattatttaaatattggtaaatattgtgcattagggtttgtttttccttttaagaagtatgtcctttgtatctctaagttacatgacctatatcttttcctctttaatagtagttttatgttaacctttaagagatttgtttttcctcaaaggagaatttaaaggtattttttaaaattctaataagaggatcagccgggtgcaatgactcatgcctgtaatcccagcacgttgggaggccaagtcgggcggatcacaaggtcaggagatcaaggccatcctggccaacatggtgaaaccccacgtctactaaaaatacaaaaaattagccgggcgtggtggcacacacctgtagtcccggctactcgggaggctgaggcaggagaattgcttgaacccgggagacggaggttgcagtgagctgagatcgtgccactgcactccagcctgggtgacagagcaagactctgtctcaaaa

SEQ ID NO: 447307 - DNA, 1251 bp, Homo sapiens
taagactcccctttatgggacgcagtgtcagggcccagaagaagcacttcagagcagcacctttgcctctgtttcaggatcgctggtgacacagccctcaacaaaaacatccacgagtccgtcagcgcccagatccggaaaaactttgccaagagcaaatggagacaagcatttaatgccacggccgtcgtgagacatatgagaaaactacacctcggcagcagcctggacagttcaaatgcaagtgtttcgagcagcctcagtttggccagccaaaaagactgtctggcaccttccacgctctgtagtttcatttcttcttcgtcgggggtctcaggagttggagccgagcggagacccaggcccaccactgtgacggcagtgcactctggaagcaagtgactggccctggaggtggggcccggggtcggggctggggaaggggagccccagggtcgccagagccgcgagccactccagcgagaccccaccttgcatggtgccccttcctgcataggactggaagaccgaagtttttttatggccatattttctactgcaattctgaagtgttcatttctcacaaactgtactgactcgaggggcgctgatttcataggatctggtgctgtatatacgaatcttgcaaagctctaactgaacggaccttcttattcctctcccctaacaccatcgtttccactcttctcagtgtaggtaaccgtctatggtgtgttttttcattaatgacaaaaaaaaaaaggtttcaactggattatttaaatattggtaaatattgtgcattagggtttgtttttccttttaagaagtatgtcctttgtatctctaagttacatgacctatatcttttcctctttaatagtagttttatgttaacctttaagagatttgtttttcctcaaaggagaatttaaaggtattttttaaaattctaataagaggatcagccgggtgcaatgactcatgcctgtaatcccagcacgttgggaggccaagtcgggcggatcacaaggtcaggagatcaaggccatcctggccaacatggtgaaaccccacgtctactaaaaatacaaaaaattagccgggcgtggtggcacacacctgtagtcccggctactcgggaggctgaggcaggagaattgcttgaacccgggagacggaggttgcagtgagctgagatcgtgccactgcactccagcctgggtgacagagcaagactctgtctcaaaa

SEQ ID NO: 447308 - DNA, 2174 bp, Homo sapiens
gcggccgcggcggcggcggcgagagcgaaagaggaaactgcagaggaggaagctgcgccgcagcccgagccgcccggcatccccgccgcctctgcgcccgcgccgcgcccccggcgccccctccccagcgcgcccccggccgctcctccgcgccgcgctcgtcggccatggcccgggagaacggcgagagcagctcctcctggaaaaagcaagctgaagacatcaagaagatcttcgagttcaaagagaccctcggaaccggggccttttccgaagtggttttagctgaagagaaggcaactggcaagctctttgctgtgaagtgtatccctaagaaggcgctgaagggcaaggaaagcagcatagagaatgagatagccgtcctgagaaagattaagcatgaaaatattgttgccctggaagacatttatgaaagcccaaatcacctgtacttggtcatgcagctggtgtccggtggagagctgtttgaccggatagtggagaaggggttttatacagagaaggatgccagcactctgatccgccaagtcttggacgccgtgtactatctccacagaatgggcatcgtccacagagacctcaagcccgaaaatctcttgtactacagtcaagatgaggagtccaaaataatgatcagtgactttggattgtcaaaaatggagggcaaaggagatgtgatgtccactgcctgtggaactccaggctatgtcgctcctgaagtcctcgcccagaaaccttacagcaaagccgttgactgctggtccatcggagtgattgcctacatcttgctctgcggctaccctcctttttatgatgaaaatgactccaagctctttgagcagatcctcaaggcggaatatgagtttgactctccctactgggatgacatctccgactctgcaaaagacttcattcggaacctgatggagaaggacccgaataaaagatacacgtgtgagcaggcagctcggcacccatggatcgctggtgacacagccctcaacaaaaacatccacgagtccgtcagcgcccagatccggaaaaactttgccaagagcaaatggagacaagcatttaatgccacggccgtcgtgagacatatgagaaaactacacctcggcagcagcctggacagttcaaatgcaagtgtttcgagcagcctcagtttggccagccaaaaagactgtctggcaccttccacgctctgtagtttcatttcttcttcgtcgggggtctcaggagttggagccgagcggagacccaggcccaccactgtgacggcagtgcactctggaagcaagtgactggccctggaggtggggcccggggtcggggctggggaaggggagccccagggtcgccagagccgcgagccactccagcgagaccccaccttgcatggtgccccttcctgcataggactggaagaccgaagtttttttatggccatattttctactgcaattctgaagtgttcatttctcacaaactgtactgactcgaggggcgctgatttcataggatctggtgctgtatatacgaatcttgcaaagctctaactgaacggaccttcttattcctctcccctaacaccatcgtttccactcttctcagtgtaggtaaccgtctatggtgtgttttttcattaatgacaaaaaaaaaaaggtttcaactggattatttaaatattggtaaatattgtgcattagggtttgtttttccttttaagaagtatgtcctttgtatctctaagttacatgacctatatcttttcctctttaatagtagttttatgttaacctttaagagatttgtttttcctcaaaggagaatttaaaggtattttttaaaattctaataagaggatcagccgggtgcaatgactcatgcctgtaatcccagcacgttgggaggccaagtcgggcggatcacaaggtcaggagatcaaggccatcctggccaacatggtgaaaccccacgtctactaaaaatacaaaaaattagccgggcgtggtggcacacacctgtagtcccggctactcgggaggctgaggcaggagaattgcttgaacccgggagacggaggttgcagtgagctgagatcgtgccactgcactccagcctgggtgacagagcaagactctgtctcaaaa

SEQ ID NO: 447309 - DNA, 1783 bp, Homo sapiens
ggtggctgcccccggcactgggatggttgctcagtagcacgtcgccagggtggagatcggcccccaggtgctgaatcagcaatgctcatgaagcggtgtgagaagatggacagctggatagggtccagctgggggcccactgtgccggggacttcggcccccacggagatgcagatgtcccctgtcttggtcacctctgcctggcaacctggctccaccaggatggtgctgttacagtcaagatgaggagtccaaaataatgatcagtgactttggattgtcaaaaatggagggcaaaggagatgtgatgtccactgcctgtggaactccaggctatgtcgctcctgaagtcctcgcccagaaaccttacagcaaagccgttgactgctggtccatcggagtgattgcctacatcttgctctgcggctaccctcctttttatgatgaaaatgactccaagctctttgagcagatcctcaaggcggaatatgagtttgactctccctactgggatgacatctccgactctgcaaaagacttcattcggaacctgatggagaaggacccgaataaaagatacacgtgtgagcaggcagctcggcacccatggatcgctggtgacacagccctcaacaaaaacatccacgagtccgtcagcgcccagatccggaaaaactttgccaagagcaaatggagacaagcatttaatgccacggccgtcgtgagacatatgagaaaactacacctcggcagcagcctggacagttcaaatgcaagtgtttcgagcagcctcagtttggccagccaaaaagactgtctggcaccttccacgctctgtagtttcatttcttcttcgtcgggggtctcaggagttggagccgagcggagacccaggcccaccactgtgacggcagtgcactctggaagcaagtgactggccctggaggtggggcccggggtcggggctggggaaggggagccccagggtcgccagagccgcgagccactccagcgagaccccaccttgcatggtgccccttcctgcataggactggaagaccgaagtttttttatggccatattttctactgcaattctgaagtgttcatttctcacaaactgtactgactcgaggggcgctgatttcataggatctggtgctgtatatacgaatcttgcaaagctctaactgaacggaccttcttattcctctcccctaacaccatcgtttccactcttctcagtgtaggtaaccgtctatggtgtgttttttcattaatgacaaaaaaaaaaaggtttcaactggattatttaaatattggtaaatattgtgcattagggtttgtttttccttttaagaagtatgtcctttgtatctctaagttacatgacctatatcttttcctctttaatagtagttttatgttaacctttaagagatttgtttttcctcaaaggagaatttaaaggtattttttaaaattctaataagaggatcagccgggtgcaatgactcatgcctgtaatcccagcacgttgggaggccaagtcgggcggatcacaaggtcaggagatcaaggccatcctggccaacatggtgaaaccccacgtctactaaaaatacaaaaaattagccgggcgtggtggcacacacctgtagtcccggctactcgggaggctgaggcaggagaattgcttgaacccgggagacggaggttgcagtgagctgagatcgtgccactgcactccagcctgggtgacagagcaagactctgtctcaaaa

SEQ ID NO: 447310 - DNA, 376 bp, Homo sapiens
caagaaaaactcttcatactctgtgattttagaactggaagggatcataaaaattgtctaatccagctcattccgtttagaggcaagaagtgacttgtccattgttacagacttataagagtaaccaagatcctgcctcctgggtatgtgttgtttaagaaggtggttccagggtggacttcctctgaggtctgttatacctaaaaggatagataaaagcaaactctgacaaagcccacaacaacatcttcagattgtctctactttgttctcagagtgaatttcttcttccttgtataatgctcctatcttttaaagcaatcacagtcttttaatgagtggggattcagagcagcacttaacagtctagatgttt

SEQ ID NO: 447311 - DNA, 5955 bp, Homo sapiens
ggcgaggcgaggtttgctggggtgaggcagcggcgcggccgggccgggccgggccacaggcggtggcggcgggaccatggaggcggcggtcgctgctccgcgtccccggctgctcctcctcgtgctggcggcggcggcggcggcggcggcggcgctgctcccgggggcgacggcgttacagtgtttctgccacctctgtacaaaagacaattttacttgtgtgacagatgggctctgctttgtctctgtcacagagaccacagacaaagttatacacaacagcatgtgtatagctgaaattgacttaattcctcgagataggccgtttgtatgtgcaccctcttcaaaaactgggtctgtgactacaacatattgctgcaatcaggaccattgcaataaaatagaacttccaactactgtaaagtcatcacctggccttggtcctgtggaactggcagctgtcattgctggaccagtgtgcttcgtctgcatctcactcatgttgatggtctatatctgccacaaccgcactgtcattcaccatcgagtgccaaatgaagaggacccttcattagatcgcccttttatttcagagggtactacgttgaaagacttaatttatgatatgacaacgtcaggttctggctcaggtttaccattgcttgttcagagaacaattgcgagaactattgtgttacaagaaagcattggcaaaggtcgatttggagaagtttggagaggaaagtggcggggagaagaagttgctgttaagatattctcctctagagaagaacgttcgtggttccgtgaggcagagatttatcaaactgtaatgttacgtcatgaaaacatcctgggatttatagcagcagacaataaagacaatggtacttggactcagctctggttggtgtcagattatcatgagcatggatccctttttgattacttaaacagatacacagttactgtggaaggaatgataaaacttgctctgtccacggcgagcggtcttgcccatcttcacatggagattgttggtacccaaggaaagccagccattgctcatagagatttgaaatcaaagaatatcttggtaaagaagaatggaacttgctgtattgcagacttaggactggcagtaagacatgattcagccacagataccattgatattgctccaaaccacagagtgggaacaaaaaggtacatggcccctgaagttctcgatgattccataaatatgaaacattttgaatccttcaaacgtgctgacatctatgcaatgggcttagtattctgggaaattgctcgacgatgttccattggtggaattcatgaagattaccaactgccttattatgatcttgtaccttctgacccatcagttgaagaaatgagaaaagttgtttgtgaacagaagttaaggccaaatatcccaaacagatggcagagctgtgaagccttgagagtaatggctaaaattatgagagaatgttggtatgccaatggagcagctaggcttacagcattgcggattaagaaaacattatcgcaactcagtcaacaggaaggcatcaaaatgtaattctacagctttgcctgaactctccttttttcttcagatctgctcctgggttttaatttgggaggtcagttgttctacctcactgagagggaacagaaggatattgcttccttttgcagcagtgtaataaagtcaattaaaaacttcccaggatttctttggacccaggaaacagccatgtgggtcctttctgtgcactatgaacgcttctttcccaggacagaaaatgtgtagtctacctttattttttattaacaaaacttgttttttaaaaagatgattgctggtcttaactttaggtaactctgctgtgctggagatcatctttaagggcaaaggagttggattgctgaattacaatgaaacatgtcttattactaaagaaagtgatttactcctggttagtacattctcagaggattctgaaccactagagtttccttgattcagactttgaatgtactgttctatagtttttcaggatcttaaaactaacacttataaaactcttatcttgagtctaaaaatgacctcatatagtagtgaggaacataattcatgcaattgtattttgtatactattattgttctttcacttattcagaacattacatgccttcaaaatgggattgtactataccagtaagtgccacttctgtgtctttctaatggaaatgagtagaattgctgaaagtctctatgttaaaacctatagtgtttgaattcaaaaagcttatttatctgggtaacccaaactttttctgttttgtttttggaagggtttttgtggtatgtcatttggtattctattctgaaaatgcctttctcctaccaaaatgtgcttaagccactaaagaaatgaagtggcattaattagtaaattattagcatggtcatgtttgaatattctcacatcaagcttttgcattttaattgtgttgtctaagtatacttttaaaaaatcaagtggcactctagatgcttatagtactttaatatttgtagcatacagactaatttttctaaaagggaaagtctgtctagctgcttgtgaaaagttatgtggtattctgtaagccatttttttctttatctgttcaaagacttattttttaagacatgaattacatttaaaattagaatatggttaatattaaataataggcctttttctaggaaggcgaaggtagttaataatttgaatagataacagatgtgcaagaaagtcacatttgttatgtatgtaggagtaaacgttcggtggatcctctgtctttgtaactgaggttagagctagtgtggttttgaggtctcactacactttgaggaaggcagcttttaattcagtgtttccttatgtgtgcgtacattgcaactgcttacatgtaatttatgtaatgcattcagtgcacccttgttacttgggagaggtggtagctaaagaacattctgagtataggtttttctccatttacagatgtctttggtcaaatattgaaagcaaacttgtcatggtcttcttacattaagttgaaactagcttataataactggtttttacttccaatgctatgaagtctctgcagggcttttacagttttcgaagtccttttatcactgtgatcttattctgaggggagaaaaaactatcatagctctgaggcaagacttcgactttatagtgctatcagttccccgatacagggtcagagtaacccatacagtattttggtcaggaagagaaagtggccatttacactgaatgagttgcattctgataatgtcttatctcttatacgtagaataaatttgaaagactatttgatcttaaaaccaaagtaattttagaatgagtgacatattacataggaatttagtgtcaatttcatgtgtttaaaaacatcatgggaaaaatgcttagaggttactattttgactacaaagttgagtttttttctgtagttaccataatttcattgaagcaaatgaatgagtttgagaggtttgtttttatagttgtgttgtattacttgtttaataataatctctaattctgtgatcaggtactttttttgtgggggttttttttttgtttttttttttttgttgttgtttttgggccatttctaagcctaccagatctgctttatgaaatccaggggaccaatgcattttatcactaaaactatttttatataattttaagaatataccaaaagttgtctgatttaaagttgtaatacatgatttctcactttcatgtaaggttatccacttttgctgaagatattttttattgaatcaaagattgagttacaattatacttttcttacctaagtggataaaatgtacttttgatgaatcagggaatttttttaaagttggagtttagttctaaattgactttacgtattactgcagttaattccttttttggctagggatggtttgataaaccacaattggctgatattgaaaatgaaagaaacttaaaaggtgggatggatcatgattactgtcgataactgcagataaatttgattagagtaataattttgtcatttaaaaacacagttgtttatactgcccatcctaggatgctcaccttccaagattcaacgtggctaaaacatcttctggtaaattgtgcgtccatattcattttgtcagtagccaggagaaatggggatgggggaaatacgacttagtgaggcatagacatccctggtccatcctttctgtctccagctgtttcttggaacctgctctcctgcttgctggtccctgacgcagagaccgttgcctcccccacagccgtttgactgaaggctgctctggagacctagagtaaaacggctgatggaagttgtgggacccacttccatttccttcagtcattagaggtggaagggaggggtctccaagtttggagattgagcagatgaggcttgggatgcccctgctttgacttcagccatggatgaggagtgggatggcagcaaggtggctcctgtggcagtggagttgtgccagaaacagtggccagttgtatcgcctataagacagggtaaggtctgaagagctgagcctgtaattctgctgtaataatgatagtgctcaagaagtgccttgagttggtgtacagtgccatggccatcaagaatcccagatttcaggttttattacaaaatgtaagtggtcacttggcgattttgtagtacatgcatgagttaccttttttctctatgtctgagaactgtcagattaaaacaagatggcaaagagatcgttagagtgcacaacaaaatcactatcccattagacacatcatcaaaagcttatttttattcttgcactggaagaatcgtaagtcaactgtttcttgaccatggcagtgttctggctccaaatggtagtgattccaaataatggttctgttaacactttggcagaaaatgccagctcagatattttgagatactaaggattatctttggacatgtactgcagcttcttgtctctgttttggattactggaatacccatgggccctctcaagagtgctggacttctaggacattaagatgattgtcagtacattaaacttttcaatcccattatgcaatcttgtttgtaaatgtaaacttctaaaaatatggttaataacattcaacctgtttattacaacttaaaaggaacttcagtgaatttgtttttattttttaacaagatttgtgaactgaatatcatgaaccatgttttgatacccctttttcacgttgtgccaacggaatagggtgtttgatatttcttcatatgttaaggagatgcttcaaaatgtcaattgctttaaacttaaattacctctcaagagaccaaggtacatttacctcattgtgtatataatgtttaatatttgtcagagcattctccaggtttgcagttttatttctataaagtatgggtattatgttgctcagttactcaaatggtactgtattgtttatatttgtaccccaaataacatcgtctgtactttctgttttctgtattgtatttgtgcaggattctttaggctttatcagtgtaatctctgccttttaagatatgtacagaaaatgtccatataaatttccattgaagtcgaatgatactgagaagcctgtaaagaggagaaaaaaacataagctgtgtttccccataagtttttttaaattgtatattgtatttgtagtaatattccaaaagaatgtaaataggaaatagaagagtgatgcttatgttaagtcctaacactacagtagaagaatggaagcagtgcaaataaattacatttttccttctctcttcccgtcttctctcctct

SEQ ID NO: 447312 - DNA, 5901 bp, Homo sapiens
ggcgaggcgaggtttgctggggtgaggcagcggcgcggccgggccgggccgggccacaggcggtggcggcgggaccatggaggcggcggtcgctgctccgcgtccccggctgctcctcctcgtgctggcggcggcggcggcggcggcggcggcgctgctcccgggggcgacggcgttacagtgtttctgccacctctgtacaaaagacaattttacttgtgtgacagatgggctctgctttgtctctgtcacagagaccacagacaaagttatacacaacagcatgtgtatagctgaaattgacttaattcctcgagataggccgtttgtatgtgcaccctcttcaaaaactgggtctgtgactacaacatattgctgcaatcaggaccattgcaataaaatagaacttccaactactgtaaagtcatcacctggccttggtcctgtggaactggcagctgtcattgctggaccagtgtgcttcgtctgcatctcactcatgttgatggtctatatctgccacaaccgcactgtcattcaccatcgagtgccaaatgaagaggacccttcattagatcgcccttttatttcagagggtactacgttgaaagacttaatttatgatatgacaacgtcaggttctggctcaggtttaccattgcttgttcagagaacaattgcgagaactattgtgttacaagaaagcattggcaaaggtcgatttggagaagtttggagaggaaagtggcggggagaagaagttgctgttaagatattctcctctagagaagaacgttcgtggttccgtgaggcagagatttatcaaactgtaatgttacgtcatgaaaacatcctgggatttatagcagcagacaataaagacaatggtacttggactcagctctggttggtgtcagattatcatgagcatggatccctttttgattacttaaacagatacacagttactgtggaaggaatgataaaacttgctctgtccacggcgagcggtcttgcccatcttcacatggagattgttggtacccaaggaaagccagccattgctcatagagatttgaaatcaaagaatatcttggtaaagaagaatggaacttgctgtattgcagacttaggactggcagtaagacatgattcagccacagataccattgatattgctccaaaccacagagtgggaacaaaaaggtacatggcccctgaagttctcgatgattccataaatatgaaacattttgaatccttcaaacgtgctgacatctatgcaatgggcttagtattctgggaaattgctcgacgatgttccattggtggaattcatgaagattaccaactgccttattatgatcttgtaccttctgacccatcagttgaagaaatgagaaaagttgtttgtgaacagaagttaaggccaaatatcccaaacagatggcagagctgtgaagccttgagagtaatggctaaaattatgagagaatgttggtatgccaatggagcagctaggcttacagcattgcggattaagaaaacattatcgcaactcagtcaacaggaaggcatcaaaatgtaattctacagctttgcctgaactctccttttttcttcagatctgctcctgggttttaatttgggaggtcagttgttctacctcactgagagggaacagaaggatattgcttccttttgcagcagtgtaataaagtcaattaaaaacttcccaggatttctttggacccaggaaacagccatgtgggtcctttctgtgcactatgaacgcttctttcccaggacagaaaatgtgtagtctacctttattttttattaacaaaacttgttttttaaaaagatgattgctggtcttaactttaggtaactctgctgtgctggagatcatctttaagggcaaaggagttggattgctgaattacaatgaaacatgtcttattactaaagaaagtgatttactcctggttagtacattctcagaggattctgaaccactagagtttccttgattcagactttgaatgtactgttctatagtttttcaggatcttaaaactaacacttataaaactcttatcttgagtctaaaaatgacctcatatagtagtgaggaacataattcatgcaattgtattttgtatactattattgttctttcacttattcagaacattacatgccttcaaaatgggattgtactataccagtaagtgccacttctgtgtctttctaatggaaatgagtagaattgctgaaagtctctatgttaaaacctatagtgtttgaattcaaaaagcttatttatctgggtaacccaaactttttctgttttgtttttggaagggtttttgtggtatgtcatttggtattctattctgaaaatgcctttctcctaccaaaatgtgcttaagccactaaagaaatgaagtggcattaattagtaaattattagcatggtcatgtttgaatattctcacatcaagcttttgcattttaattgtgttgtctaagtatacttttaaaaaatcaagtggcactctagatgcttatagtactttaatatttgtagcatacagactaatttttctaaaagggaaagtctgtctagctgcttgtgaaaagttatgtggtattctgtaagccatttttttctttatctgttcaaagacttattttttaagacatgaattacatttaaaattagaatatggttaatattaaataataggcctttttctaggaaggcgaaggtagttaataatttgaatagataacagatgtgcaagaaagtcacatttgttatgtatgtaggagtaaacgttcggtggatcctctgtctttgtaactgaggttagagctagtgtggttttgaggtctcactacactttgaggaaggcagcttttaattcagtgtttccttatgtgtgcgtacattgcaactgcttacatgtaatttatgtaatgcattcagtgcacccttgttacttgggagaggtggtagctaaagaacattctgagtataggtttttctccatttacagatgtctttggtcaaatattgaaagcaaacttgtcatggtcttcttacattaagttgaaactagcttataataactggtttttacttccaatgctatgaagtctctgcagggcttttacagttttcgaagtccttttatcactgtgatcttattctgaggggagaaaaaactatcatagctctgaggcaagacttcgactttatagtgctatcagttccccgatacagggtcagagtaacccatacagtattttggtcaggaagagaaagtggccatttacactgaatgagttgcattctgataatgtcttatctcttatacgtagaataaatttgaaagactatttgatcttaaaaccaaagtaattttagaatgagtgacatattacataggaatttagtgtcaatttcatgtgtttaaaaacatcatgggaaaaatgcttagaggttactattttgactacaaagttgagtttttttctgtagttaccataatttcattgaagcaaatgaatgagtttgagaggtttgtttttatagttgtgttgtattacttgtttaataataatctctaattctgtgatcaggtactttttttgtgggggttttttttttgtttttttttttttgttgttgtttttgggccatttctaagcctaccagatctgctttatgaaatccaggggaccaatgcattttatcactaaaactatttttatataattttaagaatataccaaaagttgtctgatttaaagttgtaatacatgatttctcactttcatgtaaggttatccacttttgctgaagatattttttattgaatcaaagattgagttacaattatacttttcttacctaagtggataaaatgtacttttgatgaatcagggaatttttttaaagttggagtttagttctaaattgactttacgtattactgcagttaattccttttttggctagggatggtttgataaaccacaattggctgatattgaaaatgaaagaaacttaaaaggtgggatggatcatgattactgtcgataactgcagataaatttgattagagtaataattttgtcatttaaaaacacagttgtttatactgcccatcctaggatgctcaccttccaagattcaacgtggctaaatggggatgggggaaatacgacttagtgaggcatagacatccctggtccatcctttctgtctccagctgtttcttggaacctgctctcctgcttgctggtccctgacgcagagaccgttgcctcccccacagccgtttgactgaaggctgctctggagacctagagtaaaacggctgatggaagttgtgggacccacttccatttccttcagtcattagaggtggaagggaggggtctccaagtttggagattgagcagatgaggcttgggatgcccctgctttgacttcagccatggatgaggagtgggatggcagcaaggtggctcctgtggcagtggagttgtgccagaaacagtggccagttgtatcgcctataagacagggtaaggtctgaagagctgagcctgtaattctgctgtaataatgatagtgctcaagaagtgccttgagttggtgtacagtgccatggccatcaagaatcccagatttcaggttttattacaaaatgtaagtggtcacttggcgattttgtagtacatgcatgagttaccttttttctctatgtctgagaactgtcagattaaaacaagatggcaaagagatcgttagagtgcacaacaaaatcactatcccattagacacatcatcaaaagcttatttttattcttgcactggaagaatcgtaagtcaactgtttcttgaccatggcagtgttctggctccaaatggtagtgattccaaataatggttctgttaacactttggcagaaaatgccagctcagatattttgagatactaaggattatctttggacatgtactgcagcttcttgtctctgttttggattactggaatacccatgggccctctcaagagtgctggacttctaggacattaagatgattgtcagtacattaaacttttcaatcccattatgcaatcttgtttgtaaatgtaaacttctaaaaatatggttaataacattcaacctgtttattacaacttaaaaggaacttcagtgaatttgtttttattttttaacaagatttgtgaactgaatatcatgaaccatgttttgatacccctttttcacgttgtgccaacggaatagggtgtttgatatttcttcatatgttaaggagatgcttcaaaatgtcaattgctttaaacttaaattacctctcaagagaccaaggtacatttacctcattgtgtatataatgtttaatatttgtcagagcattctccaggtttgcagttttatttctataaagtatgggtattatgttgctcagttactcaaatggtactgtattgtttatatttgtaccccaaataacatcgtctgtactttctgttttctgtattgtatttgtgcaggattctttaggctttatcagtgtaatctctgccttttaagatatgtacagaaaatgtccatataaatttccattgaagtcgaatgatactgagaagcctgtaaagaggagaaaaaaacataagctgtgtttccccataagtttttttaaattgtatattgtatttgtagtaatattccaaaagaatgtaaataggaaatagaagagtgatgcttatgttaagtcctaacactacagtagaagaatggaagcagtgcaaataaattacatttttccttctctcttcccgtcttctctcctct

SEQ ID NO: 447313 - DNA, 6563 bp, Homo sapiens
ggcgaggcgaggtttgctggggtgaggcagcggcgcggccgggccgggccgggccacaggcggtggcggcgggaccatggaggcggcggtcgctgctccgcgtccccggctgctcctcctcgtgctggcggcggcggcggcggcggcggcggcgctgctcccgggggcgacggcgttacagtgtttctgccacctctgtacaaaagacaattttacttgtgtgacagatgggctctgctttgtctctgtcacagagaccacagacaaagttatacacaacagcatgtgtatagctgaaattgacttaattcctcgagataggccgtttgtatgtgcaccctcttcaaaaactgggtctgtgactacaacatattgctgcaatcaggaccattgcaataaaatagaacttccaactactgtaaagtcatcacctggccttggtcctgtggaactggcagctgtcattgctggaccagtgtgcttcgtctgcatctcactcatgttgatggtctatatctgccacaaccgcactgtcattcaccatcgagtgccaaatgaagaggacccttcattagatcgcccttttatttcagagggtactacgttgaaagacttaatttatgatatgacaacgtcaggttctggctcaggtttaccattgcttgttcagagaacaattgcgagaactattgtgttacaagaaagcattggcaaaggtcgatttggagaagtttggagaggaaagtggcggggagaagaagttgctgttaagatattctcctctagagaagaacgttcgtggttccgtgaggcagagatttatcaaactgtaatgttacgtcatgaaaacatcctgggatttatagcagcagacaataaagacaatggtacttggactcagctctggttggtgtcagattatcatgagcatggatccctttttgattacttaaacagatacacagttactgtggaaggaatgataaaacttgctctgtccacggcgagcggtcttgcccatcttcacatggagattgttggtacccaaggaaagccagccattgctcatagagatttgaaatcaaagaatatcttggtaaagaagaatggaacttgctgtattgcagacttaggactggcagtaagacatgattcagccacagataccattgatattgctccaaaccacagagtgggaacaaaaaggtacatggcccctgaagttctcgatgattccataaatatgaaacattttgaatccttcaaacgtgctgacatctatgcaatgggcttagtattctgggaaattgctcgacgatgttccattggtggaattcatgaagattaccaactgccttattatgatcttgtaccttctgacccatcagttgaagaaatgagaaaagttgtttgtgaacagaagttaaggccaaatatcccaaacagatggcagagctgtgaagccttgagagtaatggctaaaattatgagagaatgttggtatgccaatggagcagctaggcttacagcattgcggattaagaaaacattatcgcaactcagtcaacaggaaggcatcaaaatgtaattctacagctttgcctgaactctccttttttcttcagatctgctcctgggttttaatttgggaggtcagttgttctacctcactgagagggaacagaaggatattgcttccttttgcagcagtgtaataaagtcaattaaaaacttcccaggatttctttggacccaggaaacagccatgtgggtcctttctgtgcactatgaacgcttctttcccaggacagaaaatgtgtagtctacctttattttttattaacaaaacttgttttttaaaaagatgattgctggtcttaactttaggtaactctgctgtgctggagatcatctttaagggcaaaggagttggattgctgaattacaatgaaacatgtcttattactaaagaaagtgatttactcctggttagtacattctcagaggattctgaaccactagagtttccttgattcagactttgaatgtactgttctatagtttttcaggatcttaaaactaacacttataaaactcttatcttgagtctaaaaatgacctcatatagtagtgaggaacataattcatgcaattgtattttgtatactattattgttctttcacttattcagaacattacatgccttcaaaatgggattgtactataccagtaagtgccacttctgtgtctttctaatggaaatgagtagaattgctgaaagtctctatgttaaaacctatagtgtttgaattcaaaaagcttatttatctgggtaacccaaactttttctgttttgtttttggaagggtttttgtggtatgtcatttggtattctattctgaaaatgcctttctcctaccaaaatgtgcttaagccactaaagaaatgaagtggcattaattagtaaattattagcatggtcatgtttgaatattctcacatcaagcttttgcattttaattgtgttgtctaagtatacttttaaaaaatcaagtggcactctagatgcttatagtactttaatatttgtagcatacagactaatttttctaaaagggaaagtctgtctagctgcttgtgaaaagttatgtggtattctgtaagccatttttttctttatctgttcaaagacttattttttaagacatgaattacatttaaaattagaatatggttaatattaaataataggcctttttctaggaaggcgaaggtagttaataatttgaatagataacagatgtgcaagaaagtcacatttgttatgtatgtaggagtaaacgttcggtggatcctctgtctttgtaactgaggttagagctagtgtggttttgaggtctcactacactttgaggaaggcagcttttaattcagtgtttccttatgtgtgcgtacattgcaactgcttacatgtaatttatgtaatgcattcagtgcacccttgttacttgggagaggtggtagctaaagaacattctgagtataggtttttctccatttacagatgtctttggtcaaatattgaaagcaaacttgtcatggtcttcttacattaagttgaaactagcttataataactggtttttacttccaatgctatgaagtctctgcagggcttttacagttttcgaagtccttttatcactgtgatcttattctgaggggagaaaaaactatcatagctctgaggcaagacttcgactttatagtgctatcagttccccgatacagggtcagagtaacccatacagtattttggtcaggaagagaaagtggccatttacactgaatgagttgcattctgataatgtcttatctcttatacgtagaataaatttgaaagactatttgatcttaaaaccaaagtaattttagaatgagtgacatattacataggaatttagtgtcaatttcatgtgtttaaaaacatcatgggaaaaatgcttagaggttactattttgactacaaagttgagtttttttctgtagttaccataatttcattgaagcaaatgaatgagtttgagaggtttgtttttatagttgtgttgtattacttgtttaataataatctctaattctgtgatcaggtactttttttgtgggggttttttttttgtttttttttttttgttgttgtttttgggccatttctaagcctaccagatctgctttatgaaatccaggggaccaatgcattttatcactaaaactatttttatataattttaagaatataccaaaagttgtctgatttaaagttgtaatacatgatttctcactttcatgtaaggttatccacttttgctgaagatattttttattgaatcaaagattgagttacaattatacttttcttacctaagtggataaaatgtacttttgatgaatcagggaatttttttaaagttggagtttagttctaaattgactttacgtattactgcagttaattccttttttggctagggatggtttgataaaccacaattggctgatattgaaaatgaaagaaacttaaaaggtgggatggatcatgattactgtcgataactgcagataaatttgattagagtaataattttgtcatttaaaaacacagttgtttatactgcccatcctaggatgctcaccttccaagattcaacgtggctaaaacatcttctggtaaattgtgcgtccatattcattttgtcagtagccaggagaaatggggatgggggaaatacgacttagtgaggcatagacatccctggtccatcctttctgtctccagctgtttcttggaacctgctctcctgcttgctggtccctgacgcagagaccgttgcctcccccacagccgtttgactgaaggctgctctggagacctagagtaaaacggctgatggaagttgtgggacccacttccatttccttcagtcattagaggtggaagggaggggtctccaagtttggagattgagcagatgaggcttgggatgcccctgctttgacttcagccatggatgaggagtgggatggcagcaaggtggctcctgtggcagtggagttgtgccagaaacagtggccagttgtatcgcctataagacagggtaaggtctgaagagctgagcctgtaattctgctgtaataatgatagtgctcaagaagtgccttgagttggtgtacagtgccatggccatcaagaatcccagatttcaggttttattacaaaatgtaagtggtcacttggcgattttgtagtacatgcatgagttaccttttttctctatgtctgagaactgtcagattaaaacaagatggcaaagagatcgttagagtgcacaacaaaatcactatcccattagacacatcatcaaaagcttatttttattcttgcactggaagaatcgtaagtcaactgtttcttgaccatggcagtgttctggctccaaatggtagtgattccaaataatggttctgttaacactttggcagaaaatgccagctcagatattttgagatactaaggattatctttggacatgtactgcagcttcttgtctctgttttggattactggaatacccatgggccctctcaagagtgctggacttctaggacattaagatgattgtcagtacattaaacttttcaatcccattatgcaatcttgtttgtaaatgtaaacttctaaaaatatggttaataacattcaacctgtttattacaacttaaaaggaacttcagtgaatttgtttttattttttaacaagatttgtgaactgaatatcatgaaccatgttttgatacccctttttcacgttgtgccaacggaatagggtgtttgatatttcttcatatgttaaggagatgcttcaaaatgtcaattgctttaaacttaaattacctctcaagagaccaaggtacatttacctcattgtgtatataatgtttaatatttgtcagagcattctccaggtttgcagttttatttctataaagtatgggtattatgttgctcagttactcaaatggtactgtattgtttatatttgtaccccaaataacatcgtctgtactttctgttttctgtattgtatttgtgcaggattctttaggctttatcagtgtaatctctgccttttaagatatgtacagaaaatgtccatataaatttccattgaagtcgaatgatactgagaagcctgtaaagaggagaaaaaaacataagctgtgtttccccataagtttttttaaattgtatattgtatttgtagtaatattccaaaagaatgtaaataggaaatagaagagtgatgcttatgttaagtcctaacactacagtagaagaatggaagcagtgcaaataaattacatttttaaaataaagtgtatacgttggaatgagtcatgccatatgtagttgctgtagatggcaactagaacctttgagttacaagagtctttagaagttttctaaccctgcctagtgcaagttacaatattatagcgtgttcggggagtgccctcctgtctgcaggtgtgtctctgtgcctgggggcttttctccacatgcttaggggtgtgggtcttccattggggcatgatggacctgtctacaggtgatctctgttgcctttgggtcagcacatttgttagtctcctgggggtgaaaacttggcttacaagagaactggaaaaatgatgagatgtggtccccaaacccttgattgactctggggaggggctttgtgaataggattgctctcacattaaagatagttacttcaatttgaaggctggatttagggatttttttttttccttataacaaagacatcaccaggatatgaagcttttgttgaaagttggaaaaaaagtgaaattaaagacattcccagacaaatactaagacaatttgttgcctatggacgtctgccttacaagaaatactaaatccttcacacagaaaataaatgacaccagatggtaacctgaatccacaggatgaaatgaa

SEQ ID NO: 447314 - DNA, 5955 bp, Homo sapiens
ggcgaggcgaggtttgctggggtgaggcagcggcgcggccgggccgggccgggccacaggcggtggcggcgggaccatggaggcggcggtcgctgctccgcgtccccggctgctcctcctcgtgctggcggcggcggcggcggcggcggcggcgctgctcccgggggcgacggcgttacagtgtttctgccacctctgtacaaaagacaattttacttgtgtgacagatgggctctgctttgtctctgtcacagagaccacagacaaagttatacacaacagcatgtgtatagctgaaattgacttaattcctcgagataggccgtttgtatgtgcaccctcttcaaaaactgggtctgtgactacaacatattgctgcaatcaggaccattgcaataaaatagaacttccaactactgtaaagtcatcacctggccttggtcctgtggaactggcagctgtcattgctggaccagtgtgcttcgtctgcatctcactcatgttgatggtctatatctgccacaaccgcactgtcattcaccatcgagtgccaaatgaagaggacccttcattagatcgcccttttatttcagagggtactacgttgaaagacttaatttatgatatgacaacgtcaggttctggctcaggtttaccattgcttgttcagagaacaattgcgagaactattgtgttacaagaaagcattggcaaaggtcgatttggagaagtttggagaggaaagtggcggggagaagaagttgctgttaagatattctcctctagagaagaacgttcgtggttccgtgaggcagagatttatcaaactgtaatgttacgtcatgaaaacatcctgggatttatagcagcagacaataaagacaatggtacttggactcagctctggttggtgtcagattatcatgagcatggatccctttttgattacttaaacagatacacagttactgtggaaggaatgataaaacttgctctgtccacggcgagcggtcttgcccatcttcacatggagattgttggtacccaaggaaagccagccattgctcatagagatttgaaatcaaagaatatcttggtaaagaagaatggaacttgctgtattgcagacttaggactggcagtaagacatgattcagccacagataccattgatattgctccaaaccacagagtgggaacaaaaaggtacatggcccctgaagttctcgatgattccataaatatgaaacattttgaatccttcaaacgtgctgacatctatgcaatgggcttagtattctgggaaattgctcgacgatgttccattggtggaattcatgaagattaccaactgccttattatgatcttgtaccttctgacccatcagttgaagaaatgagaaaagttgtttgtgaacagaagttaaggccaaatatcccaaacagatggcagagctgtgaagccttgagagtaatggctaaaattatgagagaatgttggtatgccaatggagcagctaggcttacagcattgcggattaagaaaacattatcgcaactcagtcaacaggaaggcatcaaaatgtaattctacagctttgcctgaactctccttttttcttcagatctgctcctgggttttaatttgggaggtcagttgttctacctcactgagagggaacagaaggatattgcttccttttgcagcagtgtaataaagtcaattaaaaacttcccaggatttctttggacccaggaaacagccatgtgggtcctttctgtgcactatgaacgcttctttcccaggacagaaaatgtgtagtctacctttattttttattaacaaaacttgttttttaaaaagatgattgctggtcttaactttaggtaactctgctgtgctggagatcatctttaagggcaaaggagttggattgctgaattacaatgaaacatgtcttattactaaagaaagtgatttactcctggttagtacattctcagaggattctgaaccactagagtttccttgattcagactttgaatgtactgttctatagtttttcaggatcttaaaactaacacttataaaactcttatcttgagtctaaaaatgacctcatatagtagtgaggaacataattcatgcaattgtattttgtatactattattgttctttcacttattcagaacattacatgccttcaaaatgggattgtactataccagtaagtgccacttctgtgtctttctaatggaaatgagtagaattgctgaaagtctctatgttaaaacctatagtgtttgaattcaaaaagcttatttatctgggtaacccaaactttttctgttttgtttttggaagggtttttgtggtatgtcatttggtattctattctgaaaatgcctttctcctaccaaaatgtgcttaagccactaaagaaatgaagtggcattaattagtaaattattagcatggtcatgtttgaatattctcacatcaagcttttgcattttaattgtgttgtctaagtatacttttaaaaaatcaagtggcactctagatgcttatagtactttaatatttgtagcatacagactaatttttctaaaagggaaagtctgtctagctgcttgtgaaaagttatgtggtattctgtaagccatttttttctttatctgttcaaagacttattttttaagacatgaattacatttaaaattagaatatggttaatattaaataataggcctttttctaggaaggcgaaggtagttaataatttgaatagataacagatgtgcaagaaagtcacatttgttatgtatgtaggagtaaacgttcggtggatcctctgtctttgtaactgaggttagagctagtgtggttttgaggtctcactacactttgaggaaggcagcttttaattcagtgtttccttatgtgtgcgtacattgcaactgcttacatgtaatttatgtaatgcattcagtgcacccttgttacttgggagaggtggtagctaaagaacattctgagtataggtttttctccatttacagatgtctttggtcaaatattgaaagcaaacttgtcatggtcttcttacattaagttgaaactagcttataataactggtttttacttccaatgctatgaagtctctgcagggcttttacagttttcgaagtccttttatcactgtgatcttattctgaggggagaaaaaactatcatagctctgaggcaagacttcgactttatagtgctatcagttccccgatacagggtcagagtaacccatacagtattttggtcaggaagagaaagtggccatttacactgaatgagttgcattctgataatgtcttatctcttatacgtagaataaatttgaaagactatttgatcttaaaaccaaagtaattttagaatgagtgacatattacataggaatttagtgtcaatttcatgtgtttaaaaacatcatgggaaaaatgcttagaggttactattttgactacaaagttgagtttttttctgtagttaccataatttcattgaagcaaatgaatgagtttgagaggtttgtttttatagttgtgttgtattacttgtttaataataatctctaattctgtgatcaggtactttttttgtgggggttttttttttgtttttttttttttgttgttgtttttgggccatttctaagcctaccagatctgctttatgaaatccaggggaccaatgcattttatcactaaaactatttttatataattttaagaatataccaaaagttgtctgatttaaagttgtaatacatgatttctcactttcatgtaaggttatccacttttgctgaagatattttttattgaatcaaagattgagttacaattatacttttcttacctaagtggataaaatgtacttttgatgaatcagggaatttttttaaagttggagtttagttctaaattgactttacgtattactgcagttaattccttttttggctagggatggtttgataaaccacaattggctgatattgaaaatgaaagaaacttaaaaggtgggatggatcatgattactgtcgataactgcagataaatttgattagagtaataattttgtcatttaaaaacacagttgtttatactgcccatcctaggatgctcaccttccaagattcaacgtggctaaaacatcttctggtaaattgtgcgtccatattcattttgtcagtagccaggagaaatggggatgggggaaatacgacttagtgaggcatagacatccctggtccatcctttctgtctccagctgtttcttggaacctgctctcctgcttgctggtccctgacgcagagaccgttgcctcccccacagccgtttgactgaaggctgctctggagacctagagtaaaacggctgatggaagttgtgggacccacttccatttccttcagtcattagaggtggaagggaggggtctccaagtttggagattgagcagatgaggcttgggatgcccctgctttgacttcagccatggatgaggagtgggatggcagcaaggtggctcctgtggcagtggagttgtgccagaaacagtggccagttgtatcgcctataagacagggtaaggtctgaagagctgagcctgtaattctgctgtaataatgatagtgctcaagaagtgccttgagttggtgtacagtgccatggccatcaagaatcccagatttcaggttttattacaaaatgtaagtggtcacttggcgattttgtagtacatgcatgagttaccttttttctctatgtctgagaactgtcagattaaaacaagatggcaaagagatcgttagagtgcacaacaaaatcactatcccattagacacatcatcaaaagcttatttttattcttgcactggaagaatcgtaagtcaactgtttcttgaccatggcagtgttctggctccaaatggtagtgattccaaataatggttctgttaacactttggcagaaaatgccagctcagatattttgagatactaaggattatctttggacatgtactgcagcttcttgtctctgttttggattactggaatacccatgggccctctcaagagtgctggacttctaggacattaagatgattgtcagtacattaaacttttcaatcccattatgcaatcttgtttgtaaatgtaaacttctaaaaatatggttaataacattcaacctgtttattacaacttaaaaggaacttcagtgaatttgtttttattttttaacaagatttgtgaactgaatatcatgaaccatgttttgatacccctttttcacgttgtgccaacggaatagggtgtttgatatttcttcatatgttaaggagatgcttcaaaatgtcaattgctttaaacttaaattacctctcaagagaccaaggtacatttacctcattgtgtatataatgtttaatatttgtcagagcattctccaggtttgcagttttatttctataaagtatgggtattatgttgctcagttactcaaatggtactgtattgtttatatttgtaccccaaataacatcgtctgtactttctgttttctgtattgtatttgtgcaggattctttaggctttatcagtgtaatctctgccttttaagatatgtacagaaaatgtccatataaatttccattgaagccgtcgacggcttcaacggaactttatccaggcaaacatgggatgtcaagagtggcctgtggtactggagacaaggaatatcaagtaattgacatgttacttgtctgtcagattttaagaatactgttatttaggcatattcaaagaaacaactgcctgttttaatagggataagtatataacgaacacatttatatccatacgccctcaaaagccttattcc

SEQ ID NO: 447315 - DNA, 4391 bp, Homo sapiens
ggcgaggcgaggtttgctggggtgaggcagcggcgcggccgggccgggccgggccacaggcggtggcggcgggaccatggaggcggcggtcgctgctccgcgtccccggctgctcctcctcgtgctggcggcggcggcggcggcggcggcggcgctgctcccgggggcgacggcgttacagtgtttctgccacctctgtacaaaagacaattttacttgtgtgacagatgggctctgctttgtctctgtcacagagaccacagacaaagttatacacaacagcatgtgtatagctgaaattgacttaattcctcgagataggccgtttgtatgtgcaccctcttcaaaaactgggtctgtgactacaacatattgctgcaatcaggaccattgcaataaaatagaacttccaactactgtaaagtcatcacctggccttggtcctgtggaactggcagctgtcattgctggaccagtgtgcttcgtctgcatctcactcatgttgatggtctatatctgccacaaccgcactgtcattcaccatcgagtgccaaatgaagaggacccttcattagatcgcccttttatttcagagggtactacgttgaaagacttaatttatgatatgacaacgtcaggttctggctcaggtttaccattgcttgttcagagaacaattgcgagaactattgtgttacaagaaagcattggcaaaggtcgatttggagaagtttggagaggaaagtggcggggagaagaagttgctgttaagatattctcctctagagaagaacgttcgtggttccgtgaggcagagatttatcaaactgtaatgttacgtcatgaaaacatcctgggatttatagcagcagacaataaagacaatggtacttggactcagctctggttggtgtcagattatcatgagcatggatccctttttgattacttaaacagatacacagttactgtggaaggaatgataaaacttgctctgtccacggcgagcggtcttgcccatcttcacatggagattgttggtacccaaggaaagccagccattgctcatagagatttgaaatcaaagaatatcttggtaaagaagaatggaacttgctgtattgcagacttaggactggcagtaagacatgattcagccacagataccattgatattgctccaaaccacagagtgggaacaaaaaggtacatggcccctgaagttctcgatgattccataaatatgaaacattttgaatccttcaaacgtgctgacatctatgcaatgggcttagtattctgggaaattgctcgacgatgttccattggtggaattcatgaagattaccaactgccttattatgatcttgtaccttctgacccatcagttgaagaaatgagaaaagttgtttgtgaacagaagttaaggccaaatatcccaaacagatggcagagctgtgaagccttgagagtaatggctaaaattatgagagaatgttggtatgccaatggagcagctaggcttacagcattgcggattaagaaaacattatcgcaactcagtcaacaggaaggcatcaaaatgtaattctacagctttgcctgaactctccttttttcttcagatctgctcctgggttttaatttgggaggtcagttgttctacctcactgagagggaacagaaggatattgcttccttttgcagcagtgtaataaagtcaattaaaaacttcccaggatttctttggacccaggaaacagccatgtgggtcctttctgtgcactatgaacgcttctttcccaggacagaaaatgtgtagtctacctttattttttattaacaaaacttgttttttaaaaagatgattgctggtcttaactttaggtaactctgctgtgctggagatcatctttaagggcaaaggagttggattgctgaattacaatgaaacatgtcttattactaaagaaagtgatttactcctggttagtacattctcagaggattctgaaccactagagtttccttgattcagactttgaatgtactgttctatagtttttcaggatcttaaaactaacacttataaaactcttatcttgagtctaaaaatgacctcatatagtagtgaggaacataattcatgcaattgtattttgtatactattattgttctttcacttattcagaacattacatgccttcaaaatgggattgtactataccagtaagtgccacttctgtgtctttctaatggaaatgagtagaattgctgaaagtctctatgttaaaacctatagtgtttgaattcaaaaagcttatttatctgggtaacccaaactttttctgttttgtttttggaagggtttttgtggtatgtcatttggtattctattctgaaaatgcctttctcctaccaaaatgtgcttaagccactaaagaaatgaagtggcattaattagtaaattattagcatggtcatgtttgaatattctcacatcaagcttttgcattttaattgtgttgtctaagtatacttttaaaaaatcaagtggcactctagatgcttatagtactttaatatttgtagcatacagactaatttttctaaaagggaaagtctgtctagctgcttgtgaaaagttatgtggtattctgtaagccatttttttctttatctgttcaaagacttattttttaagacatgaattacatttaaaattagaatatggttaatattaaataataggcctttttctaggaaggcgaaggtagttaataatttgaatagataacagatgtgcaagaaagtcacatttgttatgtatgtaggagtaaacgttcggtggatcctctgtctttgtaactgaggttagagctagtgtggttttgaggtctcactacactttgaggaaggcagcttttaattcagtgtttccttatgtgtgcgtacattgcaactgcttacatgtaatttatgtaatgcattcagtgcacccttgttacttgggagaggtggtagctaaagaacattctgagtataggtttttctccatttacagatgtctttggtcaaatattgaaagcaaacttgtcatggtcttcttacattaagttgaaactagcttataataactggtttttacttccaatgctatgaagtctctgcagggcttttacagttttcgaagtccttttatcactgtgatcttattctgaggggagaaaaaactatcatagctctgaggcaagacttcgactttatagtgctatcagttccccgatacagggtcagagtaacccatacagtattttggtcaggaagagaaagtggccatttacactgaatgagttgcattctgataatgtcttatctcttatacgtagaataaatttgaaagactatttgatcttaaaaccaaagtaattttagaatgatgattccaaataatggttctgttaacactttggcagaaaatgccagctcagatattttgagatactaaggattatctttggacatgtactgcagcttcttgtctctgttttggattactggaatacccatgggccctctcaagagtgctggacttctaggacattaagatgattgtcagtacattaaacttttcaatcccattatgcaatcttgtttgtaaatgtaaacttctaaaaatatggttaataacattcaacctgtttattacaacttaaaaggaacttcagtgaatttgtttttattttttaacaagatttgtgaactgaatatcatgaaccatgttttgatacccctttttcacgttgtgccaacggaatagggtgtttgatatttcttcatatgttaaggagatgcttcaaaatgtcaattgctttaaacttaaattacctctcaagagaccaaggtacatttacctcattgtgtatataatgtttaatatttgtcagagcattctccaggtttgcagttttatttctataaagtatgggtattatgttgctcagttactcaaatggtactgtattgtttatatttgtaccccaaataacatcgtctgtactttctgttttctgtattgtatttgtgcaggattctttaggctttatcagtgtaatctctgccttttaagatatgtacagaaaatgtccatataaatttccattgaagtcgaatgatactgagaagcctgtaaagaggagaaaaaaacataagctgtgtttccccataagtttttttaaattgtatattgtatttgtagtaatattccaaaagaatgtaaataggaaatagaagagtgatgcttatgttaagtcctaacactacagtagaagaatggaagcagtgcaaataaattacatttttccttctctcttcccgtcttctctcctct

SEQ ID NO: 447316 - DNA, 834 bp, Homo sapiens
ggtcaagggggcagagcgttggggtgaatggaacccggccttaaggtgtgactttagccttagatgtgtcgaccgtaacgttcagcgcattacccatctggtggagatgtaactgtcgaaaatatggttaataacattcaacctgtttattacaacttaaaaggaacttcagtgaatttgtttttattttttaacaagatttgtgaactgaatatcatgaaccatgttttgatacccctttttcacgttgtgccaacggaatagggtgtttgatatttcttcatatgttaaggagatgcttcaaaatgtcaattgctttaaacttaaattacctctcaagagaccaaggtacatttacctcattgtgtatataatgtttaatatttgtcagagcattctccaggtttgcagttttatttctataaagtatgggtattatgttgctcagttactcaaatggtactgtattgtttatatttgtaccccaaataacatcgtctgtactttctgttttctgtattgtatttgtgcaggattctttaggctttatcagtgtaatctctgccttttaagatatgtacagaaaatgtccatataaatttccattgaagtcgaatgatactgagaagcctgtaaagaggagaaaaaaacataagctgtgtttccccataagtttttttaaattgtatattgtatttgtagtaatattccaaaagaatgtaaataggaaatagaagagtgatgcttatgttaagtcctaacactacagtagaagaatggaagcagtgcaaataaattacatttttccttctctcttcccgtcttctctcctct

SEQ ID NO: 447317 - DNA, 1441 bp, Homo sapiens
actttaaacgtaatgatcaattttgagggacagaggtgtgaatgttttacaatacccaactttaaaaaaaatctattataaaaactgcaactcatctccctaacatttttaaatggtggtattatgtttgcacaaacagattaatacattaaattaagccaagatcttaaagactggcaaagttctatcattctattttaaatacaaagatgataaaaaaaaaaagttagtttgcttcatgttacatttcacaaccattatgttaaatgttttcttttctacagaaacagggtcctttatatcacaactgcaagtatttactgctagatgtttaaagttacacagactagtgttcaactggagcctgctgatggtgatgtcttgaagttttctgaatgtcaacctaaggtgtgccaggtcctctcctaggaccactcttgcaggggaggagggagaagaaatcacagatcaagctcttaagattgtttcactctcttcgtggctttctgttttctgtattgtatttgtgcaggattctttaggctttatcagtgtaatctctgccttttaagatatgtacagaaaatgtccatataaatttccattgaagtcgaatgatactgagaagcctgtaaagaggagaaaaaaacataagctgtgtttccccataagtttttttaaattgtatattgtatttgtagtaatattccaaaagaatgtaaataggaaatagaagagtgatgcttatgttaagtcctaacactacagtagaagaatggaagcagtgcaaataaattacatttttaaaataaagtgtatacgttggaatgagtcatgccatatgtagttgctgtagatggcaactagaacctttgagttacaagagtctttagaagttttctaaccctgcctagtgcaagttacaatattatagcgtgttcggggagtgccctcctgtctgcaggtgtgtctctgtgcctgggggcttttctccacatgcttaggggtgtgggtcttccattggggcatgatggacctgtctacaggtgatctctgttgcctttgggtcagcacatttgttagtctcctgggggtgaaaacttggcttacaagagaactggaaaaatgatgagatgtggtccccaaacccttgattgactctggggaggggctttgtgaataggattgctctcacattaaagatagttacttcaatttgaaggctggatttagggatttttttttttccttataacaaagacatcaccaggatatgaagcttttgttgaaagttggaaaaaaagtgaaattaaagacattcccagacaaatactaagacaatttgttgcctatggacgtctgccttacaagaaatactaaatccttcacacagaaaataaatgacaccagatggtaacctgaatccacaggatgaaatgaa

SEQ ID NO: 447318 - DNA, 937 bp, Homo sapiens
ggcgaggcgaggtttgctggggtgaggcagcggcgcggccgggccgggccgggccacaggcggtggcggcgggaccatggaggcggcggtcgctgctccgcgtccccggctgctcctcctcgtgctggcggcggcggcggcggcggcggcggcgctgctcccgggggcgacggcgttacagtgtttctgccacctctgtacaaaagacaattttacttgtgtgacagatgggctctgctttgtctctgtcacagagaccacagacaaagttatacacaacagcatgtgtatagctgaaattgacttaattcctcgagataggccgtttgtatgtgcaccctcttcaaaaactgggtctgtgactacaacatattgctgcaatcaggaccattgcaataaaatagaacttccaactactgtaaagtcatcacctggccttggtcctgtggaactggcagctgtcattgctggaccagtgtgcttcgtctgcatctcactcatgttgatggtctatatctgccacaaccgcactgtcattcaccatcgagtgccaaatgaagaggacccttcattagatcgcccttttatttcagagggtactacgttgaaagacttaatttatgatatgacaacgtcaggttctggctcaggtaacataattgtttctcctttttcctaagacatctttttaaaattaagcgatacttattttattagttttctaataagccaacttgctagaatgtgagatagtataaataatattgcaggtttgaacctaataaaaatctttaagtttgatgtatatatgactgtggctggtttaaaatagattggaacttaactttaactgttaaagcgaatcaataagtcagctccatggtggtataaatttcaaagcgttctcacttgtataatctaatttgcttttcatcac

SEQ ID NO: 447319 - DNA, 523 bp, Homo sapiens
acaatggtacttggactcagctctggttggtgtcagattatcatgagcatggatccctttttgattacttaaacagatacacagttactgtggaaggaatgataaaacttgctctgtccacggcgagcggtcttgcccatcttcacatggagattgttggtacccaaggtaattctataagcagttctattatttaagctttaaattttcatgaataatgtctatgaaaatagaaggtggaggctgggcctggtggctcatgcctataatcccagcactttgggaggctgaggtgggcagatcgcccgatctcaggagttcatggccagcctgggcaacatgacaaaaccgcatctctaccaacatacaaaaaattagtcgggcatggtggcatgcacctgtagtcccagctactcagggggctgaggtaggaggattacctgagcctgggaggtcgaagctgcagtgagcagacatcatgccactgcactcccagctgagtaatagagagagaccctgtctc

SEQ ID NO: 447320 - DNA, 6586 bp, Homo sapiens
ggcgaggcgaggtttgctggggtgaggcagcggcgcggccgggccgggccgggccacaggcggtggcggcgggaccatggaggcggcggtcgctgctccgcgtccccggctgctcctcctcgtgctggcggcggcggcggcggcggcggcggcgctgctcccgggggcgacggcgttacagtgtttctgccacctctgtacaaaagacaattttacttgtgtgacagatgggctctgctttgtctctgtcacagagaccacagacaaagttatacacaacagcatgtgtatagctgaaattgacttaattcctcgagataggccgtttgtatgtgcaccctcttcaaaaactgggtctgtgactacaacatattgctgcaatcaggaccattgcaataaaatagaacttccaactactgtaaagtcatcacctggccttggtcctgtggaactggcagctgtcattgctggaccagtgtgcttcgtctgcatctcactcatgttgatggtctatatctgccacaaccgcactgtcattcaccatcgagtgccaaatgaagaggacccttcattagatcgcccttttatttcagagggtactacgttgaaagacttaatttatgatatgacaacgtcaggttctggctcaggtttaccattgcttgttcagagaacaattgcgagaactattgtgttacaagaaagcattggcaaaggtcgatttggagaagtttggagaggaaagtggcggggagaagaagttgctgttaagatattctcctctagagaagaacgttcgtggttccgtgaggcagagatttatcaaactgtaatgttacgtcatgaaaacatcctgggatttatagcagcagacaataaagacaatggtacttggactcagctctggttggtgtcagattatcatgagcatggatccctttttgattacttaaacagatacacagttactgtggaaggaatgataaaacttgctctgtccacggcgagcggtcttgcccatcttcacatggagattgttggtacccaaggaaagccagccattgctcatagagatttgaaatcaaagaatatcttggtaaagaagaatggaacttgctgtattgcagacttaggactggcagtaagacatgattcagccacagataccattgatattgctccaaaccacagagtgggaacaaaaaggtacatggcccctgaagttctcgatgattccataaatatgaaacattttgaatccttcaaacgtgctgacatctatgcaatgggcttagtattctgggaaattgctcgacgatgttccattggtggaattcatgaagattaccaactgccttattatgatcttgtaccttctgacccatcagttgaagaaatgagaaaagttgtttgtgaacagaagttaaggccaaatatcccaaacagatggcagagctgtgaagccttgagagtaatggctaaaattatgagagaatgttggtatgccaatggagcagctaggcttacagcattgcggattaagaaaacattatcgcaactcagtcaacaggaaggcatcaaaatgtaattctacagctttgcctgaactctccttttttcttcagatctgctcctgggttttaatttgggaggtcagttgttctacctcactgagagggaacagaaggatattgcttccttttgcagcagtgtaataaagtcaattaaaaacttcccaggatttctttggacccaggaaacagccatgtgggtcctttctgtgcactatgaacgcttctttcccaggacagaaaatgtgtagtctacctttattttttattaacaaaacttgttttttaaaaagatgattgctggtcttaactttaggtaactctgctgtgctggagatcatctttaagggcaaaggagttggattgctgaattacaatgaaacatgtcttattactaaagaaagtgatttactcctggttagtacattctcagaggattctgaaccactagagtttccttgattcagactttgaatgtactgttctatagtttttcaggatcttaaaactaacacttataaaactcttatcttgagtctaaaaatgacctcatatagtagtgaggaacataattcatgcaattgtattttgtatactattattgttctttcacttattcagaacattacatgccttcaaaatgggattgtactataccagtaagtgccacttctgtgtctttctaatggaaatgagtagaattgctgaaagtctctatgttaaaacctatagtgtttgaattcaaaaagcttatttatctgggtaacccaaactttttctgttttgtttttggaagggtttttgtggtatgtcatttggtattctattctgaaaatgcctttctcctaccaaaatgtgcttaagccactaaagaaatgaagtggcattaattagtaaattattagcatggtcatgtttgaatattctcacatcaagcttttgcattttaattgtgttgtctaagtatacttttaaaaaatcaagtggcactctagatgcttatagtactttaatatttgtagcatacagactaatttttctaaaagggaaagtctgtctagctgcttgtgaaaagttatgtggtattctgtaagccatttttttctttatctgttcaaagacttattttttaagacatgaattacatttaaaattagaatatggttaatattaaataataggcctttttctaggaaggcgaaggtagttaataatttgaatagataacagatgtgcaagaaagtcacatttgttatgtatgtaggagtaaacgttcggtggatcctctgtctttgtaactgaggttagagctagtgtggttttgaggtctcactacactttgaggaaggcagcttttaattcagtgtttccttatgtgtgcgtacattgcaactgcttacatgtaatttatgtaatgcattcagtgcacccttgttacttgggagaggtggtagctaaagaacattctgagtataggtttttctccatttacagatgtctttggtcaaatattgaaagcaaacttgtcatggtcttcttacattaagttgaaactagcttataataactggtttttacttccaatgctatgaagtctctgcagggcttttacagttttcgaagtccttttatcactgtgatcttattctgaggggagaaaaaactatcatagctctgaggcaagacttcgactttatagtgctatcagttccccgatacagggtcagagtaacccatacagtattttggtcaggaagagaaagtggccatttacactgaatgagttgcattctgataatgtcttatctcttatacgtagaataaatttgaaagactatttgatcttaaaaccaaagtaattttagaatgagtgacatattacataggaatttagtgtcaatttcatgtgtttaaaaacatcatgggaaaaatgcttagaggttactattttgactacaaagttgagtttttttctgtagttaccataatttcattgaagcaaatgaatgagtttgagaggtttgtttttatagttgtgttgtattacttgtttaataataatctctaattctgtgatcaggtactttttttgtgggggttttttttttgtttttttttttttgttgttgtttttgggccatttctaagcctaccagatctgctttatgaaatccaggggaccaatgcattttatcactaaaactatttttatataattttaagaatataccaaaagttgtctgatttaaagttgtaatacatgatttctcactttcatgtaaggttatccacttttgctgaagatattttttattgaatcaaagattgagttacaattatacttttcttacctaagtggataaaatgtacttttgatgaatcagggaatttttttaaagttggagtttagttctaaattgactttacgtattactgcagttaattccttttttggctagggatggtttgataaaccacaattggctgatattgaaaatgaaagaaacttaaaaggtgggatggatcatgattactgtcgataactgcagataaatttgattagagtaataattttgtcatttaaaaacacagttgtttatactgcccatcctaggatgctcaccttccaagattcaacgtggctaaaacatcttctggtaaattgtgcgtccatattcattttgtcagtagccaggagaaatggggatgggggaaatacgacttagtgaggcatagacatccctggtccatcctttctgtctccagctgtttcttggaacctgctctcctgcttgctggtccctgacgcagagaccgttgcctcccccacagccgtttgactgaaggctgctctggagacctagagtaaaacggctgatggaagttgtgggacccacttccatttccttcagtcattagaggtggaagggaggggtctccaagtttggagattgagcagatgaggcttgggatgcccctgctttgacttcagccatggatgaggagtgggatggcagcaaggtggctcctgtggcagtggagttgtgccagaaacagtggccagttgtatcgcctataagacagggtaaggtctgaagagctgagcctgtaattctgctgtaataatgatagtgctcaagaagtgccttgagttggtgtacagtgccatggccatcaagaatcccagatttcaggttttattacaaaatgtaagtggtcacttggcgattttgtagtacatgcatgagttaccttttttctctatgtctgagaactgtcagattaaaacaagatggcaaagagatcgttagagtgcacaacaaaatcactatcccattagacacatcatcaaaagcttatttttattcttgcactggaagaatcgtaagtcaactgtttcttgaccatggcagtgttctggctccaaatggtagtgattccaaataatggttctgttaacactttggcagaaaatgccagctcagatattttgagatactaaggattatctttggacatgtactgcagcttcttgtctctgttttggattactggaatacccatgggccctctcaagagtgctggacttctaggacattaagatgattgtcagtacattaaacttttcaatcccattatgcaatcttgtttgtaaatgtaaacttctaaaaatatggttaataacattcaacctgtttattacaacttaaaaggaacttcagtgaatttgtttttattttttaacaagatttgtgaactgaatatcatgaaccatgttttgatacccctttttcacgttgtgccaacggaatagggtgtttgatatttcttcatatgttaaggagatgcttcaaaatgtcaattgctttaaacttaaattacctctcaagagaccaaggtacatttacctcattgtgtatataatgtttaatatttgtcagagcattctccaggtttgcagttttatttctataaagtatgggtattatgttgctcagttactcaaatggtactgtattgtttatatttgtaccccaaataacatcgtctgtactttctgttttctgtattgtatttgtgcaggattctttaggctttatcagtgtaatctctgccttttaagatatgtacagaaaatgtccatataaatttccattgaagtcgaatgatactgagaagcctgtaaagaggagaaaaaaacataagctgtgtttccccataagtttttttaaattgtatattgtatttgtagtaatattccaaaagaatgtaaataggaaatagaagagtgatgcttatgttaagtcctaacactacagtagaagaatggaagcagtgcaaataaattacatttttcccaagtgccagtggcatattttaaaataaagtgtatacgttggaatgagtcatgccatatgtagttgctgtagatggcaactagaacctttgagttacaagagtctttagaagttttctaaccctgcctagtgcaagttacaatattatagcgtgttcggggagtgccctcctgtctgcaggtgtgtctctgtgcctgggggcttttctccacatgcttaggggtgtgggtcttccattggggcatgatggacctgtctacaggtgatctctgttgcctttgggtcagcacatttgttagtctcctgggggtgaaaacttggcttacaagagaactggaaaaatgatgagatgtggtccccaaacccttgattgactctggggaggggctttgtgaataggattgctctcacattaaagatagttacttcaatttgaaggctggatttagggatttttttttttccttataacaaagacatcaccaggatatgaagcttttgttgaaagttggaaaaaaagtgaaattaaagacattcccagacaaatactaagacaatttgttgcctatggacgtctgccttacaagaaatactaaatccttcacacagaaaataaatgacaccagatggtaacctgaatccacaggatgaaatgaa

SEQ ID NO: 447321 - DNA, 6473 bp, Homo sapiens
ggcgaggcgaggtttgctggggtgaggcagcggcgcggccgggccgggccgggccacaggcggtggcggcgggaccatggaggcggcggtcgctgctccgcgtccccggctgctcctcctcgtgctggcggcggcggcggcggcggcggcggcgctgctcccgggggcgacggcgttacagtgtttctgccacctctgtacaaaagacaattttacttgtgtgacagatgggctctgctttgtctctgtcacagagaccacagacaaagttatacacaacagcatgtgtatagctgaaattgacttaattcctcgagataggccgtttgtatgtgcaccctcttcaaaaactgggtctgtgactacaacatattgctgcaatcaggaccattgcaataaaatagaacttccaactactgtaaagtcatcacctggccttggtcctgtggaactggcagctgtcattgctggaccagtgtgcttcgtctgcatctcactcatgttgatggtctatatctgccacaaccgcactgtcattcaccatcgagtgccaaatgaagaggacccttcattagatcgcccttttatttcagagggtactacgttgaaagacttaatttatgatatgacaacgtcaggttctggctcaggtttaccattgcttgttcagagaacaattgcgagaactattgtgttacaagaaagcattggcaaaggtcgatttggagaagtttggagaggaaagtggcggggagaagaagttgctgttaagatattctcctctagagaagaacgttcgtggttccgtgaggcagagatttatcaaactgtaatgttacgtcatgaaaacatcctgggatttatagcagcagacaataaagacaatggtacttggactcagctctggttggtgtcagattatcatgagcatggatccctttttgattacttaaacagatacacagttactgtggaaggaatgataaaacttgctctgtccacggcgagcggtcttgcccatcttcacatggagattgttggtacccaaggaaagccagccattgctcatagagatttgaaatcaaagaatatcttggtaaagaagaatggaacttgctgtattgcagacttaggactggcagtaagacatgattcagccacagataccattgatattgctccaaaccacagagtgggaacaaaaaggtacatggcccctgaagttctcgatgattccataaatatgaaacattttgaatccttcaaacgtgctgacatctatgcaatgggcttagtattctgggaaattgctcgacgatgttccattggtggaattcatgaagattaccaactgccttattatgatcttgtaccttctgacccatcagttgaagaaatgagaaaagttgtttgtgaacagaagttaaggccaaatatcccaaacagatggcagagctgtgaagccttgagagtaatggctaaaattatgagagaatgttggtatgccaatggagcagctaggcttacagcattgcggattaagaaaacattatcgcaactcagtcaacaggaaggcatcaaaatgtaattctacagctttgcctgaactctccttttttcttcagatctgctcctgggttttaatttgggaggtcagttgttctacctcactgagagggaacagaaggatattgcttccttttgcagcagtgtaataaagtcaattaaaaacttcccaggatttctttggacccaggaaacagccatgtgggtcctttctgtgcactatgaacgcttctttcccaggacagaaaatgtgtagtctacctttattttttattaacaaaacttgttttttaaaaagatgattgctggtcttaactttaggtaactctgctgtgctggagatcatctttaagggcaaaggagttggattgctgaattacaatgaaacatgtcttattactaaagaaagtgatttactcctggttagtacattctcagaggattctgaaccactagagtttccttgattcagactttgaatgtactgttctatagtttttcaggatcttaaaactaacacttataaaactcttatcttgagtctaaaaatgacctcatatagtagtgaggaacataattcatgcaattgtattttgtatactattattgttctttcacttattcagaacattacatgccttcaaaatgggattgtactataccagtaagtgccacttctgtgtctttctaatggaaatgagtagaattgctgaaagtctctatgttaaaacctatagtgtttgaattcaaaaagcttatttatctgggtaacccaaactttttctgttttgtttttggaagggtttttgtggtatgtcatttggtattctattctgaaaatgcctttctcctaccaaaatgtgcttaagccactaaagaaatgaagtggcattaattagtaaattattagcatggtcatgtttgaatattctcacatcaagcttttgcattttaattgtgttgtctaagtatacttttaaaaaatcaagtggcactctagatgcttatagtactttaatatttgtagcatacagactaatttttctaaaagggaaagtctgtctagctgcttgtgaaaagttatgtggtattctgtaagccatttttttctttatctgttcaaagacttattttttaagacatgaattacatttaaaattagaatatggttaatattaaataataggcctttttctaggaaggcgaaggtagttaataatttgaatagataacagatgtgcaagaaagtcacatttgttatgtatgtaggagtaaacgttcggtggatcctctgtctttgtaactgaggttagagctagtgtggttttgaggtctcactacactttgaggaaggcagcttttaattcagtgtttccttatgtgtgcgtacattgcaactgcttacatgtaatttatgtaatgcattcagtgcacccttgttacttgggagaggtggtagctaaagaacattctgagtataggtttttctccatttacagatgtctttggtcaaatattgaaagcaaacttgtcatggtcttcttacattaagttgaaactagcttataataactggtttttacttccaatgctatgaagtctctgcagggcttttacagttttcgaagtccttttatcactgtgatcttattctgaggggagaaaaaactatcatagctctgaggcaagacttcgactttatagtgctatcagttccccgatacagggtcagagtaacccatacagtattttggtcaggaagagaaagtggccatttacactgaatgagttgcattctgataatgtcttatctcttatacgtagaataaatttgaaagactatttgatcttaaaaccaaagtaattttagaatgagtgacatattacataggaatttagtgtcaatttcatgtgtttaaaaacatcatgggaaaaatgcttagaggttactattttgactacaaagttgagtttttttctgtagttaccataatttcattgaagcaaatgaatgagtttgagaggtttgtttttatagttgtgttgtattacttgtttaataataatctctaattctgtgatcaggtactttttttgtgggggttttttttttgtttttttttttttgttgttgtttttgggccatttctaagcctaccagatctgctttatgaaatccaggggaccaatgcattttatcactaaaactatttttatataattttaagaatataccaaaagttgtctgatttaaagttgtaatacatgatttctcactttcatgtaaggttatccacttttgctgaagatattttttattgaatcaaagattgagttacaattatacttttcttacctaagtggataaaatgtacttttgatgaatcagggaatttttttaaagttggagtttagttctaaattgactttacgtattactgcagttaattccttttttggctagggatggtttgataaaccacaattggctgatattgaaaatgaaagaaacttaaaaggtgggatggatcatgattactgtcgataactgcagataaatttgattagagtaataattttgtcatttaaaaacacagttgtttatactgcccatcctaggatgctcaccttccaagattcaacgtggctaaaacatcttctggtaaattgtgcgtccatattcattttgtcagtagccaggagaaatggggatgggggaaatacgacttagtgaggcatagacatccctggtccatcctttctgtctccagctgtttcttggaacctgctctcctgcttgctggtccctgacgcagagaccgttgcctcccccacagccgtttgactgaaggctgctctggagacctagagtaaaacggctgatggaagttgtgggacccacttccatttccttcagtcattagaggtggaagggaggggtctccaagtttggagattgagcagatgaggcttgggatgcccctgctttgacttcagccatggatgaggagtgggatggcagcaaggtggctcctgtggcagtggagttgtgccagaaacagtggccagttgtatcgcctataagacagggtaaggtctgaagagctgagcctgtaattctgctgtaataatgatagtgctcaagaagtgccttgagttggtgtacagtgccatggccatcaagaatcccagatttcaggttttattacaaaatgtaagtggtcacttggcgattttgtagtacatgcatgagttaccttttttctctatgtctgagaactgtcagattaaaacaagatggcaaagagatcgttagagtgcacaacaaaatcactatcccattagacacatcatcaaaagcttatttttattcttgcactggaagaatcgtaagtcaactgtttcttgaccatggcagtgttctggctccaaatggtagtgattccaaataatggttctgttaacactttggcagaaaatgccagctcagatattttgagatactaaggattatctttggacatgtactgcagcttcttgtctctgttttggattactggaatacccatgggccctctcaagagtgctggacttctaggacattaagatgattgtcagtacattaaacttttcaatcccattatgcaatcttgtttgtaaatgtaaacttctaaaaatatggttaataacattcaacctgtttattacaacttaaaaggaacttcagtgaatttgtttttattttttaacaagatttgtgaactgaatatcatgaaccatgttttgatacccctttttcacgttgtgccaacggaatagggtgtttgatatttcttcatatgttaaggagatgcttcaaaatgtcaattgctttaaacttaaattacctctcaagagaccaaggtacatttacctcattgtgtatataatgtttaatatttgtcagagcattctccaggtttgcagttttatttctataaagtatgggtattatgttgctcagttactcaaatggtactgtattgtttatatttgtaccccaaataacatcgtctgtactttctgttttctgtattgtatttgtgcaggattctttaggctttatcagtgtaatctctgccttttaagatatgtacagaaaatgtccatataaatttccattgaagtcgaatgatactgagaagcctgtaaagaggagaaaaaaacataagctgtgtttccccataagtttttttaaattgtatattgtatttgtagtaatattccaaaagaatgtaaataggaaatagaagagtgatgcttatgttaagtcctaacactacagtagaagaatggaagcagtgcaaataaattacatttttcccaagtgccagtggcatattttaaaataaagtgtatacgttggaatgagtcatgccatatgtagttgctgtagatggcaactagaacctttgagttacaagagtctttagaagttttctaaccctgcctagtgcaagttacaatattatagcgtgttcggggagtgccctcctgtctgcaggtgtgtctctgtgcctgggggcttttctccacatgcttaggggtgtgggtcttccattggggcatgatggacctgtctacaggtgatctctgttgcctttgggtcagcacatttgttagtctcctgggggtgaaaacttggcttacaagagaactggaaaaatgatgagatgtggtccccaaacccttgattgactctggggaggggctttgtgaataggattgctctcacattaaagatagttacttcaatttgaaggctggatttagggatttttttttttccttataacaaagacatcaccaggatatgaagcttttgttgaaagttggaaaaaaagtgaaattaaagacattcccagaca

SEQ ID NO: 447322 - DNA, 5901 bp, Homo sapiens
ggcgaggcgaggtttgctggggtgaggcagcggcgcggccgggccgggccgggccacaggcggtggcggcgggaccatggaggcggcggtcgctgctccgcgtccccggctgctcctcctcgtgctggcggcggcggcggcggcggcggcggcgctgctcccgggggcgacggcgttacagtgtttctgccacctctgtacaaaagacaattttacttgtgtgacagatgggctctgctttgtctctgtcacagagaccacagacaaagttatacacaacagcatgtgtatagctgaaattgacttaattcctcgagataggccgtttgtatgtgcaccctcttcaaaaactgggtctgtgactacaacatattgctgcaatcaggaccattgcaataaaatagaacttccaactactgtaaagtcatcacctggccttggtcctgtggaactggcagctgtcattgctggaccagtgtgcttcgtctgcatctcactcatgttgatggtctatatctgccacaaccgcactgtcattcaccatcgagtgccaaatgaagaggacccttcattagatcgcccttttatttcagagggtactacgttgaaagacttaatttatgatatgacaacgtcaggttctggctcaggtttaccattgcttgttcagagaacaattgcgagaactattgtgttacaagaaagcattggcaaaggtcgatttggagaagtttggagaggaaagtggcggggagaagaagttgctgttaagatattctcctctagagaagaacgttcgtggttccgtgaggcagagatttatcaaactgtaatgttacgtcatgaaaacatcctgggatttatagcagcagacaataaagacaatggtacttggactcagctctggttggtgtcagattatcatgagcatggatccctttttgattacttaaacagatacacagttactgtggaaggaatgataaaacttgctctgtccacggcgagcggtcttgcccatcttcacatggagattgttggtacccaaggaaagccagccattgctcatagagatttgaaatcaaagaatatcttggtaaagaagaatggaacttgctgtattgcagacttaggactggcagtaagacatgattcagccacagataccattgatattgctccaaaccacagagtgggaacaaaaaggtacatggcccctgaagttctcgatgattccataaatatgaaacattttgaatccttcaaacgtgctgacatctatgcaatgggcttagtattctgggaaattgctcgacgatgttccattggtggaattcatgaagattaccaactgccttattatgatcttgtaccttctgacccatcagttgaagaaatgagaaaagttgtttgtgaacagaagttaaggccaaatatcccaaacagatggcagagctgtgaagccttgagagtaatggctaaaattatgagagaatgttggtatgccaatggagcagctaggcttacagcattgcggattaagaaaacattatcgcaactcagtcaacaggaaggcatcaaaatgtaattctacagctttgcctgaactctccttttttcttcagatctgctcctgggttttaatttgggaggtcagttgttctacctcactgagagggaacagaaggatattgcttccttttgcagcagtgtaataaagtcaattaaaaacttcccaggatttctttggacccaggaaacagccatgtgggtcctttctgtgcactatgaacgcttctttcccaggacagaaaatgtgtagtctacctttattttttattaacaaaacttgttttttaaaaagatgattgctggtcttaactttaggtaactctgctgtgctggagatcatctttaagggcaaaggagttggattgctgaattacaatgaaacatgtcttattactaaagaaagtgatttactcctggttagtacattctcagaggattctgaaccactagagtttccttgattcagactttgaatgtactgttctatagtttttcaggatcttaaaactaacacttataaaactcttatcttgagtctaaaaatgacctcatatagtagtgaggaacataattcatgcaattgtattttgtatactattattgttctttcacttattcagaacattacatgccttcaaaatgggattgtactataccagtaagtgccacttctgtgtctttctaatggaaatgagtagaattgctgaaagtctctatgttaaaacctatagtgtttgaattcaaaaagcttatttatctgggtaacccaaactttttctgttttgtttttggaagggtttttgtggtatgtcatttggtattctattctgaaaatgcctttctcctaccaaaatgtgcttaagccactaaagaaatgaagtggcattaattagtaaattattagcatggtcatgtttgaatattctcacatcaagcttttgcattttaattgtgttgtctaagtatacttttaaaaaatcaagtggcactctagatgcttatagtactttaatatttgtagcatacagactaatttttctaaaagggaaagtctgtctagctgcttgtgaaaagttatgtggtattctgtaagccatttttttctttatctgttcaaagacttattttttaagacatgaattacatttaaaattagaatatggttaatattaaataataggcctttttctaggaaggcgaaggtagttaataatttgaatagataacagatgtgcaagaaagtcacatttgttatgtatgtaggagtaaacgttcggtggatcctctgtctttgtaactgaggttagagctagtgtggttttgaggtctcactacactttgaggaaggcagcttttaattcagtgtttccttatgtgtgcgtacattgcaactgcttacatgtaatttatgtaatgcattcagtgcacccttgttacttgggagaggtggtagctaaagaacattctgagtataggtttttctccatttacagatgtctttggtcaaatattgaaagcaaacttgtcatggtcttcttacattaagttgaaactagcttataataactggtttttacttccaatgctatgaagtctctgcagggcttttacagttttcgaagtccttttatcactgtgatcttattctgaggggagaaaaaactatcatagctctgaggcaagacttcgactttatagtgctatcagttccccgatacagggtcagagtaacccatacagtattttggtcaggaagagaaagtggccatttacactgaatgagttgcattctgataatgtcttatctcttatacgtagaataaatttgaaagactatttgatcttaaaaccaaagtaattttagaatgagtgacatattacataggaatttagtgtcaatttcatgtgtttaaaaacatcatgggaaaaatgcttagaggttactattttgactacaaagttgagtttttttctgtagttaccataatttcattgaagcaaatgaatgagtttgagaggtttgtttttatagttgtgttgtattacttgtttaataataatctctaattctgtgatcaggtactttttttgtgggggttttttttttgtttttttttttttgttgttgtttttgggccatttctaagcctaccagatctgctttatgaaatccaggggaccaatgcattttatcactaaaactatttttatataattttaagaatataccaaaagttgtctgatttaaagttgtaatacatgatttctcactttcatgtaaggttatccacttttgctgaagatattttttattgaatcaaagattgagttacaattatacttttcttacctaagtggataaaatgtacttttgatgaatcagggaatttttttaaagttggagtttagttctaaattgactttacgtattactgcagttaattccttttttggctagggatggtttgataaaccacaattggctgatattgaaaatgaaagaaacttaaaaggtgggatggatcatgattactgtcgataactgcagataaatttgattagagtaataattttgtcatttaaaaacacagttgtttatactgcccatcctaggatgctcaccttccaagattcaacgtggctaaaacatcttctggtaaattgtgcgtccatattcattttgtcagtagccaggagaaatggggatgggggaaatacgacttagtgaggcatagacatccctggtccatcctttctgtctccagctgtttcttggaacctgctctcctgcttgctggtccctgacgcagagaccgttgcctcccccacagccgtttgactgaaggctgctctggagacctagagtaaaacggctgatggaagttgtgggacccacttccatttccttcagtcattagaggtggaagggaggggtctccaagtttggagattgagcagatgaggcttgggatgcccctgctttgacttcagccatggatgaggagtgggatggcagcaaggtggctcctgtggcagtggagttgtgccagaaacagtggccagttgtatcgcctataagacagggtaaggtctgaagagctgagcctgtaattctgctgtaataatgatagtgctcaagaagtgccttgagttggtgtacagtgccatggccatcaagaatcccagatttcaggttttattacaaaatgtaagtggtcacttggcgattttgtagtacatgcatgagttaccttttttctctatgtctgagaactgtcagattaaaacaagatggcaaagagatcgttagagtgcacaacaaaatcactatcccattagacacatcatcaaaagcttatttttattcttgcactggaagaatcgtaagtcaactgtttcttgaccatggcagtgttctggctccaaatggtagtgattccaaataatggttctgttaacactttggcagaaaacttcttgtctctgttttggattactggaatacccatgggccctctcaagagtgctggacttctaggacattaagatgattgtcagtacattaaacttttcaatcccattatgcaatcttgtttgtaaatgtaaacttctaaaaatatggttaataacattcaacctgtttattacaacttaaaaggaacttcagtgaatttgtttttattttttaacaagatttgtgaactgaatatcatgaaccatgttttgatacccctttttcacgttgtgccaacggaatagggtgtttgatatttcttcatatgttaaggagatgcttcaaaatgtcaattgctttaaacttaaattacctctcaagagaccaaggtacatttacctcattgtgtatataatgtttaatatttgtcagagcattctccaggtttgcagttttatttctataaagtatgggtattatgttgctcagttactcaaatggtactgtattgtttatatttgtaccccaaataacatcgtctgtactttctgttttctgtattgtatttgtgcaggattctttaggctttatcagtgtaatctctgccttttaagatatgtacagaaaatgtccatataaatttccattgaagtcgaatgatactgagaagcctgtaaagaggagaaaaaaacataagctgtgtttccccataagtttttttaaattgtatattgtatttgtagtaatattccaaaagaatgtaaataggaaatagaagagtgatgcttatgttaagtcctaacactacagtagaagaatggaagcagtgcaaataaattacatttttccttctctcttcccgtcttctctcctct

SEQ ID NO: 447323 - DNA, 3583 bp, Homo sapiens
ggcgaggcgaggtttgctggggtgaggcagcggcgcggccgggccgggccgggccacaggcggtggcggcgggaccatggaggcggcggtcgctgctccgcgtccccggctgctcctcctcgtgctggcggcggcggcggcggcggcggcggcgctgctcccgggggcgacggcgttacagtgtttctgccacctctgtacaaaagacaattttacttgtgtgacagatgggctctgctttgtctctgtcacagagaccacagacaaagttatacacaacagcatgtgtatagctgaaattgacttaattcctcgagataggccgtttgtatgtgcaccctcttcaaaaactgggtctgtgactacaacatattgctgcaatcaggaccattgcaataaaatagaacttccaactactgtaaagtcatcacctggccttggtcctgtggaactggcagctgtcattgctggaccagtgtgcttcgtctgcatctcactcatgttgatggtctatatctgccacaaccgcactgtcattcaccatcgagtgccaaatgaagaggacccttcattagatcgcccttttatttcagagggtactacgttgaaagacttaatttatgatatgacaacgtcaggttctggctcaggtttaccattgcttgttcagagaacaattgcgagaactattgtgttacaagaaagcattggcaaaggtcgatttggagaagtttggagaggaaagtggcggggagaagaagttgctgttaagatattctcctctagagaagaacgttcgtggttccgtgaggcagagatttatcaaactgtaatgttacgtcatgaaaacatcctgggatttatagcagcagacaataaagacaatggtacttggactcagctctggttggtgtcagattatcatgagcatggatccctttttgattacttaaacagatacacagttactgtggaaggaatgataaaacttgctctgtccacggcgagcggtcttgcccatcttcacatggagattgttggtacccaaggaaagccagccattgctcatagagatttgaaatcaaagaatatcttggtaaagaagaatggaacttgctgtattgcagacttaggactggcagtaagacatgattcagccacagataccattgatattgctccaaaccacagagtgggaacaaaaaggtacatggcccctgaagttctcgatgattccataaatatgaaacattttgaatccttcaaacgtgctgacatctatgcaatgggcttagtattctgggaaattgctcgacgatgttccattggtggaattcatgaagattaccaactgccttattatgatcttgtaccttctgacccatcagttgaagaaatgagaaaagttgtttgtgaacagaagttaaggccaaatatcccaaacagatggcagagctgtgaagccttgagagtaatggctaaaattatgagagaatgttggtatgccaatggagcagctaggcttacagcattgcggattaagaaaacattatcgcaactcagtcaacaggaaggcatcaaaatgtaattctacagctttgcctgaactctccttttttcttcagatctgctcctgggttttaatttgggaggtcagttgttctacctcactgagagggaacagaaggatattgcttccttttgcagcagtgtaataaagtcaattaaaaacttcccaggatttctttggacccaggaaacagccatgtgggtcctttctgtgcactatgaacgcttctttcccaggacagaaaatgtgtagtctacctttattttttattaacaaaacttgttttttaaaaagatgattgctggtcttaactttaggtaactctgctgtgctggagatcatctttaagggcaaaggagttggattgctgaattacaatgaaacatgtcttattactaaagaaagtgatttactcctggttagtacattctcagaggattctgaaccactagagtttccttgattcagactttgaatgtactgttctatagtttttcaggatcttaaaactaacacttataaaactcttatcttgagtctaaaaatgacctcatatagtagtgaggaacataattcatgcaattgtattttgtatactattattgttctttcacttattcagaacattacatgccttcaaaatgggattgtactataccagtaagtgccacttctgtgtctttctaatggaaatgagtagaattgctgaaagtctctatgttaaaacctatagtgtttgaattcaaaaagcttatttatctgggtaacccaaactttttctgttttgtttttggaagggtttttgtggtatgtcatttggtattctattctgaaaatgcctttctcctaccaaaatgtgcttaagccactaaagaaatgaagtggcattaattagtaaattattagcatggtcatgtttgaatattctcacatcaagcttttgcattttaattgtgttgtctaagtatacttttaaaaaatcaagtggcactctagatgcttatagtactttaatatttgtagcatacagactaatttttctaaaagggaaagtctgtctagctgcttgtgaaaagttatgtggtattctgtaagccatttttttctttatctgttcaaagacttattttttaagacatgaattacatttaaaattagaatatggttaatattaaataataggcctttttctaggaaggcgaaggtagttaataatttgaatagataacagatgtgcaagaaagtcacatttgttatgtatgtaggagtaaacgttcggtggatcctctgtctttgtaactgaggttagagctagtgtggttttgaggtctcactacactttgaggaaggcagcttttaattcagtgtttccttatgtgtgcgtacattgcaactgcttacatgtaatttatgtaatgcattcagtgcacccttgttacttgggagaggtggtagctaaagaacattctgagtataggtttttctccatttacagatgtctttggtcaaatattgaaagcaaacttgtcatggtcttcttacattaagttgaaactagcttataataactggtttttacttccaatgctatgaagtctctgcagggcttttacagttttcgaagtccttttatcactgtgatcttattctgaggggagaaaaaactatcatagctctgaggcaagacttcgactttatagtgctatcagttccccgatacagggtcagagtaacccatacagtattttggtcaggaagagaaagtggccatttacactgaatgagttgcattctgataatgtcttatctcttatacgtagaataaatttgaaagactatttgatcttaaaaccaaagtaattttagaatgagtgacatattacataggaatttagtgtcaatttcatgtgtttaaaaacatcatgggaaaaatgcttagaggttactattttgactacaaagttgagaatgagttgagaggttgtttatagtggttgtctaaataatactctc

SEQ ID NO: 447324 - DNA, 489 bp, Homo sapiens
tgttaaccttgagattttttctaagaatctttctctttttccagcgttacagtgtttctgccacctctgtacaaaagacaattttacttgtgtgacagatgggctctgctttgtctctgtcacagagaccacagacaaagttatacacaacagcatgtgtatagctgaaattgacttaattcctcgagataggccgtttgtatgtgcaccctcttcaaaaactgggtctgtgactacaacatattgctgcaatcaggaccattgcaataaaatagaacttccaactactggtaagttgtataaaatttttttcctagatactacaagaaaaactcttcatactctgtgattttagaactggaagggatcataaaaattgtctaatccagctcattccgtttagaggcaagaagtgacttgtccattgttacagacttataagagtaaccaagatcctgcctcctgggtatgtgttgtttaagaaggtgg

SEQ ID NO: 447325 - DNA, 3311 bp, Homo sapiens
tttaccccaacatggctgcgcccgtgggaccggtgaagttctggcgacccggtacagaggggccaggtgtaagcatctctgaagagagacaaagtctggctgaaaactctgggacaacggttgtttacaacccttatgctgccctttccatagagcagcagaggcagaagctgccggtattcaagcttaggaatcatattttatacttgatagaaaattatcagacagtggtgattgttggtgaaacaggatgtgggaagagcacacagattcctcagtaccttgcagaagccggctggacagctgaaggaagagtggtaggagtgacccagcctcgaagagtggctgctgttacagttgcagggagagtagctgaagaaaggggtgcagtgctgggccacgaggtgggctactgcatccgctttgatgactgcaccgaccagctggccacgagaattaagtttcttactgatggaatgctggtcagggaaatgatggttgatccgttgttaacaaaatatagtgtcatcatgctggatgaagcccacgagaggaccttgtacactgacattgccattggcttgctaaaaaagattcagaaaaagcgaggggatcttcgattgattgtagcttcagccactctggatgcagacaaattccgggatttctttaatcaaaatgaaaccagtgatccagcaagggatacatgtgtgatccttacagtggaagggagaacatttccggtggatatcttttatctacaaagtcctgttccagattatatcaaatcaactgtcgaaactgtggtgaaaattcaccagacagagggagacggagacgttttagcatttcttactggccaggaagaggtagaaactgttgtgtcgatgctcatcgagcaggctcgagcactagctcgcactgggatgaagagacacctccgagttctccccatgtatgcaggactgccttcctttgagcaaatgaaagtgtttgaaagggtgtcacgcagtgtcagaaaggtgatagtggccaccaatgtggcagaaacctctatcacaatcagcggcattgtgtatgtgatcgactgtggctttgtgaaactccgagcctacaatcccaggacagctattgaatgcttggtggtggtgccagtctcccaggcatcagctaatcagcgagcaggacgtggtggtcgtagtcgctcgggaaaatgttatcgcctttatacagaggaagcctttgacaagttgcctcagtctacggttcctgagatgcagcgtagtaatttggcacctgtcatcctgcagctgaaagcactaggaattgacaatgtcctcaggttccacttcatgtcgccccctccagcacagtcgatggttcaagccttggagttactgtatgctctgggaggtctggacaaagactgtcgcctaactgaaccgcttggcatgagaattgcagagtttcctttgaatcccatgtttgccaaaatgctgcttgaatcaggaaacttcggctgttctcaggaaattctaagcatcgctgccatgatgcagatccagaatatctttgtggtccccccaaaccagaagtctcacgcaattcgagtgcaccgtaaatttgctgtggaggagggcgaccacctcactatgctcaatatatatgaagcatttatcaaacacaataaggactctaaatggtgtcaggaacatttcctgaattacaagggtcttgtcagagctgcgactgtaagagaacaattgaaaaagcttcttgtcaagtttcaagtgcccaggaagtctagtgaaggtgacccggatctggttctgaggtgcattgtctccggcttcttcgccaatgcagcgaggtttcattctactggagcttataggaccatccgtgatgaccatgagctgcacatacaccctgcgtcagtcctctatgcagagaagccgcctcgctgggtcatctataacgaagttatacagacctccaagtactacatgagagatgtgactgccattgaatcggcctggctgttggagctggctccacacttttatcaacaaggaacgcacctgtctctgaaagccaaaagggccaaggtccaggacccgtgagaggagcccacagctacagctgcagggactgctggcgtcctctcctccatgctgctgcccctggtcccaggtggggtgagctggcaccagctcctgtggaatgtttggttgctctgaagtgggctgcggcctgttcattagtcctttcttcccgctgcccacagcatttgcatccttgctgggatcctggaggactttgtgcatgggcaggcatccttctgtgctgcagcgggcagagtgggagttggctcactcagcacgctcactaacccagcatgccacttccagcaggcatgcagtcctggcccagctctatgggaaacaaggaggaaagttagccactgaaggccaaaacaccatgtggggtggacagagggtttgctgggctggctttgctttccctgctggggccacagctgtgttaaccaatgaggtctgctgccaggtgtgaacaagcatgtctctacgaatgaacgaaacattggggatctctgccgaaaccaccaaagggcatgtctgatgggcacagggtctcccaaacccagtggcttctgtctgtcctcagcccttgtccctgtttatctgcagccaggagacttgcaagggattggtgattgacagagaggactcgtgcgctgttttgtgttagcagaggatttgtgtttcacaggtaggcttagcgtcctctcagagtgtagtgccaggtcctggtgccacgctagctgagcactcaggagagttcatcagctcagatcccacagggcctcctctttagcaggaattcacaacagtttggatgccctaaacttctgtagctcaggaacatcactggtgtatttgtttttttgtttgtttgcttgggttcttgcaagagcgcgtggggacagttcttccagcaggcactggttttgttgccccagggctgctttgctgtgatgatgattgcatttcaacacatgccagatgcagattttttcccccttactgtttcaatgacctttattttaaaaacacatagcttgaaaatttatttttatactgatattagtttggatgtgccacttttggcaccaaacgtgtatgtcatttttatttccattttataaacatgtaaataatagtgataacttgttaataatagtaaacctttatacctaaagtaaatgtcttccctcccaaaaaaaaaat

SEQ ID NO: 447326 - DNA, 3218 bp, Homo sapiens
tttaccccaacatggctgcgcccgtgggaccggtgaagttctggcgacccggtacagaggggccaggtgtaagcatctctgaagagagacaaagtctggctgaaaactctgggacaacggttgtttacaacccttatgctgccctttccatagagcagcagaggcagaagctgccggtattcaagtaccttgcagaagccggctggacagctgaaggaagagtggtaggagtgacccagcctcgaagagtggctgctgttacagttgcagggagagtagctgaagaaaggggtgcagtgctgggccacgaggtgggctactgcatccgctttgatgactgcaccgaccagctggccacgagaattaagtttcttactgatggaatgctggtcagggaaatgatggttgatccgttgttaacaaaatatagtgtcatcatgctggatgaagcccacgagaggaccttgtacactgacattgccattggcttgctaaaaaagattcagaaaaagcgaggggatcttcgattgattgtagcttcagccactctggatgcagacaaattccgggatttctttaatcaaaatgaaaccagtgatccagcaagggatacatgtgtgatccttacagtggaagggagaacatttccggtggatatcttttatctacaaagtcctgttccagattatatcaaatcaactgtcgaaactgtggtgaaaattcaccagacagagggagacggagacgttttagcatttcttactggccaggaagaggtagaaactgttgtgtcgatgctcatcgagcaggctcgagcactagctcgcactgggatgaagagacacctccgagttctccccatgtatgcaggactgccttcctttgagcaaatgaaagtgtttgaaagggtgtcacgcagtgtcagaaaggtgatagtggccaccaatgtggcagaaacctctatcacaatcagcggcattgtgtatgtgatcgactgtggctttgtgaaactccgagcctacaatcccaggacagctattgaatgcttggtggtggtgccagtctcccaggcatcagctaatcagcgagcaggacgtggtggtcgtagtcgctcgggaaaatgttatcgcctttatacagaggaagcctttgacaagttgcctcagtctacggttcctgagatgcagcgtagtaatttggcacctgtcatcctgcagctgaaagcactaggaattgacaatgtcctcaggttccacttcatgtcgccccctccagcacagtcgatggttcaagccttggagttactgtatgctctgggaggtctggacaaagactgtcgcctaactgaaccgcttggcatgagaattgcagagtttcctttgaatcccatgtttgccaaaatgctgcttgaatcaggaaacttcggctgttctcaggaaattctaagcatcgctgccatgatgcagatccagaatatctttgtggtccccccaaaccagaagtctcacgcaattcgagtgcaccgtaaatttgctgtggaggagggcgaccacctcactatgctcaatatatatgaagcatttatcaaacacaataaggactctaaatggtgtcaggaacatttcctgaattacaagggtcttgtcagagctgcgactgtaagagaacaattgaaaaagcttcttgtcaagtttcaagtgcccaggaagtctagtgaaggtgacccggatctggttctgaggtgcattgtctccggcttcttcgccaatgcagcgaggtttcattctactggagcttataggaccatccgtgatgaccatgagctgcacatacaccctgcgtcagtcctctatgcagagaagccgcctcgctgggtcatctataacgaagttatacagacctccaagtactacatgagagatgtgactgccattgaatcggcctggctgttggagctggctccacacttttatcaacaaggaacgcacctgtctctgaaagccaaaagggccaaggtccaggacccgtgagaggagcccacagctacagctgcagggactgctggcgtcctctcctccatgctgctgcccctggtcccaggtggggtgagctggcaccagctcctgtggaatgtttggttgctctgaagtgggctgcggcctgttcattagtcctttcttcccgctgcccacagcatttgcatccttgctgggatcctggaggactttgtgcatgggcaggcatccttctgtgctgcagcgggcagagtgggagttggctcactcagcacgctcactaacccagcatgccacttccagcaggcatgcagtcctggcccagctctatgggaaacaaggaggaaagttagccactgaaggccaaaacaccatgtggggtggacagagggtttgctgggctggctttgctttccctgctggggccacagctgtgttaaccaatgaggtctgctgccaggtgtgaacaagcatgtctctacgaatgaacgaaacattggggatctctgccgaaaccaccaaagggcatgtctgatgggcacagggtctcccaaacccagtggcttctgtctgtcctcagcccttgtccctgtttatctgcagccaggagacttgcaagggattggtgattgacagagaggactcgtgcgctgttttgtgttagcagaggatttgtgtttcacaggtaggcttagcgtcctctcagagtgtagtgccaggtcctggtgccacgctagctgagcactcaggagagttcatcagctcagatcccacagggcctcctctttagcaggaattcacaacagtttggatgccctaaacttctgtagctcaggaacatcactggtgtatttgtttttttgtttgtttgcttgggttcttgcaagagcgcgtggggacagttcttccagcaggcactggttttgttgccccagggctgctttgctgtgatgatgattgcatttcaacacatgccagatgcagattttttcccccttactgtttcaatgacctttattttaaaaacacatagcttgaaaatttatttttatactgatattagtttggatgtgccacttttggcaccaaacgtgtatgtcatttttatttccattttataaacatgtaaataatagtgataacttgttaataatagtaaacctttatacctaaagtaaatgtcttccctcccaaaaaaaaaat

SEQ ID NO: 447327 - DNA, 3000 bp, Homo sapiens
tttaccccaacatggctgcgcccgtgggaccggtgaagttctggcgacccggtacagaggggccaggtgtaagcatctctgaagagagacaaagtctggctgaaaactctgggacaacggttgtttacaacccttatgctgccctttccatagagcagcagaggcagaagctgccggtattcaagcttaggaatcatattttatacttgatagaaaattatcagacagtggtgattgttggtgaaacaggatgtgggaagagcacacagattcctcagtaccttgcagaagccggctggacagctgaaggaagagtggtaggagtgacccagcctcgaagagtggctgctgttacagttgcagggagagtagctgaagaaaggggtgcagtgctgggccacgaggtgggctactgcatccgctttgatgactgcaccgaccagctggccacgagaattaagtttcttactgatggaatgctggtcagggaaatgatggttgatccgttgttaacaaaatatagtgtcatcatgctggatgaagcccacgagaggaccttgtacactgacattgccattggcttgctaaaaaagattcagaaaaagcgaggggatcttcgattgattgtagcttcagccactctggatgcagacaaattccgggatttctttaatcaaaatgaaaccagtgatccagcaagggatacatgtgtgatccttacagtggaagggagaacatttccggtggatatcttttatctacaaagtcctgttccagattatatcaaatcaactgtcgaaactgtggtgaaaattcaccagacagagggagacggagacgttttagcatttcttactggccaggaagaggtagaaactgttgtgtcgatgctcatcgagcaggctcgagcactagctcgcactgggatgaagagacacctccgagttctccccatgtatgcaggactgccttcctttgagcaaatgaaagtgtttgaaagggtgtcacgcagtgtcagaaaggtgatagtggccaccaatgtggcagaaacctctatcacaatcagcggcattgtgtatgtgatcgactgtggctttgtgaaactccgagcctacaatcccaggacagctattgaatgcttggtggtggtgccagtctcccaggcatcagctaatcagcgagcaggacgtggtggtcgtagtcgctcgggaaaatgttatcgcctttatacagaggaagcctttgacaagttgcctcagtctacggttcctgagatgcagcgtagtaatttggcacctgtcatcctgcagctgaaagcactaggaattgacaatgtcctcaggttccacttcatgtcgccccctccagcacagtcgatggttcaagccttggagttactgtatgctctgggaggtctggacaaagactgtcgcctaactgaaccgcttggcatgagaattgcagagtttcctttgaatcccatgtttgccaaaatgctgcttgaatcaggaaacttcggctgttctcaggaaattctaagcatcgctgccatgatgcagatccagaatatctttgtggtccccccaaaccagaagtctcacgcaattcgagtgcaccgtaaatttgctgtggaggagggcgaccacctcactatgctcaatatatatgaagcatttatcaaacacaataaggactctaaatggtgtcaggaacatttcctgaattacaagggtcttgtcagagctgcgactgtaagagaacaattgaaaaagcttcttgtcaagtttcaagtgcccaggaagtctagtgaaggtgacccggatctggttctgaggtgcattgtctccggcttcttcgccaatgcagcgaggtttcattctactggagcttataggaccatccgtgatgaccatgagctgcacatacaccctgcgtcagtcctctatgcagagaagccgcctcgctgggtcatctataacgaagttatacagacctccaagtactacatgagagatgtgactgccattgaatcggcctggctgttggagctggctccacacttttatcaacaaggaacgcacctgtctctgaaagccaaaagggccaaggtccaggacccgtgagaggagcccacagctacagctgcagggactgctggcgtcctctcctccatgctgctgcccctggtcccaggtggggtgagctggcaccagctcctgtggaatgtttggttgctctgaagtgggctgcggcctgttcattagtcctttcttcccgctgcccacagcatttgcatccttgctgggatcctggaggactttgtgcatgggcaggcatccttctgtgctgcagcgggcagagtgggagttggctcactcagcacgctcactaacccagcatgccacttccagcaggcatgcagtcctggcccagctctatgggaaacaaggaggaaagttagccactgaaggccaaaacaccatgtggggtggacagagggtttgctgggctggctttgctttccctgctggggccacagctgtgttaaccaatgaggtctgctgccaggtgtgaacaagcatgtctctacgaatgaacgaaacattggggatctctgccgaaaccaccaaagggcatgtctgatgggcacagggtctcccaaacccagtggcttctgtctgtcctcagcccttgtccctgtttatctgcagccaggagacttgcaagggattggtgattgacagagaggactcgtgcgctgttttgtgttagcagaggatttgtgtttcacaggtaggcttatcgagctcgataaggggccaaacgatagtctcctaagtgttctccttgtttccttttggcaccaattaccccccatcctggccccaccagaaaatctctggtcttttcttaacacagaattcagagtttaaatgtaggtcagaccatgtcattcctgtgcctaatatcccctttggacattatctcttagaggaaaaa

SEQ ID NO: 447328 - DNA, 543 bp, Homo sapiens
aacccctgagctcaggcaatccgcccgcctcggcctcccaaagtgctgggattacaggcgtgagccactgcacctaaccctgtcttgtttgtttttgacactgcagtgaagcttttagggaagatttttagttcctcgtaggcacttttctggattctttcctaaagttaaggttgaatacctttgagtagtttgagataaaaagtattgcttcttctgtatatcttcatctttgaaagtttataaacttaacacctttttctgttcattgtatcagagaatctgaaaaaaaaacatttctgctgcaggtacagaggggccaggtgtaagcatctctgaagagagacaaagtctggctgaaaactctgggacaacggttgtttacaacccttatgctgccctttccatagagcagcagaggcagaagctgccggtattcaaggtacgtcaaataatcatgttcaacctgtgggcttgaatcgtgtgtctgcattagctttatgctcagcactgaagggaatgatggcctctttctagaacaca

SEQ ID NO: 447329 - DNA, 815 bp, Homo sapiens
cggacgcgtgggtcgggctgcgcccgtgggaccggtgaaggttctggcgacccggtacagaggggccaggtgtaagcatctctgaagagagacaaagtctggctgaaaactctgggacaacggttgtttacaacccttatgctgccctttccatagagcagcagaggcagaagctgccggtattcaagcttaggaatcatattttatacttgatagaaaattatcagacagtggtgattgttggtgaaacaggatgtgggaagagcacacagattcctcagtaccttgcagaagccggctggacagctgaaggaagagtggtaggagtgacccagcctcgaagagtggctgctgttacacatgatctttcttcccaaaggttgcagggagagtagctgaagaaaggggtgcagtgctgggccacgaggtgggctactgcatccgctttgatgactgcaccgaccagctggccacgagaattaagtttcttactgatggaatgctggtcagggaaatgatggttgatccgttgttaacaaaatatagtgtcatcatgctggatgaagcccacgagaggaccttgtacactgacattgccattggcttgctaaaaaagattcagaaaaagcgaggggatcttcgattgattgtagcttcagccactctggatgcagacgtaagagccttgcctcccctttcctcctctcctcacaaacacttttgtcctatatatccttgggaagttacctctagcaagagcttatctttggcagaatgccctatcttctttatgggaccatctgatgtcctagatt

SEQ ID NO: 447330 - DNA, 1975 bp, Homo sapiens
  misc_feature (5)..(5): n is a, c, g, or t
aacanagctggctggtacggtccggcattcccgggctggcggccgtggagtttgtgacatacgaggtgacacccctcgagtcacttcccttcaactccagctggagcgcctgcttggctttgggttcgttctgcagccttcgccccgctcctagcctcagggccggactccagcgcagagcccagcccagcgcagcctgccagcagccacccagccgcccagccgcccagccccgcacgaaacccggccagagcttcctagcagcccgagccatgaacaccgaaatgtatcagacccccatggaggtggcggtctaccagctgcacaatttctccatctccttcttctcttctctgcttggaggggatgtggtttccgttaagctggacaacagtgcctccggagccagcgtggtggccatagacaacaagatcgaacaggccatggatctggtgaagaatcatctgatgtatgctgtgagagaggaggtggagatcctgaaggagcagatccgagagctggtggagaagaactcccagctagagcgtgagaacaccctgttgaagaccctggcaagcccagagcagctggagaagttccagtcctgtctgagccctgaagagccagctcccgaatccccacaagtgcccgaggcccctggtggttctgcggtgtaagtggctctgtcctcagggtgggcagagccactaaacttgttttacctagttctttccagtttgtttttggctccccaagcatcatctcacgaggagaactttacacctagcacagctggtgccaagagatgtcctaaggacatggccacctgggtccactccagcgacagacccctgacaagagcaggtctctggaggctgagttgcatggggcctagtaacaccaagccagtgagcctctaatgctactgcgccctgggggctcccagggcctgggcaacttagctgcaactggcaaaggagaagggtagtttgaggtgtgacaccagtttgctccagaaagtttaaggggtctgtttctcatctccatggacatcttcaacagcttcacctgacaacgactgttcctatgaagaagccacttgtgttttaagcagaggcaacctctctcttctcctctgtttcgtgaaggcaggggacacagatgggagagattgagccaagtcagccttctgttggttaatatggtataatgcatggctttgtgcacagcccagtgtgggattacagctttgggatgaccgcttacaaagttctgtttggttagtattggcatagtttttctatatagccataaatgcgtatatatacccatagggctagatctgtatcttagtgtagcgatgtatacatatacacatccacctacatgttgaagggcctaaccagccttgggagtattgactggtcccttacctcttatggctaagtctttgactgtgttcatttaccaagttgacccagtttgtcttttaggttaagtaagactcgagagtaaaggcaaggaggggggccagcctctgaatgcggccacggatgccttgctgctgcaaccctttccccagctgtccactgaaacgtgaagtcctgttttgaatgccaaacccaccattcactggtgctgactacatagaatggggttgagagaagatcagtttgggcttcacagtgtcatttgaaaacgttttttgttttgttttgtaattattgtggaaaactttcaagtgaacagaaggatggtgtcctactgtggatgagggatgaacaaggggatggctttgatccaatggagcctgggaggtgtgcccagaaagcttgtctgtagcgggttttgtgagagtgaacactttccactttttgacaccttatcctgatgtatggttccaggatttggattttgattttccaaatgtagcttgaaatttcaataaactttgctctgtttttctaaaaataaa

SEQ ID NO: 447331 - DNA, 609 bp, Homo sapiens
  misc_feature (35)..(35): n is a, c, g, or t
aattcgcggccgcgtcgatacggctgcgagaagcnacagaaggggggagtattgactggtcccttacctcttatggctaagtctttgactgtgttcatttaccaagttgacccagtttgtcttttaggttaagtaagactcgagagtaaaggcaaggaggggggccagcctctgaatgcggccacggatgccttgctgctgcaaccctttccccagctgtccactgaaacgtgaagtcctgttttgaatgccaaacccaccattcactggtgctgactacatagaatggggttgagagaagatcagtttgggcttcacagtgtcatttgaaaacgttttttgttttgttttgtaattattgtggaaaactttcaagtgaacagaaggatggtgtcctactgtggatgagggatgaacaaggggatggctttgatccaatggagcctgggaggtgtgcccagaaagcttgtctgtagcgggttttgtgagagtgaacactttccactttttgacaccttatcctgatgtatggttccaggatttggattttgattttccaaatgtagcttgaaatttcaataaactttgctctgtttttctaaaaataaa

SEQ ID NO: 447332 - DNA, 2350 bp, Homo sapiens
  misc_feature (5)..(5): n is a, c, g, or t
aacanagctggctggtacggtccggcattcccgggctggcggccgtggagtttgtgacatacgaggtgacacccctcgagtcacttcccttcaactccagctggagcgcctgcttggctttgggttcgttctgcagccttcgccccgctcctagcctcagggccggactccagcgcagagcccagcccagcgcagcctgccagcagccacccagccgcccagccgcccagccccgcacgaaacccggccagagcttcctagcagcccgagccatgaacaccgaaatgtatcagacccccatggaggtggcggtctaccagctgcacaatttctccatctccttcttctcttctctgcttggaggggatgtggtttccgttaagctggacaacaggtaaccgctggccccagctccggcgcctcccgagccggggcgccggccggagctgggctaggagcccggtctctgagcgagctgtgtgccgccggtccctgttccccgcggtgcagcatcctgggaaggggcgggggggaggggacgcaggaaggggggggtcaccgccgctctgggatccgtcatcgaagcgtccctgcggccgctgcgccgtgaaaaccagctgctgcagccgcagaggcagccggaggcagaggggcggcgggcaggaccagacagggctgggcagggggctggccgagcgccgtgcgccgcttgggagaaggccggaagcttaccagccgagaaggaattcctagctagcttcagagccggtgcctccggagccagcgtggtggccatagacaacaagatcgaacaggccatggatctggtgaagaatcatctgatgtatgctgtgagagaggaggtggagatcctgaaggagcagatccgagagctggtggagaagaactcccagctagagcgtgagaacaccctgttgaagaccctggcaagcccagagcagctggagaagttccagtcctgtctgagccctgaagagccagctcccgaatccccacaagtgcccgaggcccctggtggttctgcggtgtaagtggctctgtcctcagggtgggcagagccactaaacttgttttacctagttctttccagtttgtttttggctccccaagcatcatctcacgaggagaactttacacctagcacagctggtgccaagagatgtcctaaggacatggccacctgggtccactccagcgacagacccctgacaagagcaggtctctggaggctgagttgcatggggcctagtaacaccaagccagtgagcctctaatgctactgcgccctgggggctcccagggcctgggcaacttagctgcaactggcaaaggagaagggtagtttgaggtgtgacaccagtttgctccagaaagtttaaggggtctgtttctcatctccatggacatcttcaacagcttcacctgacaacgactgttcctatgaagaagccacttgtgttttaagcagaggcaacctctctcttctcctctgtttcgtgaaggcaggggacacagatgggagagattgagccaagtcagccttctgttggttaatatggtataatgcatggctttgtgcacagcccagtgtgggattacagctttgggatgaccgcttacaaagttctgtttggttagtattggcatagtttttctatatagccataaatgcgtatatatacccatagggctagatctgtatcttagtgtagcgatgtatacatatacacatccacctacatgttgaagggcctaaccagccttgggagtattgactggtcccttacctcttatggctaagtctttgactgtgttcatttaccaagttgacccagtttgtcttttaggttaagtaagactcgagagtaaaggcaaggaggggggccagcctctgaatgcggccacggatgccttgctgctgcaaccctttccccagctgtccactgaaacgtgaagtcctgttttgaatgccaaacccaccattcactggtgctgactacatagaatggggttgagagaagatcagtttgggcttcacagtgtcatttgaaaacgttttttgttttgttttgtaattattgtggaaaactttcaagtgaacagaaggatggtgtcctactgtggatgagggatgaacaaggggatggctttgatccaatggagcctgggaggtgtgcccagaaagcttgtctgtagcgggttttgtgagagtgaacactttccactttttgacaccttatcctgatgtatggttccaggatttggattttgattttccaaatgtagcttgaaatttcaataaactttgctctgtttttctaaaaataaa

SEQ ID NO: 447333 - DNA, 2714 bp, Homo sapiens
  misc_feature (5)..(5): n is a, c, g, or t
aacanagctggctggtacggtccggcattcccgggctggcggccgtggagtttgtgacatacgaggtgacacccctcgagtcacttcccttcaactccagctggagcgcctgcttggctttgggttcgttctgcagccttcgccccgctcctagcctcagggccggactccagcgcagagcccagcccagcgcagcctgccagcagccacccagccgcccagccgcccagccccgcacgaaacccggccagagcttcctagcagcccgagccatgaacaccgaaatgtatcagacccccatggaggtggcggtctaccagctgcacaatttctccatctccttcttctcttctctgcttggaggggatgtggtttccgttaagctggacaacaggtaaccgctggccccagctccggcgcctcccgagccggggcgccggccggagctgggctaggagcccggtctctgagcgagctgtgtgccgccggtccctgttccccgcggtgcagcatcctgggaaggggcgggggggaggggacgcaggaaggggggggtcaccgccgctctgggatccgtcatcgaagcgtccctgcggccgctgcgccgtgaaaaccagctgctgcagccgcagaggcagccggaggcagaggggcggcgggcaggaccagacagggctgggcagggggctggccgagcgccgtgcgccgcttgggagaaggccggaagcttaccagccgagaaggaattcctagctagcttcagagccgggtaggtttgcctgggaccttgtaggccggctgtgggggactccccgggtcgcacagccccattgtttgcatattgcccgagcaggccacggtggcctgcgcgccccaggactcgcaagcagctccgatcggttggaactcggggcggcggcagcagcgctgagccggcctggatgaggagatgcagcttcctgcaggggccaaggaaggatctggggacaaactgtccggaactctgggccagggaggcgagaaggagagagagaggaagagccgaggcagatggaggactttggccacaactgccatgtactcaagagtagaaccgagtgggtaatgggtcgctttgctttttgtcttggcagtgcctccggagccagcgtggtggccatagacaacaagatcgaacaggccatggatctggtgaagaatcatctgatgtatgctgtgagagaggaggtggagatcctgaaggagcagatccgagagctggtggagaagaactcccagctagagcgtgagaacaccctgttgaagaccctggcaagcccagagcagctggagaagttccagtcctgtctgagccctgaagagccagctcccgaatccccacaagtgcccgaggcccctggtggttctgcggtgtaagtggctctgtcctcagggtgggcagagccactaaacttgttttacctagttctttccagtttgtttttggctccccaagcatcatctcacgaggagaactttacacctagcacagctggtgccaagagatgtcctaaggacatggccacctgggtccactccagcgacagacccctgacaagagcaggtctctggaggctgagttgcatggggcctagtaacaccaagccagtgagcctctaatgctactgcgccctgggggctcccagggcctgggcaacttagctgcaactggcaaaggagaagggtagtttgaggtgtgacaccagtttgctccagaaagtttaaggggtctgtttctcatctccatggacatcttcaacagcttcacctgacaacgactgttcctatgaagaagccacttgtgttttaagcagaggcaacctctctcttctcctctgtttcgtgaaggcaggggacacagatgggagagattgagccaagtcagccttctgttggttaatatggtataatgcatggctttgtgcacagcccagtgtgggattacagctttgggatgaccgcttacaaagttctgtttggttagtattggcatagtttttctatatagccataaatgcgtatatatacccatagggctagatctgtatcttagtgtagcgatgtatacatatacacatccacctacatgttgaagggcctaaccagccttgggagtattgactggtcccttacctcttatggctaagtctttgactgtgttcatttaccaagttgacccagtttgtcttttaggttaagtaagactcgagagtaaaggcaaggaggggggccagcctctgaatgcggccacggatgccttgctgctgcaaccctttccccagctgtccactgaaacgtgaagtcctgttttgaatgccaaacccaccattcactggtgctgactacatagaatggggttgagagaagatcagtttgggcttcacagtgtcatttgaaaacgttttttgttttgttttgtaattattgtggaaaactttcaagtgaacagaaggatggtgtcctactgtggatgagggatgaacaaggggatggctttgatccaatggagcctgggaggtgtgcccagaaagcttgtctgtagcgggttttgtgagagtgaacactttccactttttgacaccttatcctgatgtatggttccaggatttggattttgattttccaaatgtagcttgaaatttcaataaactttgctctgtttttctaaaaataaa

SEQ ID NO: 447334 - DNA, 2156 bp, Homo sapiens
ccttatggccggatccggcctttatggcacgaacagtgccccccccccccgacatctattgaaagggtaacgacagacggagatcaactaaggtggcaggtaaggttcagaaaaggagaaggacaacaaatttggagaaataggagaagcttgtcttttccaggcaccctggagtcccctcaggccagctcggtgggcgcgcacctgccagccgcccctgacctcgcaggccaggcgacctccgagcctgagaagatggcccagtccaagctcgattgccgctcacctgtcggcctcgactgctgcaactgctgcctggacctggcccatcggagtgggctccagcgaggcagcagcggggagaacaacaacccgggcagccctacagtgagcaactttcggcagctgcaggaaaagctggtctttgagaacctcaataccgacaagctcaacagcataatgcggcaggattcgctagagccggtgctgcgggacccctgctacctgatcaacgagggcatctgcaaccgcaacatcgaccagaccatgctctccatcctgctcttcttccacagtgcctccggagccagcgtggtggccatagacaacaagatcgaacaggccatggatctggtgaagaatcatctgatgtatgctgtgagagaggaggtggagatcctgaaggagcagatccgagagctggtggagaagaactcccagctagagcgtgagaacaccctgttgaagaccctggcaagcccagagcagctggagaagttccagtcctgtctgagccctgaagagccagctcccgaatccccacaagtgcccgaggcccctggtggttctgcggtgtaagtggctctgtcctcagggtgggcagagccactaaacttgttttacctagttctttccagtttgtttttggctccccaagcatcatctcacgaggagaactttacacctagcacagctggtgccaagagatgtcctaaggacatggccacctgggtccactccagcgacagacccctgacaagagcaggtctctggaggctgagttgcatggggcctagtaacaccaagccagtgagcctctaatgctactgcgccctgggggctcccagggcctgggcaacttagctgcaactggcaaaggagaagggtagtttgaggtgtgacaccagtttgctccagaaagtttaaggggtctgtttctcatctccatggacatcttcaacagcttcacctgacaacgactgttcctatgaagaagccacttgtgttttaagcagaggcaacctctctcttctcctctgtttcgtgaaggcaggggacacagatgggagagattgagccaagtcagccttctgttggttaatatggtataatgcatggctttgtgcacagcccagtgtgggattacagctttgggatgaccgcttacaaagttctgtttggttagtattggcatagtttttctatatagccataaatgcgtatatatacccatagggctagatctgtatcttagtgtagcgatgtatacatatacacatccacctacatgttgaagggcctaaccagccttgggagtattgactggtcccttacctcttatggctaagtctttgactgtgttcatttaccaagttgacccagtttgtcttttaggttaagtaagactcgagagtaaaggcaaggaggggggccagcctctgaatgcggccacggatgccttgctgctgcaaccctttccccagctgtccactgaaacgtgaagtcctgttttgaatgccaaacccaccattcactggtgctgactacatagaatggggttgagagaagatcagtttgggcttcacagtgtcatttgaaaacgttttttgttttgttttgtaattattgtggaaaactttcaagtgaacagaaggatggtgtcctactgtggatgagggatgaacaaggggatggctttgatccaatggagcctgggaggtgtgcccagaaagcttgtctgtagcgggttttgtgagagtgaacactttccactttttgacaccttatcctgatgtatggttccaggatttggattttgattttccaaatgtagcttgaaatttcaataaactttgctctgtttttctaaaaataaa

SEQ ID NO: 447335 - DNA, 2263 bp, Homo sapiens
  misc_feature (5)..(5): n is a, c, g, or t
aacanagctggctggtacggtccggcattcccgggctggcggccgtggagtttgtgacatacgaggtgacacccctcgagtcacttcccttcaactccagctggagcgcctgcttggctttgggttcgttctgcagccttcgccccgctcctagcctcagggccggactccagcgcagagcccagcccagcgcagcctgccagcagccacccagccgcccagccgcccagccccgcacgaaacccggccagagcttcctagcagcccgagccatgaacaccgaaatgtatcagacccccatggaggtggcggtctaccagctgcacaatttctccatctccttcttctcttctctgcttggaggggatgtggtttccgttaagctggacaacaggtaaccgctggccccagctccggcgcctcccgagccggggcgccggccggagctgggctaggagcccggtctctgagcgagctgtgtgccgccggtccctgttccccgcggtgcagcatcctgggaaggggcgggggggaggggacgcaggaaggggggggtcaccgccgctctgggatccgtcatcgaagcgtccctgcggccgctgcgccgtgaaaaccagctgctgcagccgcagaggcagccggaggcagaggggcggcgggcaggaccagacagggctgggcagggggctggccgagcgccgtgcgccgcttgggagaaggccggaagcttaccagccgagaaggaattcctagctagcttcagagccggtgcctccggagccagcgtggtggccatagacaacaagatcgaacaggccatggatctggtgaagaatcatctgatgtatgctgtgagagaggaggtggagatcctgaaggagcagatccgagagctggtggagaagaactcccagctagagcgtgagaacaccctgttgaagaccctggcaagcccagagcagctggagaagttccagtcctgtctgagccctgaagagccagctcccgaatccccacaagtgcccgaggcccctggtggttctgcggtgtaagtggctctgtcctcagggtgggcagagccactaaacttgttttacctagttctttccagtttgtttttggctccccaagcatcatctcacgaggagaactttacacctagcacagctggtgccaagagatgtcctaaggacatggtgagcctctaatgctactgcgccctgggggctcccagggcctgggcaacttagctgcaactggcaaaggagaagggtagtttgaggtgtgacaccagtttgctccagaaagtttaaggggtctgtttctcatctccatggacatcttcaacagcttcacctgacaacgactgttcctatgaagaagccacttgtgttttaagcagaggcaacctctctcttctcctctgtttcgtgaaggcaggggacacagatgggagagattgagccaagtcagccttctgttggttaatatggtataatgcatggctttgtgcacagcccagtgtgggattacagctttgggatgaccgcttacaaagttctgtttggttagtattggcatagtttttctatatagccataaatgcgtatatatacccatagggctagatctgtatcttagtgtagcgatgtatacatatacacatccacctacatgttgaagggcctaaccagccttgggagtattgactggtcccttacctcttatggctaagtctttgactgtgttcatttaccaagttgacccagtttgtcttttaggttaagtaagactcgagagtaaaggcaaggaggggggccagcctctgaatgcggccacggatgccttgctgctgcaaccctttccccagctgtccactgaaacgtgaagtcctgttttgaatgccaaacccaccattcactggtgctgactacatagaatggggttgagagaagatcagtttgggcttcacagtgtcatttgaaaacgttttttgttttgttttgtaattattgtggaaaactttcaagtgaacagaaggatggtgtcctactgtggatgagggatgaacaaggggatggctttgatccaatggagcctgggaggtgtgcccagaaagcttgtctgtagcgggttttgtgagagtgaacactttccactttttgacaccttatcctgatgtatggttccaggatttggattttgattttccaaatgtagcttgaaatttcaataaactttgctctgtttttctaaaaataaa

SEQ ID NO: 447336 - DNA, 1254 bp, Homo sapiens
ataaagtcaaattcagcatatgtttttatttttaggcttgacttttacaagacattaatctccatttgtaaatatctttcaaagactcaggtggtgtgcacccacctgggtccactccagcgacagacccctgacaagagcaggtctctggaggctgagttgcatggggcctagtaacaccaagccagtgagcctctaatgctactgcgccctgggggctcccagggcctgggcaacttagctgcaactggcaaaggagaagggtagtttgaggtgtgacaccagtttgctccagaaagtttaaggggtctgtttctcatctccatggacatcttcaacagcttcacctgacaacgactgttcctatgaagaagccacttgtgttttaagcagaggcaacctctctcttctcctctgtttcgtgaaggcaggggacacagatgggagagattgagccaagtcagccttctgttggttaatatggtataatgcatggctttgtgcacagcccagtgtgggattacagctttgggatgaccgcttacaaagttctgtttggttagtattggcatagtttttctatatagccataaatgcgtatatatacccatagggctagatctgtatcttagtgtagcgatgtatacatatacacatccacctacatgttgaagggcctaaccagccttgggagtattgactggtcccttacctcttatggctaagtctttgactgtgttcatttaccaagttgacccagtttgtcttttaggttaagtaagactcgagagtaaaggcaaggaggggggccagcctctgaatgcggccacggatgccttgctgctgcaaccctttccccagctgtccactgaaacgtgaagtcctgttttgaatgccaaacccaccattcactggtgctgactacatagaatggggttgagagaagatcagtttgggcttcacagtgtcatttgaaaacgttttttgttttgttttgtaattattgtggaaaactttcaagtgaacagaaggatggtgtcctactgtggatgagggatgaacaaggggatggctttgatccaatggagcctgggaggtgtgcccagaaagcttgtctgtagcgggttttgtgagagtgaacactttccactttttgacaccttatcctgatgtatggttccaggatttggattttgattttccaaatgtagcttgaaatttcaataaactttgctctgtttttctaaaaataaa

SEQ ID NO: 447337 - DNA, 1344 bp, Homo sapiens
  misc_feature (5)..(5): n is a, c, g, or t
aacanagctggctggtacggtccggcattcccgggctggcggccgtggagtttgtgacatacgaggtgacacccctcgagtcacttcccttcaactccagctggagcgcctgcttggctttgggttcgttctgcagccttcgccccgctcctagcctcagggccggactccagcgcagagcccagcccagcgcagcctgccagcagccacccagccgcccagccgcccagccccgcacgaaacccggccagagcttcctagcagcccgagccatgaactgagcctctaatgctactgcgccctgggggctcccagggcctgggcaacttagctgcaactggcaaaggagaagggtagtttgaggtgtgacaccagtttgctccagaaagtttaaggggtctgtttctcatctccatggacatcttcaacagcttcacctgacaacgactgttcctatgaagaagccacttgtgttttaagcagaggcaacctctctcttctcctctgtttcgtgaaggcaggggacacagatgggagagattgagccaagtcagccttctgttggttaatatggtataatgcatggctttgtgcacagcccagtgtgggattacagctttgggatgaccgcttacaaagttctgtttggttagtattggcatagtttttctatatagccataaatgcgtatatatacccatagggctagatctgtatcttagtgtagcgatgtatacatatacacatccacctacatgttgaagggcctaaccagccttgggagtattgactggtcccttacctcttatggctaagtctttgactgtgttcatttaccaagttgacccagtttgtcttttaggttaagtaagactcgagagtaaaggcaaggaggggggccagcctctgaatgcggccacggatgccttgctgctgcaaccctttccccagctgtccactgaaacgtgaagtcctgttttgaatgccaaacccaccattcactggtgctgactacatagaatggggttgagagaagatcagtttgggcttcacagtgtcatttgaaaacgttttttgttttgttttgtaattattgtggaaaactttcaagtgaacagaaggatggtgtcctactgtggatgagggatgaacaaggggatggctttgatccaatggagcctgggaggtgtgcccagaaagcttgtctgtagcgggttttgtgagagtgaacactttccactttttgacaccttatcctgatgtatggttccaggatttggattttgattttccaaatgtagcttgaaatttcaataaactttgctctgtttttctaaaaataaa

SEQ ID NO: 447338 - DNA, 2190 bp, Homo sapiens
  misc_feature (5)..(5): n is a, c, g, or t
aacanagctggctggtacggtccggcattcccgggctggcggccgtggagtttgtgacatacgaggtgacacccctcgagtcacttcccttcaactccagctggagcgcctgcttggctttgggttcgttctgcagccttcgccccgctcctagcctcagggccggactccagcgcagagcccagcccagcgcagcctgccagcagccacccagccgcccagccgcccagccccgcacgaaacccggccagagcttcctagcagcccgagccatgaacaccgaaatgtatcagacccccatggaggtggcggtctaccagctgcacaatttctccatctccttcttctcttctctgcttggaggggatgtggtttccgttaagctggacaacaggtaaccgctggccccagctccggcgcctcccgagccggggcgccggccggagctgggctaggagcccggtctctgagcgagctgtgtgccgccggtccctgttccccgcggtgcagcatcctgggaaggggcgggggggaggggacgcaggaaggggggggtcaccgccgctctgggatccgtcatcgaagcgtccctgcggccgctgcgccgtgaaaaccagctgctgcagccgcagaggcagccggaggcagaggggcggcgggcaggaccagacagggctgggcagggggctggccgagcgccgtgcgccgcttgggagaaggccggaagcttaccagccgagaaggaattcctagctagcttcagagccgggtaggtttgcctgggaccttgtaggccggctgtgggggactccccgggtcgcacagccccattgtttgcatattgcccgagcaggccacggtggcctgcgcgccccaggactcgcaagcagctccgatcggttggaactcggggcggcggcagcagcgctgagccggcctggatgaggagatgcagcttcctgcaggggccaaggaaggatctggggacaaactgtccggaactctgggccagggaggcgagaaggagagagagaggaagagccgaggcagatggaggactttggccacaactgccatgtactcaagagtagaaccgagtgggtaatgggtcgctttgctttttgtcttggcagtgcctccggagccagcgtggtggccatagacaacaagatcgaacaggccatggatctggtgaagaatcatctgatgtatgctgtgagagaggaggtggagatcctgaaggagcagatccgagagctggtggagaagaactcccacttcacctgacaacgactgttcctatgaagaagccacttgtgttttaagcagaggcaacctctctcttctcctctgtttcgtgaaggcaggggacacagatgggagagattgagccaagtcagccttctgttggttaatatggtataatgcatggctttgtgcacagcccagtgtgggattacagctttgggatgaccgcttacaaagttctgtttggttagtattggcatagtttttctatatagccataaatgcgtatatatacccatagggctagatctgtatcttagtgtagcgatgtatacatatacacatccacctacatgttgaagggcctaaccagccttgggagtattgactggtcccttacctcttatggctaagtctttgactgtgttcatttaccaagttgacccagtttgtcttttaggttaagtaagactcgagagtaaaggcaaggaggggggccagcctctgaatgcggccacggatgccttgctgctgcaaccctttccccagctgtccactgaaacgtgaagtcctgttttgaatgccaaacccaccattcactggtgctgactacatagaatggggttgagagaagatcagtttgggcttcacagtgtcatttgaaaacgttttttgttttgttttgtaattattgtggaaaactttcaagtgaacagaaggatggtgtcctactgtggatgagggatgaacaaggggatggctttgatccaatggagcctgggaggtgtgcccagaaagcttgtctgtagcgggttttgtgagagtgaacactttccactttttgacaccttatcctgatgtatggttccaggatttggattttgattttccaaatgtagcttgaaatttcaataaactttgctctgtttttctaaaaataaa

SEQ ID NO: 447339 - DNA, 870 bp, Homo sapiens
ctcaatctctcccatctgtgtcccctgccttcacgaaacagaggagaagagagaggttgcctctgcttaaaacacaagtggcttctgttggttaatatggtataatgcatggctttgtgcacagcccagtgtgggattacagctttgggatgaccgcttacaaagttctgtttggttagtattggcatagtttttctatatagccataaatgcgtatatatacccatagggctagatctgtatcttagtgtagcgatgtatacatatacacatccacctacatgttgaagggcctaaccagccttgggagtattgactggtcccttacctcttatggctaagtctttgactgtgttcatttaccaagttgacccagtttgtcttttaggttaagtaagactcgagagtaaaggcaaggaggggggccagcctctgaatgcggccacggatgccttgctgctgcaaccctttccccagctgtccactgaaacgtgaagtcctgttttgaatgccaaacccaccattcactggtgctgactacatagaatggggttgagagaagatcagtttgggcttcacagtgtcatttgaaaacgttttttgttttgttttgtaattattgtggaaaactttcaagtgaacagaaggatggtgtcctactgtggatgagggatgaacaaggggatggctttgatccaatggagcctgggaggtgtgcccagaaagcttgtctgtagcgggttttgtgagagtgaacactttccactttttgacaccttatcctgatgtatggttccaggatttggattttgattttccaaatgtagcttgaaatttcaataaactttgctctgtttttctaaaaataaa

SEQ ID NO: 447340 - DNA, 928 bp, Homo sapiens
  misc_feature (30)..(30): n is a, c, g, or t
  misc_feature (65)..(65): n is a, c, g, or t
  misc_feature (76)..(76): n is a, c, g, or t
  misc_feature (79)..(79): n is a, c, g, or t
  misc_feature (83)..(83): n is a, c, g, or t
  misc_feature (92)..(92): n is a, c, g, or t
  misc_feature (103)..(103): n is a, c, g, or t
  misc_feature (110)..(110): n is a, c, g, or t
  misc_feature (114)..(114): n is a, c, g, or t
  misc_feature (119)..(119): n is a, c, g, or t
  misc_feature (124)..(124): n is a, c, g, or t
  misc_feature (127)..(127): n is a, c, g, or t
  misc_feature (134)..(134): n is a, c, g, or t
  misc_feature (139)..(139): n is a, c, g, or t
  misc_feature (157)..(157): n is a, c, g, or t
  misc_feature (170)..(170): n is a, c, g, or t
  misc_feature (173)..(173): n is a, c, g, or t
  misc_feature (210)..(210): n is a, c, g, or t
  misc_feature (232)..(232): n is a, c, g, or t
  misc_feature (236)..(236): n is a, c, g, or t
  misc_feature (268)..(268): n is a, c, g, or t
  misc_feature (271)..(271): n is a, c, g, or t
  misc_feature (275)..(275): n is a, c, g, or t
  misc_feature (307)..(307): n is a, c, g, or t
  misc_feature (319)..(319): n is a, c, g, or t
  misc_feature (324)..(324): n is a, c, g, or t
  misc_feature (336)..(336): n is a, c, g, or t
  misc_feature (352)..(352): n is a, c, g, or t
cgttgaaaggtcatggggaacaacaggatngggaagaagatttgagcctcaattccaggctcttntgtttgtgttnaantatnggtaatatntgtcattggtnttttgtngcancagtnttcanttnttggganttttntcagtcttttggggatgnatctcgcctttancanaatgttcctgcttttggtttaggtatttgggcattangtttttttctaattatatgtcncatnaatatggcggtattattattatccacattagnggnttangatgctgttatgctttagttgttaggcgattntattatcatatntcttnttctcttccttnattttgtatatgttgntctatccatgtgggagtattgactggtcccttacctcttatggctaagtctttgactgtgttcatttaccaagttgacccagtttgtcttttaggttaagtaagactcgagagtaaaggcaaggaggggggccagcctctgaatgcggccacggatgccttgctgctgcaaccctttccccagctgtccactgaaacgtgaagtcctgttttgaatgccaaacccaccattcactggtgctgactacatagaatggggttgagagaagatcagtttgggcttcacagtgtcatttgaaaacgttttttgttttgttttgtaattattgtggaaaactttcaagtgaacagaaggatggtgtcctactgtggatgagggatgaacaaggggatggctttgatccaatggagcctgggaggtgtgcccagaaagcttgtctgtagcgggttttgtgagagtgaacactttccactttttgacaccttatcctgatgtatggttccaggatttggattttgattttccaaatgtagcttgaaatttcaataaactttgctctgtttttctaaaaataaa

SEQ ID NO: 447341 - DNA, 634 bp, Homo sapiens
atttttagaaaaacagagcaaagtttattgaaatttcaagctacatttggaaaatcaaaatccaaatccgggagtattgactggtcccttacctcttatggctaagtctttgactgtgttcatttaccaagttgacccagtttgtcttttaggttaagtaagactcgagagtaaaggcaaggaggggggccagcctctgaatgcggccacggatgccttgctgctgcaaccctttccccagctgtccactgaaacgtgaagtcctgttttgaatgccaaacccaccattcactggtgctgactacatagaatggggttgagagaagatcagtttgggcttcacagtgtcatttgaaaacgttttttgttttgttttgtaattattgtggaaaactttcaagtgaacagaaggatggtgtcctactgtggatgagggatgaacaaggggatggctttgatccaatggagcctgggaggtgtgcccagaaagcttgtctgtagcgggttttgtgagagtgaacactttccactttttgacaccttatcctgatgtatggttccaggatttggattttgattttccaaatgtagcttgaaatttcaataaactttgctctgtttttctaaaaataaa

SEQ ID NO: 447342 - DNA, 1892 bp, Homo sapiens
  misc_feature (5)..(5): n is a, c, g, or t
aacanagctggctggtacggtccggcattcccgggctggcggccgtggagtttgtgacatacgaggtgacacccctcgagtcacttcccttcaactccagctggagcgcctgcttggctttgggttcgttctgcagccttcgccccgctcctagcctcagggccggactccagcgcagagcccagcccagcgcagcctgccagcagccacccagccgcccagccgcccagccccgcacgaaacccggccagagcttcctagcagcccgagccatgaacaccgaaatgtatcagacccccatggaggtggcggtctaccagctgcacaatttctccatctccttcttctcttctctgcttggaggggatgtggtttccgttaagctggacaacagtgcctccggagccagcgtggtggccatagacaacaagatcgaacaggccatggatctggtgaagaatcatctgatgtatgctgtgagagaggaggtggagatcctgaaggagcagatccgagagctggtggagaagaactcccagctagagcgtgagaacaccctgttgaagaccctggcaagcccagagcagctggagaagttccagtcctgtctgagccctgaagagccagctcccgaatccccacaagtgcccgaggcccctggtggttctgcggtgtaagtggctctgtcctcagggtgggcagagccactaaacttgttttacctagttctttccagtttgtttttggctccccaagcatcatctcacgaggagaactttacacctagcacagctggtgccaagagatgtcctaaggacatggccacctgggtccactccagcgacagacccctgacaagagcaggtctctggaggctgagttgcatggggcctagtaacaccaagccagtgagcctctaatgctactgcgccctgggggctcccagggcctgggcaacttagctgcaactggcaaaggagaagggtagtttgaggtgtgacaccagtttgctccagaaagtttaaggggtctgtttctcatctccatggacatcttcaacagcttcacctgacaacgactgttcctatgaagaagccacttgtgttttaagcagaggcaacctctctcttctcctctgtttcgtgaaggcaggggacacagatgggagagattgagccaagtcagccttctgttggttaatatggtataatgcatggctttgtgcacagcccagtgtgggattacagctttgggatgaccgcttacaaagttctgtttggttagtattggcatagtttttctatatagccataaatgcgtatatatacccatagggctagatctgtatcttagtgtagcgatgtatacatatacacatccacctacatgttgaagggcctaaccagccttgggagtattgactggtcccttacctcttatggctaagtctttgactgtgttcatttaccaagttgacccagtttgtcttttaggttaagtaagactcgagagtaaaggcaaggaggggggccagcctctgaatgcggccacggatgccttgctgctgcaaccctttccccagctgtccactgaaacgtgaagtcctgttttgaatgccaaacccaccattcactggtgctgactacatagaatggggttgagagaagatcagtttgggcttcacagtgtcatttgaaaacgttttttgttttgttttgtaattattgtggaagggaaggcttttgatcacatggcacctgggacgcttccccaaacgcttgtcctgaacggccttgtgagattgacaccctccaccttgtagcctttaccccggcgtttcttccggacttgcatcttgccctctgcacgactttaccactccacagctcccg

SEQ ID NO: 447343 - DNA, 788 bp, Homo sapiens
agcaggagccaaaatatctccgagtctgggttggactggcggccgtggagtttgtgacatacgaggtgacacccctcgagtcacttcccttcaactccagctggagcgcctgcttggctttgggttcgttctgcagccttcgccccgctcctagcctcagggccggactccagcgcagagcccagcccagcgcagcctgccagcagccacccagccgcccagccgcccagccccgcacgaaacccggccagagcttcctagcagcccgagccatgaacaccgaaatgtatcagacccccatggaggtggcggtctaccagctgcacaatttctccatctccttcttctcttctctgcttggaggggatgtggtttccgttaagctggacaacagtgcctccggagccagcgtggtggccatagacaacaagatcgaacaggccatggatctggtgaagaatcatctgatgtatgctgtgagagaggaggtggagatcctgaaggagcagatccgagagctggtggagaagaactcccagctagagcgtgagaacaccctgttgaagaccctggcaagcccagagcagctggagaagttccagtcctgtctgagccctgaagagccagctcccgaatccccacaagtgcccgaggcccctggtggttctgcgcttggtccttctgccctccaggtggccatacgccctataccttggcttcaccagccctttcccagtcgctcctccctccccagcctcattccccgaggggactctacccctctccct

SEQ ID NO: 447344 - DNA, 437 bp, Homo sapiens
atctggggacaaactgtccggaactctgggccagggaggcgagaaggagagagagaggaagagccgaggcagatggaggactttggccacaactgccatgtactcaagagtagaaccgagtgggtaatgggtcgctttgctttttgtcttggcagtgcctccggagccagcgtggtggccatagacaacaagatcgaacaggccatggtgagtggcatcactgcgtcattctcatcccctgacttagctgctgcttatgtaactctgggcaggattgagggaatgggtgaaaaagcccttagccaaaaccctgaggaagccgacagcctgcctcctatccgcactggaggtggagtctgattagagtggcaccttttagggcatttccagtcttcccttcctgggctccctcctttcttcctccctcctccatctca

SEQ ID NO: 447345 - DNA, 420 bp, Homo sapiens
tccctgcggccgctgcgccgtgaaaaccagctgctgcagccgcagaggcagccggaggcagaggggcggcgggcaggaccagacagggctgggcagggggctggccgagcgccgtgcgccgcttgggagaaggccggaagcttaccagccgagaaggaattcctagctagcttcagagccgggtaggtttgcctgggaccttgtaggccggctgtgggggactccccgggtcgcacagccccattgtttgcatattgcccgagcaggccacggtggcctgcgcgccccaggactcgcaagcagctccgatcggttggaactcggggcggcggcagcagcgctgagccggcctggatgaggagatgcagcttcctgcaggggccaaggaaggatctggggacaaactgtccggaactctgg

SEQ ID NO: 447346 - DNA, 1975 bp, Homo sapiens
agcaggagccaaaatatctccgagtctgggttggactggcggccgtggagtttgtgacatacgaggtgacacccctcgagtcacttcccttcaactccagctggagcgcctgcttggctttgggttcgttctgcagccttcgccccgctcctagcctcagggccggactccagcgcagagcccagcccagcgcagcctgccagcagccacccagccgcccagccgcccagccccgcacgaaacccggccagagcttcctagcagcccgagccatgaacaccgaaatgtatcagacccccatggaggtggcggtctaccagctgcacaatttctccatctccttcttctcttctctgcttggaggggatgtggtttccgttaagctggacaacagtgcctccggagccagcgtggtggccatagacaacaagatcgaacaggccatggatctggtgaagaatcatctgatgtatgctgtgagagaggaggtggagatcctgaaggagcagatccgagagctggtggagaagaactcccagctagagcgtgagaacaccctgttgaagaccctggcaagcccagagcagctggagaagttccagtcctgtctgagccctgaagagccagctcccgaatccccacaagtgcccgaggcccctggtggttctgcggtgtaagtggctctgtcctcagggtgggcagagccactaaacttgttttacctagttctttccagtttgtttttggctccccaagcatcatctcacgaggagaactttacacctagcacagctggtgccaagagatgtcctaaggacatggccacctgggtccactccagcgacagacccctgacaagagcaggtctctggaggctgagttgcatggggcctagtaacaccaagccagtgagcctctaatgctactgcgccctgggggctcccagggcctgggcaacttagctgcaactggcaaaggagaagggtagtttgaggtgtgacaccagtttgctccagaaagtttaaggggtctgtttctcatctccatggacatcttcaacagcttcacctgacaacgactgttcctatgaagaagccacttgtgttttaagcagaggcaacctctctcttctcctctgtttcgtgaaggcaggggacacagatgggagagattgagccaagtcagccttctgttggttaatatggtataatgcatggctttgtgcacagcccagtgtgggattacagctttgggatgaccgcttacaaagttctgtttggttagtattggcatagtttttctatatagccataaatgcgtatatatacccatagggctagatctgtatcttagtgtagcgatgtatacatatacacatccacctacatgttgaagggcctaaccagccttgggagtattgactggtcccttacctcttatggctaagtctttgactgtgttcatttaccaagttgacccagtttgtcttttaggttaagtaagactcgagagtaaaggcaaggaggggggccagcctctgaatgcggccacggatgccttgctgctgcaaccctttccccagctgtccactgaaacgtgaagtcctgttttgaatgccaaacccaccattcactggtgctgactacatagaatggggttgagagaagatcagtttgggcttcacagtgtcatttgaaaacgttttttgttttgttttgtaattattgtggaaaactttcaagtgaacagaaggatggtgtcctactgtggatgagggatgaacaaggggatggctttgatccaatggagcctgggaggtgtgcccagaaagcttgtctgtagcgggttttgtgagagtgaacactttccactttttgacaccttatcctgatgtatggttccaggatttggattttgattttccaaatgtagcttgaaatttcaataaactttgctctgtttttctaaaaataaa

SEQ ID NO: 447347 - DNA, 2165 bp, Homo sapiens
gctaggaggaggcgcgggttaatcggcaacgagggaaggatccgctcggagctgtttgtccagctgtttctattcgcacccggagcagtacagccagaagggggccgagccgaaggtggctggctttaggcgctaatttccaactcttttcctcacagcttgtcttttccaggcaccctggagtcccctcaggccagctcggtgggcgcgcacctgccagccgcccctgacctcgcaggccaggcgacctccgagcctgagaagatggcccagtccaagctcgattgccgctcacctgtcggcctcgactgctgcaactgctgcctggacctggcccatcggagtgggctccagcgaggcagcagcggggagaacaacaacccgggcagccctacagtgagcaactttcggcagctgcaggaaaagctggtctttgagaacctcaataccgacaagctcaacagcataatgcggcaggattcgctagagccggtgctgcgggacccctgctacctgatcaacgagggcatctgcaaccgcaacatcgaccagaccatgctctccatcctgctcttcttccacagtgcctccggagccagcgtggtggccatagacaacaagatcgaacaggccatggatctggtgaagaatcatctgatgtatgctgtgagagaggaggtggagatcctgaaggagcagatccgagagctggtggagaagaactcccagctagagcgtgagaacaccctgttgaagaccctggcaagcccagagcagctggagaagttccagtcctgtctgagccctgaagagccagctcccgaatccccacaagtgcccgaggcccctggtggttctgcggtgtaagtggctctgtcctcagggtgggcagagccactaaacttgttttacctagttctttccagtttgtttttggctccccaagcatcatctcacgaggagaactttacacctagcacagctggtgccaagagatgtcctaaggacatggccacctgggtccactccagcgacagacccctgacaagagcaggtctctggaggctgagttgcatggggcctagtaacaccaagccagtgagcctctaatgctactgcgccctgggggctcccagggcctgggcaacttagctgcaactggcaaaggagaagggtagtttgaggtgtgacaccagtttgctccagaaagtttaaggggtctgtttctcatctccatggacatcttcaacagcttcacctgacaacgactgttcctatgaagaagccacttgtgttttaagcagaggcaacctctctcttctcctctgtttcgtgaaggcaggggacacagatgggagagattgagccaagtcagccttctgttggttaatatggtataatgcatggctttgtgcacagcccagtgtgggattacagctttgggatgaccgcttacaaagttctgtttggttagtattggcatagtttttctatatagccataaatgcgtatatatacccatagggctagatctgtatcttagtgtagcgatgtatacatatacacatccacctacatgttgaagggcctaaccagccttgggagtattgactggtcccttacctcttatggctaagtctttgactgtgttcatttaccaagttgacccagtttgtcttttaggttaagtaagactcgagagtaaaggcaaggaggggggccagcctctgaatgcggccacggatgccttgctgctgcaaccctttccccagctgtccactgaaacgtgaagtcctgttttgaatgccaaacccaccattcactggtgctgactacatagaatggggttgagagaagatcagtttgggcttcacagtgtcatttgaaaacgttttttgttttgttttgtaattattgtggaaaactttcaagtgaacagaaggatggtgtcctactgtggatgagggatgaacaaggggatggctttgatccaatggagcctgggaggtgtgcccagaaagcttgtctgtagcgggttttgtgagagtgaacactttccactttttgacaccttatcctgatgtatggttccaggatttggattttgattttccaaatgtagcttgaaatttcaataaactttgctctgtttttctaaaaataaa

SEQ ID NO: 447348 - DNA, 2098 bp, Homo sapiens
  misc_feature (5)..(5): n is a, c, g, or t
aacanagctggctggtacggtccggcattcccgggctggcggccgtggagtttgtgacatacgaggtgacacccctcgagtcacttcccttcaactccagctggagcgcctgcttggctttgggttcgttctgcagccttcgccccgctcctagcctcagggccggactccagcgcagagcccagcccagcgcagcctgccagcagccacccagccgcccagccgcccagccccgcacgaaacccggccagagcttcctagcagcccgagccatgaacaccgaaatgtatcagacccccatggaggtggcggtctaccagctgcacaatttctccatctccttcttctcttctctgcttggaggggatgtggtttccgttaagctggacaacaggtaaccgctggccccagctccggcgcctcccgagccggggcgccggccggagctgggctaggagcccggtctctgagcgagctgtgtgccgccggtccctgttccccgcggtgcagcatcctgggaaggggcgggggggaggggacgcaggaaggggggggtcaccgccgctctgggatccgtcatcgaagcgtccctgcggccgctgcgccgtgaaaaccagctgctgcagccgcagaggcagccggaggcagaggggcggcgggcaggaccagacagggctgggcagggggctggccgagcgccgtgcgccgcttgggagaagttccagtcctgtctgagccctgaagagccagctcccgaatccccacaagtgcccgaggcccctggtggttctgcggtgtaagtggctctgtcctcagggtgggcagagccactaaacttgttttacctagttctttccagtttgtttttggctccccaagcatcatctcacgaggagaactttacacctagcacagctggtgccaagagatgtcctaaggacatggccacctgggtccactccagcgacagacccctgacaagagcaggtctctggaggctgagttgcatggggcctagtaacaccaagccagtgagcctctaatgctactgcgccctgggggctcccagggcctgggcaacttagctgcaactggcaaaggagaagggtagtttgaggtgtgacaccagtttgctccagaaagtttaaggggtctgtttctcatctccatggacatcttcaacagcttcacctgacaacgactgttcctatgaagaagccacttgtgttttaagcagaggcaacctctctcttctcctctgtttcgtgaaggcaggggacacagatgggagagattgagccaagtcagccttctgttggttaatatggtataatgcatggctttgtgcacagcccagtgtgggattacagctttgggatgaccgcttacaaagttctgtttggttagtattggcatagtttttctatatagccataaatgcgtatatatacccatagggctagatctgtatcttagtgtagcgatgtatacatatacacatccacctacatgttgaagggcctaaccagccttgggagtattgactggtcccttacctcttatggctaagtctttgactgtgttcatttaccaagttgacccagtttgtcttttaggttaagtaagactcgagagtaaaggcaaggaggggggccagcctctgaatgcggccacggatgccttgctgctgcaaccctttccccagctgtccactgaaacgtgaagtcctgttttgaatgccaaacccaccattcactggtgctgactacatagaatggggttgagagaagatcagtttgggcttcacagtgtcatttgaaaacgttttttgttttgttttgtaattattgtggaaaactttcaagtgaacagaaggatggtgtcctactgtggatgagggatgaacaaggggatggctttgatccaatggagcctgggaggtgtgcccagaaagcttgtctgtagcgggttttgtgagagtgaacactttccactttttgacaccttatcctgatgtatggttccaggatttggattttgattttccaaatgtagcttgaaatttcaataaactttgctctgtttttctaaaaataaa

SEQ ID NO: 447349 - DNA, 1888 bp, Homo sapiens
agcaggagccaaaatatctccgagtctgggttggactggcggccgtggagtttgtgacatacgaggtgacacccctcgagtcacttcccttcaactccagctggagcgcctgcttggctttgggttcgttctgcagccttcgccccgctcctagcctcagggccggactccagcgcagagcccagcccagcgcagcctgccagcagccacccagccgcccagccgcccagccccgcacgaaacccggccagagcttcctagcagcccgagccatgaacaccgaaatgtatcagacccccatggaggtggcggtctaccagctgcacaatttctccatctccttcttctcttctctgcttggaggggatgtggtttccgttaagctggacaacagtgcctccggagccagcgtggtggccatagacaacaagatcgaacaggccatggatctggtgaagaatcatctgatgtatgctgtgagagaggaggtggagatcctgaaggagcagatccgagagctggtggagaagaactcccagctagagcgtgagaacaccctgttgaagaccctggcaagcccagagcagctggagaagttccagtcctgtctgagccctgaagagccagctcccgaatccccacaagtgcccgaggcccctggtggttctgcggtgtaagtggctctgtcctcagggtgggcagagccactaaacttgttttacctagttctttccagtttgtttttggctccccaagcatcatctcacgaggagaactttacacctagcacagctggtgccaagagatgtcctaaggacatggtgagcctctaatgctactgcgccctgggggctcccagggcctgggcaacttagctgcaactggcaaaggagaagggtagtttgaggtgtgacaccagtttgctccagaaagtttaaggggtctgtttctcatctccatggacatcttcaacagcttcacctgacaacgactgttcctatgaagaagccacttgtgttttaagcagaggcaacctctctcttctcctctgtttcgtgaaggcaggggacacagatgggagagattgagccaagtcagccttctgttggttaatatggtataatgcatggctttgtgcacagcccagtgtgggattacagctttgggatgaccgcttacaaagttctgtttggttagtattggcatagtttttctatatagccataaatgcgtatatatacccatagggctagatctgtatcttagtgtagcgatgtatacatatacacatccacctacatgttgaagggcctaaccagccttgggagtattgactggtcccttacctcttatggctaagtctttgactgtgttcatttaccaagttgacccagtttgtcttttaggttaagtaagactcgagagtaaaggcaaggaggggggccagcctctgaatgcggccacggatgccttgctgctgcaaccctttccccagctgtccactgaaacgtgaagtcctgttttgaatgccaaacccaccattcactggtgctgactacatagaatggggttgagagaagatcagtttgggcttcacagtgtcatttgaaaacgttttttgttttgttttgtaattattgtggaaaactttcaagtgaacagaaggatggtgtcctactgtggatgagggatgaacaaggggatggctttgatccaatggagcctgggaggtgtgcccagaaagcttgtctgtagcgggttttgtgagagtgaacactttccactttttgacaccttatcctgatgtatggttccaggatttggattttgattttccaaatgtagcttgaaatttcaataaactttgctctgtttttctaaaaataaa

SEQ ID NO: 447350 - DNA, 1921 bp, Homo sapiens
  misc_feature (5)..(5): n is a, c, g, or t
aacanagctggctggtacggtccggcattcccgggctggcggccgtggagtttgtgacatacgaggtgacacccctcgagtcacttcccttcaactccagctggagcgcctgcttggctttgggttcgttctgcagccttcgccccgctcctagcctcagggccggactccagcgcagagcccagcccagcgcagcctgccagcagccacccagccgcccagccgcccagccccgcacgaaacccggccagagcttcctagcagcccgagccatgaacaccgaaatgtatcagacccccatggaggtggcggtctaccagctgcacaatttctccatctccttcttctcttctctgcttggaggggatgtggtttccgttaagctggacaacagtgcctccggagccagcgtggtggccatagacaacaagatcgaacaggccatggatctggtgaagaatcatctgatgtatgctgtgagagaggaggtggagatcctgaaggagcagatccgagagctggtggagaagaactcccagctagagcgtgagaacaccctgttgaagaccctggcaagcccagagcagctggagaagttccagtcctgtctgagccctgaagagccagctcccgaatccccacaagtgcccgaggcccctggtggttctgcggtgtaagtggctctgtcctcagggtgggcagagccactaaacttgttttacctagttctttccagtttgtttttggctccccaagcatcatctcacgaggagaactttacacctagcacagctggtgccaagagatgtcctaaggacatggccacctgggtccactccagcgacagacccctgacaagagcaggtctctggaggctgagttgcatggggcctagtaacaccaagccagtgagcctctaatgctactgcgccctgggggctcccagggcctgggcaacttagctgcaactggcaaaggagaagggtagtttgaggtgtgacaccagtttgctccagaaagtttaaggggtctgtttctcatctccatggacatcttcaacagcttcacctgacaacgactgttcctatgaagaagccacttgtgttttaagcagaggcaacctctctcttctcctctgtttcgtgaaggcaggggacacagatgggagagattgagccaagtcagccttctgttggttaatatggtataatgcatggctttgtgcacagcccagtgtgggattacagctttgggatgaccgcttacaaagttctgtttggttagtattggcatagtttttctatatagccataaatgcgtatatatacccatagggctagatctgtatcttagtgtagcgatgtatacatatacacatccacctacatgttgaagggcctaaccagccttgggagtattgactggtcccttacctcttatggctaagtctttgactgtgttcatttaccaagttgacccagtttgtcttttaggttaagtaagactcgagagtaaaggcaaggaggggggccagcctctgaatgcggccacggatgccttgctgctgcaaccctttccccagctgtccactgaaacgtgaagtcctgttttgaatgccaaacccaccattcactggtgctgactacatagaatggggttgagagaagatcagtttgggcttcacagtgtcatttgaaaacgttttttgttttgttttgtaattattgtggaagggatggctttgatccaatggagcctgggaggtgtgcccagaaagcttgtctgtagcgggttttgtgagagtgaacactttccactttttgacaccttatcctgatgtatggttccaggatttggattttgattttccaaatgtagcttgaaatttcaataaactttgctctgtttttctaaaaataaa

SEQ ID NO: 447351 - DNA, 1560 bp, Homo sapiens
  misc_feature (5)..(5): n is a, c, g, or t
aacanagctggctggtacggtccggcattcccgggctggcggccgtggagtttgtgacatacgaggtgacacccctcgagtcacttcccttcaactccagctggagcgcctgcttggctttgggttcgttctgcagccttcgccccgctcctagcctcagggccggactccagcgcagagcccagcccagcgcagcctgccagcagccacccagccgcccagccgcccagccccgcacgaaacccggccagagcttcctagcagcccgagccatgaacaccgaaatgtatcagacccccatggaggtggcggtctaccagctgcacaatttctccatctccttcttctcttctctgcttggaggggatgtggtttccgttaagctggacaacagtgcctccggagccagcgtggtggccatagacaacaagatcgaacaggccatggatctggtgaagaatcatctgatgtatgctgtgagagaggaggtggagatcctgaaggagcagatccgagagctggtggagaagaactcccagctagagcgtgagaacaccctgttgaagaccctggcaagcccagagcagctggagaagttccagtcctgtctgagccctgaagagccagctcccgaatccccacaagtgcccgaggcccctggtggttctgcggtgtaagtggctctgtcctcagggtgggcagagccactaaacttgttttacctagttctttccagtttgtttttggctccccaagcatcatctcacgaggagaactttacacctagcacagctggtgccaagagatgtcctaaggacatggccacctgggtccactccagcgacagacccctgacaagagcaggtctctggaggctgagttgcatggggcctagtaacaccaagccagtgagcctctaatgctactgcgccctgggggctcccagggcctgggcaacttagctgcaactggcaaaggagaagggtagtttgaggtgtgacaccagtttgctccagaaagtttaaggggtctgtttctcatctccatggacatcttcaacagcttcacctgacaacgactgttcctatgaagaagccacttgtgttttaagcagaggcaacctctctcttctcctctgtttcgtgaaggcaggggacacagatgggagagattgagccaagtcagccttctgttggttaatatggtataatgcatggctttgtgcacagcccagtgtgggattacagctttgggatgaccgcttacaaagttctgtttggttagtattggcatagtttttctatatagccataaatgcgtatatatacccatagggctagatctgtatcttagtgtagcgatgtatacatatacacatccacctacatgttgaagggcctaaccagccttgggagtattgactggtcccttacctcttatggctaagtctttgactgtgttcatttaccaagttgacccagtttgtcttttaggttaagtaagactcgagagtaaaggcaaggcatccgtggccgcattcaaaggctggcccggcacgag

SEQ ID NO: 447352 - DNA, 568 bp, Homo sapiens
tgggactgcgctggggccgcgtgtggcacctcaggggggcggcccccggcctcaagaggagggggaggagaaggaggaagaggaggaagtgagcccgaaggatccgctcggagctgtttgtccagctgtttctattcgcacccggagcagtacagccagaagggggccgagccgaaggtggctggctttaggcgctaatttccaactcttttcctcacagcttgtcttttccaggcaccctggagtcccctcaggccagctcggtgggcgcgcacctgccagccgcccctgacctcgcaggccaggcgacctccgagcctgagaagatggcccagtccaagctcgattgccgctcacctgtcggcctcgactgctgcaactgctgcctggacctggcccatcggagtgggctccagcgaggcagcagcggggagaacaacaacccgggcagccctacagtgagcaactttcggcagctgcaggaaaagctggtctttgagaacctcaataccgacaagctcaacagcataatgcggcaggattcgctagagccggtgctgcgggaccc

SEQ ID NO: 447353 - DNA, 608 bp, Homo sapiens
aggttaagcatgaagtataggaagtatgcaggataaaaataagcattagatgattcataatttataacatggggaataagaattattagaagttgaatgtggaagatgaagcttgaaataaaatttttattttgttttgaattaaatcaaccatgattattcacagtgcagtaagtgtgtatcatctgtttgatattttcatattacagttttgatagtgctcttcagtctgcgaaatcttctttgggtggaaatgatgaactgtcagctactttcttagaaatgaaaggacatttctatatgtatgctggttctctgctcttgaagatgggtcagcatggtaataatgttcaatggcgagctctttctgagctggctgcattgtgctatctcatagcatttcaggtaagtcttccacttgtaggagcaattgacatttcacggagtcttgatgtgttttaaatgaaggtgtgctctggtatgtaatgacaatatgtgaacaaacctgtggaattaaagttaaaatgaaatagtcaatttgatacagtggaaaataactaagcatacacaatactggtgaggctggtgaaacagggatgttgaatgca

SEQ ID NO: 447354 - DNA, 1227 bp, Homo sapiens
agcaatccactttctaggcaaatgcagctttgaaactatctcatagttggagttccggttttcatgtcaaatggattttatacggtgatgtcataaactcctttgaaatgcttcacatgcagctgctgtagttaactgaattccttcctttattgccatatggagggaagggggaaatttggggggaagagaagaaaaatacatgagttcagtctgccatatttaatcagaagctcctaaagcccatttttaactcatttctctaacaccagcttctcaaaagtgaaataagaagattggaaaggaatcaagagcgagagaagtctgcagctaacctggaatacttgaagaacgtcttgctgcagttcattttcttgaagccaggtagtgaaagagagagacttcttcctgttataaatacgatgttgcagctcagccctgaagaaaagggaaaacttgctgcggttgctcaaggtgggtaaaaggagagtctcagaacttctgacttctaacttaaactaaacagcctggtggttgagaagttgtctgtatgtgtaacttttcaattttgctcatttgaattgggtctgtcatatgagtaggccgtgactagatttgaaaagctgactttttaacatcttgaggcaactgtagtacatttatataattttaacgttcagcaaaatacaataagtgcttagcttgatcttctagctctttgaaaattggatttttatcctggtggttgagttctggtgttcagctgaacgtggttttgttttaaattctactttttaaaaaacatttattagcttgttccttttctacttcacgcctcttccttcctccaaccccaaatagcctaagacaatggagccatagagcccaacacttggtctatatacagcagtccactttctaggcaaatgcagttttaaaactgtgccataggccaggcgccggtggttcacgcctataatcccaccactttgggaggccgaggcaggcggatcacaagatcaagataccgagaccatcctggccaacatggtgaaatctcgtctctactaaaaatacaaaaattagctggacgtggtggcatgcgcctgtagtcccagctactcaggaggctgaggcagcagagtcgcttgaactcacgaggcggaggttgcagtgatgtgtcacgccactgtactccagcctgatggcagagcgagactccatctc

SEQ ID NO: 447355 - DNA, 808 bp, Homo sapiens
ttttgagtaacaatataaacgagtttagtggttgctttggtttaagatgtattcttcggttagcatttaaaagtacagttctaagtttaatttacttttgtattacttttaaaaaacagatacatatgtacttacattaatgtgcaagagagggatcccaaagctcacagatttctgggtcttctttatgaattggaagaaaacacagagaaagccgttgaatgttacaggcgttcagtggaattaaacccaacacaaaaagatcttgtgttgaagattgcagaattgctttgtaaaaatgatgttactgatggaagagcaaaatactgggtcgaaagagcagcaaaacttttcccaggaagtcctgcaatttataaactaaaggtaaacaaacaaaacataaagggagaaaacttaagacataaccatttctaatatttggagtttaaattacttttcaatagcaaaccttaagctcaggtgtttgtgtttcctttaacatttttcttttaaaaagtgtattaaaacctttctgagcatctactgtcttattaggcattgttatactttataagtgacatctcatttacccttctggaataattaatattttagggattttacagtttagtagctgtaaactaagtagagctaagatttacattaagttctgtctgatatacaatttttgcttcattaagtgaaaattacctacaggatgacaatttagggatattttaaagaagagttttctgataactattgtctgaaagtagaagggattgtattttgagatagtaaggttttc

SEQ ID NO: 447356 - DNA, 8095 bp, Homo sapiens
  misc_feature (5490)..(5490): n is a, c, g, or t
gatcacagctcctgcatggatcaaggagcatcactgcagctgcaaactgcagcttcaaactctccggctcaagcgaccctcctgcctcaacctccccagtagctgggcctacaggcacgtgtgtctgtgcccaataataccacattttaaaaatccatcttcagtagatggaaatttggattgtttccaccttttactaataaaaatagtactgctataaacattcatgtataggttttcttttgtttttgttttttcttttttgtagagatgggggtctcgctgtgttgcccaggctggtctcaaattcctggactcaagtgatcctcccatcaaaaactcccaaagtgctgggattacaggcgtgagccactatgcctggcctgtatacaagtttttgtgtagacatgtttacatccaattaatgaacacaggatgtctttccattgatttagctcctctttaatttccttcaacagtgttctgtagtttccagtctacaagtcttacacttttgggttaaatttattcataattattttattatttttgataatattataaatggaattgtttacttaattttacttgaattgttccttgctggtgtataagtagacatctcatttttttagttgacctcgtatggtacaatctctttgaactcatttattatcactgatagtttaggtctttttttttcgaggtttcattaaggttttctatagataagatcatgtcaagacaccctcagaccacagggcggcgccacgagcccggccgagtgcagctggagcgccgacgtcgccgaggatacacagtgctgaggcagaacgcaggttcgtcacagtgggcctccgtgggcggcgccgcacgctcgtcacagtgggcctccgccggctacgccgctgcttcagtggcttgcaggcactttcctcttggaagtggcgactgctgcggggctgagcggtgctcgcacgcgtctcgggagccaggttggcggcgcgatgaggcgcagcaaggccgatgtggagcggtacgtcgcctcggtgctgggtctcaccccgtcgcctcgacagaagtcaatgaaaggattctattttgcaaagctgtattatgaagctaaagaatatgatcttgctaaaaaatacatatgtacttacattaatgtgcaagagagggatcccaaagctcacagatttctgggtcttctttatgaattggaagaaaacacagagaaagccgttgaatgttacaggcgttcagtggaattaaacccaacacaaaaagatcttgtgttgaagattgcagaattgctttgtaaaaatgatgttactgatggaagagcaaaatactgggtcgaaagagcagcaaaacttttcccaggaagtcctgcaatttataaactaaaggaacagcttctagattgtgaaggtgaagatggatggaataaactttttgacttgattcagtcagaactttatgtaagacctgatgacgtccatgtgaacatccggctagtggagttgtatcgctcaactaaaagattgaaggatgctgtggcccactgccatgaggcagagaggaacatagctttgcgttcaagtttagagtggaattcgtgtgttgtacagacccttaaggaatatctggagtctttacagtgtttggagtctgataaaagtgactggcaagcaaccaatacagacttactgctggcctatgctaatcttatgcttcttacgctttccactagagatgtgcaggaaaatagagaattactggaaagttttgatagtgctcttcagtctgcgaaatcttctttgggtggaaatgatgaactgtcagctactttcttagaaatgaaaggacatttctatatgtatgctggttctctgctcttgaagatgggtcagcatggtaataatgttcaatggcgagctctttctgagctggctgcattgtgctatctcatagcatttcaggttccaagaccaaagattaaattaagagaaggtaaagctggacaaaatctgctggaaatgatggcctgtgaccgactgagccaatcagggcacatgttgctaagcttaagtcgtggcaagcaagatttcttaaaagaggttgttgaaacttttgccaacaaaattgggcagtctgcgttatatgatgctctgttttctagtcagtcacctaaggatacatcttttcttggtagcgatgatattggaaaaattgatgtacaagaaccagagcttgaagatttggctagatacgatgttggtgctattcgagcacataatggtagtcttcagcatcttacttggcttggcttacagtggaattcattgcctgctttacctggaatccgaaaatggctaaaacagcttttccatcgtttgccccatgaaacctcaaggcttgaaacaaatgcgcctgaatcaatatgtattttagatcttgaagtatttctccttggagtagtatataccagccacttacaattaaaggagaaatgtaattctcaccatagctcctatcagccgttatgcctgccctttcctgtgtgtaaacagctttgtacagaaagacaaaaatcttggtgggatgcggtttgtactctgattcacagaaaagcagtacctggaaacttggcaaaattgagacttctagttcagcatgaaataaacactctaagagcccaggaaaaacatggccttcaacctgctctgcttgtacattgggcaaaataccttcagaaaacgggcagcggtcttaattctttttatggtcaactagaatacatagggagaagtgttcattattggaagaaagttttgccattgttgaagataataaagaagaacagtattcctgaacctattgatcctctgtttaaacattttcatagtgtagacattcaggcatcagaaattgttgaatatgaagaagacgcacacataacttttgctatgttggatgcagtaaatggaaatatagaagatgctgtgactgcttttgaatctataaaaagtgttgtttcttattggaatcttgcactgatttttcacaggaaggcagaagacattgaaaatgatgccctttctcctgaagaacaagaagaatgcagaaattatctgacaaagaccagggactacctaataaagattatagatgacggtgattcaaatctttcagtggtcaagaaattgcctgtgcccctggagtctgtaaaacagatgcttaattcagtcatgcaggaactcgaagactatagtgaaggaggtcctctctataaaaatggttctttgcgaaatgcagattcagaaataaaacattctacaccgtctcctaccaaatattcactatcaccaagtaaaagttacaagtattctcccgaaacaccacctcgatggacagaagatcggaattctttactgaatatgatttgccaacaagtagaggccattaagaaagaaatgcaggagttgaaactaaatagcagtaagtcagcatcccgtcatcgttggcccacagagaattatggaccagactcggtgcctgatggatatcaggggtcacagacatttcatggggctccactaacagttgcaactactggcccttcagtatattatagtcagtcaccagcatataattcccagtatcttctcagaccagcagctaatgttactcccacaaagggttcttctaatacagaatttaagtcaaccaaagaaggattttccatccctgtgtctgctgatggatttaaatttggcatttcggaaccaggaaatcaagaaaagaaaagggaaaagcctcttgaaaatgatactggcttccaggctcaggatattagtggccggaagaagggccgtggtgtgatttttggccaaacaagtagcacttttacatttgcagatgttgcaaaatcaacttcaggagaaggatttcagtttggcaaaaaagacctcaatttcaagggattttcaggtgctggagaaaaattattctcatcacgatacggtaaaatggccaataaagcaaacacttccggtgactttgagaaagatgatgatgcctataagactgaggacagcgatgacatccattttgaaccagtagttcaaatgcctgaaaaagtagaacttgtaacaggagaagaaggtgaaaaagttctgtattcacagggggtaaaactatttagatttgatgctgaggtaaggcagtggaaagaaaggggcttggggaacttaaaaattctcaaaaacgaggtcaatggcaaactaagaatgctgatgcgaagagaacaagtactaaaagtgtgtgctaatcattggataacgactacaatgaacctgaagcccctctctggatcagatagagcatggatgtggtcagccagtgatttctctgacggtgatgccaaactagagcggttggcagcaaaatttaaaacaccagagctggctgaagaattcaagcagaaatttgaggaatgccagcggcttctgttagacataccacttcaaactccccataaacttgtagatactggcagagctgccaagttaatacagagagctgaagaaatgaagagtggactgaaagatttcaaaacatttttgacaaatgatcaaacaaaagtcactgaggaagaaaataagggttcaggtacaggtgtggccggtgcctcagacacaacaataaaacccaatgctgaaaacactgggcccacattagaatgggataactatgacttaagggaagatgctttggatgatagtgtcagtagtagctcagtacatgcttctccattggcaagtagccctgtgagaaaaaatcttttccgctttgatgagtcaacaacaggatctaacttcagttttaaatctgctttgagtctatctaagtctcctgccaagttgaatcagagtgggacttcagttggcactgatgaagaatctgttgttactcaagaagaagagagagatggacagtactttgaacctgttgttcctttacctgatctagttgaagtatccagtggtgaggaaaatgaacaagttgtttttagtcacagggcagaaatctacagatatgataaagatgttggtcaatggaaagaaaggggcattggtgatataaagattttacagaattatgataataagcaagttcgtatagtgatgagaagggaccaagtattaaaactttgtgccaatcacagaataactccagacatgagtttgcaaaatatgaaagggacagaaagagtatgggtgtggactgcatgtgattttgcagatggagaaagaaaagtagagcatttagctgttcgttttaaactacaggatgttgcagactcgtttaagaaaatttttgatgaagcaaaaacagcccaggaaaaagattctttgataacacctcatgtttctcggtcaagcactcccagagagtcaccatgtggcaaaattgctgtagctntattagaagaaaccacaagagagaggacagatgttattcagggtgatgatgtagcagatgcagcttcagaagttgaagtgtctagcacatctgaaacaacaacaaaagcagtggtttctcctccaaagtttgtatttgtttcagagtctgttaaaagaatttttagtagtgaaaaatcaaaaccatttgcatttggcaacagttctgccactgggtctttgtttagatttagttttaatgcacctttgaaaagtaacaatagtgaaactagttcagtagcccagagtggatctgaaagcaaagtggaacctaaaaaatgtgaactgtcaaagaactctgatatcgaacagtcttcagatagcaaagtcaaaaatctctctgcttcctttccaacggaagaatcttcaatcaactacacatttaaaacaccagaaaaggagcctccattatggcatgctgaatttaccaaagaagaattggttcagaagctccgttccaccacaaaaagtgcagatcacttaaacggcctgcttcgggaaatagaggcaaccaatgcagtccttatggagcaaattaagcttctcaaaagtgaaataagaagattggaaaggaatcaagagcgagagaagtctgcagctaacctggaatacttgaagaacgtcttgctgcagttcattttcttgaagccaggtagtgaaagagagagacttcttcctgttataaatacgatgttgcagctcagccctgaagaaaagggaaaacttgctgcggttgctcaagatgaggaagaaaatgcttcccgttcttctggatgagcatcctatcttcgtagttggtttggacttcgataggttgatggaaggaatacttctattaactaaatagaatctgtttacaaaaatggttcgtgtgtgttaccattattcttttgtcaaaaagtgtgtatatatgtttgcatttacatatatttgtacatctgtatgacagatgtattttaaaagtttcaacttgaagtaaaagtacaacagcttgaagtgttgataccaggccacagccctctaactcatgtgatctcccatgcatgctgccagaataaaaccaccaggaatgaattcactccccacttctctggaacctcaggacccgcccatttctcggcagtactgtgaattttgaagttaaactaaattttggtaccataccaactggaatttaggctttaaaaataatgtttcaaggccaggtgtggtgattcatgcctgaaatcccactactttgggaggctgaggctggagaatcgcttgaggctagtgagctgtgattgtaccactgcactccagctcggggaacagagcgagaccttgtctctaaaaataataatagtaataaaaataacgttttatgactatttattgcaaggtcagatttacagattgttataaattgttgagaaatttttgtgattagaatatgaaggaaaaagctttgttggtaaaagtgacatgttaaggggctatgaagtaaatatgctgcagttaattgtgctaagttaaaatacagtttagttatttgctttaaaataaactcttctttttttctttaaagtatactacctcaaaactcattatgttgtcagagccctagagctggctagtgtaacactgactatgagtaggtgggcccaccacttgagttgaggtgatttcatggtgtctttccaggctcttgatagggtgtcactgcatgcaagccatgaatctgttttgagaatcctctccattttcccaaataaaaacctatcccaacagtgactatatcactcagcattggatctaaatataaaagtggtgctttcagtgtttttggcagatagtgttccataacctttccatcagaagggattttagacaccttagaggtccgtgctacatcttcacagttcctccgaataaccttaggtggtagtgttacttgcctttgacacctgtgcatatgttttaatgactagatccaaactgtgttgttcttaaatcaaaaattggataatttttaatatttatgtattaatcacacagtgtgctctctgaagttctcttaagccttcagtttatactcttaattttctttctgagctggggaactgactttgcactttggttacacagaacattggtttccaatttagtttaactgaaatttgctgctgatatgttgagtttgttctttaaaaaatatctcatatatctcgtctttcctccttagaagaacagacctaactagcgaatgtatgaatgaaaatgcatctatttcagagccgacatgaagagtttagtttttttactttataaactgtgaatatgagtatgccagctgcattagatgtaactaatcatatttaaatatatttcactttgactttagaccttttgaagtctgtataaacttgttttgaaatacagtctccacttacgaatgtcataacaaaatacttttttgcatgataaaaaattactttgattacaaaaggcatattctttcatggtttctgcaatgagaggaagtgtaatgattattttaatatttctattaaaactgtatattttta

SEQ ID NO: 447357 - DNA, 7826 bp, Homo sapiens
  misc_feature (5221)..(5221): n is a, c, g, or t
aagagggcagaaacaatccatgttgcttctcttccaattcagtcctcccactgcttggcttcagatgtagaaatgcatggtagagccagataccgaaagcctgttttctgcttggaagactaaaaagagaagcctcagcaaatgaaagcaacagggtaattgctgagagagagttaatcagtgaagcaaccccattaacctgtctataaaccccagggctcattcttgagctgctcctgcatagatctcgtcctgttcaacacaccaaagattgacagctgaactgagagaccatcacccacagacacaactggccactgggtggtgcacaagtcagacagaactgaatagtcctgtgaagactctggacactgaactgactttggaaccagactgcagaatggaggggtgggaacttgtggcttgaacctaatcaggtttcattaaggttttctatagataagatcatgtcaagacaccctcagaccacagggcggcgccacgagcccggccgagtgcagctggagcgccgacgtcgccgaggatacacagtgctgaggcagaacgcaggttcgtcacagtgggcctccgtgggcggcgccgcacgctcgtcacagtgggcctccgccggctacgccgctgcttcagtggcttgcaggcactttcctcttggaagtggcgactgctgcggggctgagcggtgctcgcacgcgtctcgggagccaggttggcggcgcgatgaggcgcagcaaggccgatgtggagcggtacgtcgcctcggtgctgggtctcaccccgtcgcctcgacagaagtcaatgaaaggattctattttgcaaagctgtattatgaagctaaagaatatgatcttgctaaaaaatacatatgtacttacattaatgtgcaagagagggatcccaaagctcacagatttctgggtcttctttatgaattggaagaaaacacagagaaagccgttgaatgttacaggcgttcagtggaattaaacccaacacaaaaagatcttgtgttgaagattgcagaattgctttgtaaaaatgatgttactgatggaagagcaaaatactgggtcgaaagagcagcaaaacttttcccaggaagtcctgcaatttataaactaaaggaacagcttctagattgtgaaggtgaagatggatggaataaactttttgacttgattcagtcagaactttatgtaagacctgatgacgtccatgtgaacatccggctagtggagttgtatcgctcaactaaaagattgaaggatgctgtggcccactgccatgaggcagagaggaacatagctttgcgttcaagtttagagtggaattcgtgtgttgtacagacccttaaggaatatctggagtctttacagtgtttggagtctgataaaagtgactggcaagcaaccaatacagacttactgctggcctatgctaatcttatgcttcttacgctttccactagagatgtgcaggaaaatagagaattactggaaagttttgatagtgctcttcagtctgcgaaatcttctttgggtggaaatgatgaactgtcagctactttcttagaaatgaaaggacatttctatatgtatgctggttctctgctcttgaagatgggtcagcatggtaataatgttcaatggcgagctctttctgagctggctgcattgtgctatctcatagcatttcaggttccaagaccaaagattaaattaagagaaggtaaagctggacaaaatctgctggaaatgatggcctgtgaccgactgagccaatcagggcacatgttgctaagcttaagtcgtggcaagcaagatttcttaaaagaggttgttgaaacttttgccaacaaaattgggcagtctgcgttatatgatgctctgttttctagtcagtcacctaaggatacatcttttcttggtagcgatgatattggaaaaattgatgtacaagaaccagagcttgaagatttggctagatacgatgttggtgctattcgagcacataatggtagtcttcagcatcttacttggcttggcttacagtggaattcattgcctgctttacctggaatccgaaaatggctaaaacagcttttccatcgtttgccccatgaaacctcaaggcttgaaacaaatgcgcctgaatcaatatgtattttagatcttgaagtatttctccttggagtagtatataccagccacttacaattaaaggagaaatgtaattctcaccatagctcctatcagccgttatgcctgccctttcctgtgtgtaaacagctttgtacagaaagacaaaaatcttggtgggatgcggtttgtactctgattcacagaaaagcagtacctggaaacttggcaaaattgagacttctagttcagcatgaaataaacactctaagagcccaggaaaaacatggccttcaacctgctctgcttgtacattgggcaaaataccttcagaaaacgggcagcggtcttaattctttttatggtcaactagaatacatagggagaagtgttcattattggaagaaagttttgccattgttgaagataataaagaagaacagtattcctgaacctattgatcctctgtttaaacattttcatagtgtagacattcaggcatcagaaattgttgaatatgaagaagacgcacacataacttttgctatgttggatgcagtaaatggaaatatagaagatgctgtgactgcttttgaatctataaaaagtgttgtttcttattggaatcttgcactgatttttcacaggaaggcagaagacattgaaaatgatgccctttctcctgaagaacaagaagaatgcagaaattatctgacaaagaccagggactacctaataaagattatagatgacggtgattcaaatctttcagtggtcaagaaattgcctgtgcccctggagtctgtaaaacagatgcttaattcagtcatgcaggaactcgaagactatagtgaaggaggtcctctctataaaaatggttctttgcgaaatgcagattcagaaataaaacattctacaccgtctcctaccaaatattcactatcaccaagtaaaagttacaagtattctcccgaaacaccacctcgatggacagaagatcggaattctttactgaatatgatttgccaacaagtagaggccattaagaaagaaatgcaggagttgaaactaaatagcagtaagtcagcatcccgtcatcgttggcccacagagaattatggaccagactcggtgcctgatggatatcaggggtcacagacatttcatggggctccactaacagttgcaactactggcccttcagtatattatagtcagtcaccagcatataattcccagtatcttctcagaccagcagctaatgttactcccacaaagggttcttctaatacagaatttaagtcaaccaaagaaggattttccatccctgtgtctgctgatggatttaaatttggcatttcggaaccaggaaatcaagaaaagaaaagggaaaagcctcttgaaaatgatactggcttccaggctcaggatattagtggccggaagaagggccgtggtgtgatttttggccaaacaagtagcacttttacatttgcagatgttgcaaaatcaacttcaggagaaggatttcagtttggcaaaaaagacctcaatttcaagggattttcaggtgctggagaaaaattattctcatcacgatacggtaaaatggccaataaagcaaacacttccggtgactttgagaaagatgatgatgcctataagactgaggacagcgatgacatccattttgaaccagtagttcaaatgcctgaaaaagtagaacttgtaacaggagaagaaggtgaaaaagttctgtattcacagggggtaaaactatttagatttgatgctgaggtaaggcagtggaaagaaaggggcttggggaacttaaaaattctcaaaaacgaggtcaatggcaaactaagaatgctgatgcgaagagaacaagtactaaaagtgtgtgctaatcattggataacgactacaatgaacctgaagcccctctctggatcagatagagcatggatgtggtcagccagtgatttctctgacggtgatgccaaactagagcggttggcagcaaaatttaaaacaccagagctggctgaagaattcaagcagaaatttgaggaatgccagcggcttctgttagacataccacttcaaactccccataaacttgtagatactggcagagctgccaagttaatacagagagctgaagaaatgaagagtggactgaaagatttcaaaacatttttgacaaatgatcaaacaaaagtcactgaggaagaaaataagggttcaggtacaggtgtggccggtgcctcagacacaacaataaaacccaatgctgaaaacactgggcccacattagaatgggataactatgacttaagggaagatgctttggatgatagtgtcagtagtagctcagtacatgcttctccattggcaagtagccctgtgagaaaaaatcttttccgctttgatgagtcaacaacaggatctaacttcagttttaaatctgctttgagtctatctaagtctcctgccaagttgaatcagagtgggacttcagttggcactgatgaagaatctgttgttactcaagaagaagagagagatggacagtactttgaacctgttgttcctttacctgatctagttgaagtatccagtggtgaggaaaatgaacaagttgtttttagtcacagggcagaaatctacagatatgataaagatgttggtcaatggaaagaaaggggcattggtgatataaagattttacagaattatgataataagcaagttcgtatagtgatgagaagggaccaagtattaaaactttgtgccaatcacagaataactccagacatgagtttgcaaaatatgaaagggacagaaagagtatgggtgtggactgcatgtgattttgcagatggagaaagaaaagtagagcatttagctgttcgttttaaactacaggatgttgcagactcgtttaagaaaatttttgatgaagcaaaaacagcccaggaaaaagattctttgataacacctcatgtttctcggtcaagcactcccagagagtcaccatgtggcaaaattgctgtagctntattagaagaaaccacaagagagaggacagatgttattcagggtgatgatgtagcagatgcagcttcagaagttgaagtgtctagcacatctgaaacaacaacaaaagcagtggtttctcctccaaagtttgtatttgtttcagagtctgttaaaagaatttttagtagtgaaaaatcaaaaccatttgcatttggcaacagttctgccactgggtctttgtttagatttagttttaatgcacctttgaaaagtaacaatagtgaaactagttcagtagcccagagtggatctgaaagcaaagtggaacctaaaaaatgtgaactgtcaaagaactctgatatcgaacagtcttcagatagcaaagtcaaaaatctctctgcttcctttccaacggaagaatcttcaatcaactacacatttaaaacaccagaaaaggagcctccattatggcatgctgaatttaccaaagaagaattggttcagaagctccgttccaccacaaaaagtgcagatcacttaaacggcctgcttcgggaaatagaggcaaccaatgcagtccttatggagcaaattaagcttctcaaaagtgaaataagaagattggaaaggaatcaagagcgagagaagtctgcagctaacctggaatacttgaagaacgtcttgctgcagttcattttcttgaagccaggtagtgaaagagagagacttcttcctgttataaatacgatgttgcagctcagccctgaagaaaagggaaaacttgctgcggttgctcaagatgaggaagaaaatgcttcccgttcttctggatgagcatcctatcttcgtagttggtttggacttcgataggttgatggaaggaatacttctattaactaaatagaatctgtttacaaaaatggttcgtgtgtgttaccattattcttttgtcaaaaagtgtgtatatatgtttgcatttacatatatttgtacatctgtatgacagatgtattttaaaagtttcaacttgaagtaaaagtacaacagcttgaagtgttgataccaggccacagccctctaactcatgtgatctcccatgcatgctgccagaataaaaccaccaggaatgaattcactccccacttctctggaacctcaggacccgcccatttctcggcagtactgtgaattttgaagttaaactaaattttggtaccataccaactggaatttaggctttaaaaataatgtttcaaggccaggtgtggtgattcatgcctgaaatcccactactttgggaggctgaggctggagaatcgcttgaggctagtgagctgtgattgtaccactgcactccagctcggggaacagagcgagaccttgtctctaaaaataataatagtaataaaaataacgttttatgactatttattgcaaggtcagatttacagattgttataaattgttgagaaatttttgtgattagaatatgaaggaaaaagctttgttggtaaaagtgacatgttaaggggctatgaagtaaatatgctgcagttaattgtgctaagttaaaatacagtttagttatttgctttaaaataaactcttctttttttctttaaagtatactacctcaaaactcattatgttgtcagagccctagagctggctagtgtaacactgactatgagtaggtgggcccaccacttgagttgaggtgatttcatggtgtctttccaggctcttgatagggtgtcactgcatgcaagccatgaatctgttttgagaatcctctccattttcccaaataaaaacctatcccaacagtgactatatcactcagcattggatctaaatataaaagtggtgctttcagtgtttttggcagatagtgttccataacctttccatcagaagggattttagacaccttagaggtccgtgctacatcttcacagttcctccgaataaccttaggtggtagtgttacttgcctttgacacctgtgcatatgttttaatgactagatccaaactgtgttgttcttaaatcaaaaattggataatttttaatatttatgtattaatcacacagtgtgctctctgaagttctcttaagccttcagtttatactcttaattttctttctgagctggggaactgactttgcactttggttacacagaacattggtttccaatttagtttaactgaaatttgctgctgatatgttgagtttgttctttaaaaaatatctcatatatctcgtctttcctccttagaagaacagacctaactagcgaatgtatgaatgaaaatgcatctatttcagagccgacatgaagagtttagtttttttactttataaactgtgaatatgagtatgccagctgcattagatgtaactaatcatatttaaatatatttcactttgactttagaccttttgaagtctgtataaacttgttttgaaatacagtctccacttacgaatgtcataacaaaatacttttttgcatgataaaaaattactttgattacaaaaggcatattctttcatggtttctgcaatgagaggaagtgtaatgattattttaatatttctattaaaactgtatattttta

SEQ ID NO: 447358 - DNA, 5631 bp, Homo sapiens
  misc_feature (3026)..(3026): n is a, c, g, or t
gagatggagtcttgctctgtcaccaggctggagtgcagtggcacgaccttggctcactgtaacctccgcctcccgggttcaggcgattctcctgcttgaacctgcacggcagaggttgcagtgagttcactggtattaaggtggtttagttattacagtatttggaagttgaacaaatgactattgaggtaccatttggttttgacttgaaattttagccagttcttacaacttgtaaatgaactttagatctaatcatgcgtgttccttaaagttgtgtgcttttaactttcttttttagggcagcggtcttaattctttttatggtcaactagaatacatagggagaagtgttcattattggaagaaagttttgccattgttgaagataataaagaagaacagtattcctgaacctattgatcctctgtttaaacattttcatagtgtagacattcaggcatcagaaattgttgaatatgaagaagacgcacacataacttttgctatgttggatgcagtaaatggaaatatagaagatgctgtgactgcttttgaatctataaaaagtgttgtttcttattggaatcttgcactgatttttcacaggaaggcagaagacattgaaaatgatgccctttctcctgaagaacaagaagaatgcagaaattatctgacaaagaccagggactacctaataaagattatagatgacggtgattcaaatctttcagtggtcaagaaattgcctgtgcccctggagtctgtaaaacagatgcttaattcagtcatgcaggaactcgaagactatagtgaaggaggtcctctctataaaaatggttctttgcgaaatgcagattcagaaataaaacattctacaccgtctcctaccaaatattcactatcaccaagtaaaagttacaagtattctcccgaaacaccacctcgatggacagaagatcggaattctttactgaatatgatttgccaacaagtagaggccattaagaaagaaatgcaggagttgaaactaaatagcagtaagtcagcatcccgtcatcgttggcccacagagaattatggaccagactcggtgcctgatggatatcaggggtcacagacatttcatggggctccactaacagttgcaactactggcccttcagtatattatagtcagtcaccagcatataattcccagtatcttctcagaccagcagctaatgttactcccacaaagggttcttctaatacagaatttaagtcaaccaaagaaggattttccatccctgtgtctgctgatggatttaaatttggcatttcggaaccaggaaatcaagaaaagaaaagggaaaagcctcttgaaaatgatactggcttccaggctcaggatattagtggccggaagaagggccgtggtgtgatttttggccaaacaagtagcacttttacatttgcagatgttgcaaaatcaacttcaggagaaggatttcagtttggcaaaaaagacctcaatttcaagggattttcaggtgctggagaaaaattattctcatcacgatacggtaaaatggccaataaagcaaacacttccggtgactttgagaaagatgatgatgcctataagactgaggacagcgatgacatccattttgaaccagtagttcaaatgcctgaaaaagtagaacttgtaacaggagaagaaggtgaaaaagttctgtattcacagggggtaaaactatttagatttgatgctgaggtaaggcagtggaaagaaaggggcttggggaacttaaaaattctcaaaaacgaggtcaatggcaaactaagaatgctgatgcgaagagaacaagtactaaaagtgtgtgctaatcattggataacgactacaatgaacctgaagcccctctctggatcagatagagcatggatgtggtcagccagtgatttctctgacggtgatgccaaactagagcggttggcagcaaaatttaaaacaccagagctggctgaagaattcaagcagaaatttgaggaatgccagcggcttctgttagacataccacttcaaactccccataaacttgtagatactggcagagctgccaagttaatacagagagctgaagaaatgaagagtggactgaaagatttcaaaacatttttgacaaatgatcaaacaaaagtcactgaggaagaaaataagggttcaggtacaggtgtggccggtgcctcagacacaacaataaaacccaatgctgaaaacactgggcccacattagaatgggataactatgacttaagggaagatgctttggatgatagtgtcagtagtagctcagtacatgcttctccattggcaagtagccctgtgagaaaaaatcttttccgctttgatgagtcaacaacaggatctaacttcagttttaaatctgctttgagtctatctaagtctcctgccaagttgaatcagagtgggacttcagttggcactgatgaagaatctgttgttactcaagaagaagagagagatggacagtactttgaacctgttgttcctttacctgatctagttgaagtatccagtggtgaggaaaatgaacaagttgtttttagtcacagggcagaaatctacagatatgataaagatgttggtcaatggaaagaaaggggcattggtgatataaagattttacagaattatgataataagcaagttcgtatagtgatgagaagggaccaagtattaaaactttgtgccaatcacagaataactccagacatgagtttgcaaaatatgaaagggacagaaagagtatgggtgtggactgcatgtgattttgcagatggagaaagaaaagtagagcatttagctgttcgttttaaactacaggatgttgcagactcgtttaagaaaatttttgatgaagcaaaaacagcccaggaaaaagattctttgataacacctcatgtttctcggtcaagcactcccagagagtcaccatgtggcaaaattgctgtagctntattagaagaaaccacaagagagaggacagatgttattcagggtgatgatgtagcagatgcagcttcagaagttgaagtgtctagcacatctgaaacaacaacaaaagcagtggtttctcctccaaagtttgtatttgtttcagagtctgttaaaagaatttttagtagtgaaaaatcaaaaccatttgcatttggcaacagttctgccactgggtctttgtttagatttagttttaatgcacctttgaaaagtaacaatagtgaaactagttcagtagcccagagtggatctgaaagcaaagtggaacctaaaaaatgtgaactgtcaaagaactctgatatcgaacagtcttcagatagcaaagtcaaaaatctctctgcttcctttccaacggaagaatcttcaatcaactacacatttaaaacaccagaaaaggagcctccattatggcatgctgaatttaccaaagaagaattggttcagaagctccgttccaccacaaaaagtgcagatcacttaaacggcctgcttcgggaaatagaggcaaccaatgcagtccttatggagcaaattaagcttctcaaaagtgaaataagaagattggaaaggaatcaagagcgagagaagtctgcagctaacctggaatacttgaagaacgtcttgctgcagttcattttcttgaagccaggtagtgaaagagagagacttcttcctgttataaatacgatgttgcagctcagccctgaagaaaagggaaaacttgctgcggttgctcaagatgaggaagaaaatgcttcccgttcttctggatgagcatcctatcttcgtagttggtttggacttcgataggttgatggaaggaatacttctattaactaaatagaatctgtttacaaaaatggttcgtgtgtgttaccattattcttttgtcaaaaagtgtgtatatatgtttgcatttacatatatttgtacatctgtatgacagatgtattttaaaagtttcaacttgaagtaaaagtacaacagcttgaagtgttgataccaggccacagccctctaactcatgtgatctcccatgcatgctgccagaataaaaccaccaggaatgaattcactccccacttctctggaacctcaggacccgcccatttctcggcagtactgtgaattttgaagttaaactaaattttggtaccataccaactggaatttaggctttaaaaataatgtttcaaggccaggtgtggtgattcatgcctgaaatcccactactttgggaggctgaggctggagaatcgcttgaggctagtgagctgtgattgtaccactgcactccagctcggggaacagagcgagaccttgtctctaaaaataataatagtaataaaaataacgttttatgactatttattgcaaggtcagatttacagattgttataaattgttgagaaatttttgtgattagaatatgaaggaaaaagctttgttggtaaaagtgacatgttaaggggctatgaagtaaatatgctgcagttaattgtgctaagttaaaatacagtttagttatttgctttaaaataaactcttctttttttctttaaagtatactacctcaaaactcattatgttgtcagagccctagagctggctagtgtaacactgactatgagtaggtgggcccaccacttgagttgaggtgatttcatggtgtctttccaggctcttgatagggtgtcactgcatgcaagccatgaatctgttttgagaatcctctccattttcccaaataaaaacctatcccaacagtgactatatcactcagcattggatctaaatataaaagtggtgctttcagtgtttttggcagatagtgttccataacctttccatcagaagggattttagacaccttagaggtccgtgctacatcttcacagttcctccgaataaccttaggtggtagtgttacttgcctttgacacctgtgcatatgttttaatgactagatccaaactgtgttgttcttaaatcaaaaattggataatttttaatatttatgtattaatcacacagtgtgctctctgaagttctcttaagccttcagtttatactcttaattttctttctgagctggggaactgactttgcactttggttacacagaacattggtttccaatttagtttaactgaaatttgctgctgatatgttgagtttgttctttaaaaaatatctcatatatctcgtctttcctccttagaagaacagacctaactagcgaatgtatgaatgaaaatgcatctatttcagagccgacatgaagagtttagtttttttactttataaactgtgaatatgagtatgccagctgcattagatgtaactaatcatatttaaatatatttcactttgactttagaccttttgaagtctgtataaacttgttttgaaatacagtctccacttacgaatgtcataacaaaatacttttttgcatgataaaaaattactttgattacaaaaggcatattctttcatggtttctgcaatgagaggaagtgtaatgattattttaatatttctattaaaactgtatattttta

SEQ ID NO: 447359 - DNA, 5309 bp, Homo sapiens
  misc_feature (2704)..(2704): n is a, c, g, or t
gcagtattgtcattttgaaatggcaatttaccattattattaaatttttatttctaaatgcttctcaaaatacatatcaaatctattagtcctcctccaaaatatcatttgtcatccctgatgggagaagacttgctcgcatcagaaattgttgaatatgaagaagacgcacacataacttttgctatgttggatgcagtaaatggaaatatagaagatgctgtgactgcttttgaatctataaaaagtgttgtttcttattggaatcttgcactgatttttcacaggaaggcagaagacattgaaaatgatgccctttctcctgaagaacaagaagaatgcagaaattatctgacaaagaccagggactacctaataaagattatagatgacggtgattcaaatctttcagtggtcaagaaattgcctgtgcccctggagtctgtaaaacagatgcttaattcagtcatgcaggaactcgaagactatagtgaaggaggtcctctctataaaaatggttctttgcgaaatgcagattcagaaataaaacattctacaccgtctcctaccaaatattcactatcaccaagtaaaagttacaagtattctcccgaaacaccacctcgatggacagaagatcggaattctttactgaatatgatttgccaacaagtagaggccattaagaaagaaatgcaggagttgaaactaaatagcagtaagtcagcatcccgtcatcgttggcccacagagaattatggaccagactcggtgcctgatggatatcaggggtcacagacatttcatggggctccactaacagttgcaactactggcccttcagtatattatagtcagtcaccagcatataattcccagtatcttctcagaccagcagctaatgttactcccacaaagggttcttctaatacagaatttaagtcaaccaaagaaggattttccatccctgtgtctgctgatggatttaaatttggcatttcggaaccaggaaatcaagaaaagaaaagggaaaagcctcttgaaaatgatactggcttccaggctcaggatattagtggccggaagaagggccgtggtgtgatttttggccaaacaagtagcacttttacatttgcagatgttgcaaaatcaacttcaggagaaggatttcagtttggcaaaaaagacctcaatttcaagggattttcaggtgctggagaaaaattattctcatcacgatacggtaaaatggccaataaagcaaacacttccggtgactttgagaaagatgatgatgcctataagactgaggacagcgatgacatccattttgaaccagtagttcaaatgcctgaaaaagtagaacttgtaacaggagaagaaggtgaaaaagttctgtattcacagggggtaaaactatttagatttgatgctgaggtaaggcagtggaaagaaaggggcttggggaacttaaaaattctcaaaaacgaggtcaatggcaaactaagaatgctgatgcgaagagaacaagtactaaaagtgtgtgctaatcattggataacgactacaatgaacctgaagcccctctctggatcagatagagcatggatgtggtcagccagtgatttctctgacggtgatgccaaactagagcggttggcagcaaaatttaaaacaccagagctggctgaagaattcaagcagaaatttgaggaatgccagcggcttctgttagacataccacttcaaactccccataaacttgtagatactggcagagctgccaagttaatacagagagctgaagaaatgaagagtggactgaaagatttcaaaacatttttgacaaatgatcaaacaaaagtcactgaggaagaaaataagggttcaggtacaggtgtggccggtgcctcagacacaacaataaaacccaatgctgaaaacactgggcccacattagaatgggataactatgacttaagggaagatgctttggatgatagtgtcagtagtagctcagtacatgcttctccattggcaagtagccctgtgagaaaaaatcttttccgctttgatgagtcaacaacaggatctaacttcagttttaaatctgctttgagtctatctaagtctcctgccaagttgaatcagagtgggacttcagttggcactgatgaagaatctgttgttactcaagaagaagagagagatggacagtactttgaacctgttgttcctttacctgatctagttgaagtatccagtggtgaggaaaatgaacaagttgtttttagtcacagggcagaaatctacagatatgataaagatgttggtcaatggaaagaaaggggcattggtgatataaagattttacagaattatgataataagcaagttcgtatagtgatgagaagggaccaagtattaaaactttgtgccaatcacagaataactccagacatgagtttgcaaaatatgaaagggacagaaagagtatgggtgtggactgcatgtgattttgcagatggagaaagaaaagtagagcatttagctgttcgttttaaactacaggatgttgcagactcgtttaagaaaatttttgatgaagcaaaaacagcccaggaaaaagattctttgataacacctcatgtttctcggtcaagcactcccagagagtcaccatgtggcaaaattgctgtagctntattagaagaaaccacaagagagaggacagatgttattcagggtgatgatgtagcagatgcagcttcagaagttgaagtgtctagcacatctgaaacaacaacaaaagcagtggtttctcctccaaagtttgtatttgtttcagagtctgttaaaagaatttttagtagtgaaaaatcaaaaccatttgcatttggcaacagttctgccactgggtctttgtttagatttagttttaatgcacctttgaaaagtaacaatagtgaaactagttcagtagcccagagtggatctgaaagcaaagtggaacctaaaaaatgtgaactgtcaaagaactctgatatcgaacagtcttcagatagcaaagtcaaaaatctctctgcttcctttccaacggaagaatcttcaatcaactacacatttaaaacaccagaaaaggagcctccattatggcatgctgaatttaccaaagaagaattggttcagaagctccgttccaccacaaaaagtgcagatcacttaaacggcctgcttcgggaaatagaggcaaccaatgcagtccttatggagcaaattaagcttctcaaaagtgaaataagaagattggaaaggaatcaagagcgagagaagtctgcagctaacctggaatacttgaagaacgtcttgctgcagttcattttcttgaagccaggtagtgaaagagagagacttcttcctgttataaatacgatgttgcagctcagccctgaagaaaagggaaaacttgctgcggttgctcaagatgaggaagaaaatgcttcccgttcttctggatgagcatcctatcttcgtagttggtttggacttcgataggttgatggaaggaatacttctattaactaaatagaatctgtttacaaaaatggttcgtgtgtgttaccattattcttttgtcaaaaagtgtgtatatatgtttgcatttacatatatttgtacatctgtatgacagatgtattttaaaagtttcaacttgaagtaaaagtacaacagcttgaagtgttgataccaggccacagccctctaactcatgtgatctcccatgcatgctgccagaataaaaccaccaggaatgaattcactccccacttctctggaacctcaggacccgcccatttctcggcagtactgtgaattttgaagttaaactaaattttggtaccataccaactggaatttaggctttaaaaataatgtttcaaggccaggtgtggtgattcatgcctgaaatcccactactttgggaggctgaggctggagaatcgcttgaggctagtgagctgtgattgtaccactgcactccagctcggggaacagagcgagaccttgtctctaaaaataataatagtaataaaaataacgttttatgactatttattgcaaggtcagatttacagattgttataaattgttgagaaatttttgtgattagaatatgaaggaaaaagctttgttggtaaaagtgacatgttaaggggctatgaagtaaatatgctgcagttaattgtgctaagttaaaatacagtttagttatttgctttaaaataaactcttctttttttctttaaagtatactacctcaaaactcattatgttgtcagagccctagagctggctagtgtaacactgactatgagtaggtgggcccaccacttgagttgaggtgatttcatggtgtctttccaggctcttgatagggtgtcactgcatgcaagccatgaatctgttttgagaatcctctccattttcccaaataaaaacctatcccaacagtgactatatcactcagcattggatctaaatataaaagtggtgctttcagtgtttttggcagatagtgttccataacctttccatcagaagggattttagacaccttagaggtccgtgctacatcttcacagttcctccgaataaccttaggtggtagtgttacttgcctttgacacctgtgcatatgttttaatgactagatccaaactgtgttgttcttaaatcaaaaattggataatttttaatatttatgtattaatcacacagtgtgctctctgaagttctcttaagccttcagtttatactcttaattttctttctgagctggggaactgactttgcactttggttacacagaacattggtttccaatttagtttaactgaaatttgctgctgatatgttgagtttgttctttaaaaaatatctcatatatctcgtctttcctccttagaagaacagacctaactagcgaatgtatgaatgaaaatgcatctatttcagagccgacatgaagagtttagtttttttactttataaactgtgaatatgagtatgccagctgcattagatgtaactaatcatatttaaatatatttcactttgactttagaccttttgaagtctgtataaacttgttttgaaatacagtctccacttacgaatgtcataacaaaatacttttttgcatgataaaaaattactttgattacaaaaggcatattctttcatggtttctgcaatgagaggaagtgtaatgattattttaatatttctattaaaactgtatattttta

SEQ ID NO: 447360 - DNA, 8041 bp, Homo sapiens
  misc_feature (5490)..(5490): n is a, c, g, or t
gatcacagctcctgcatggatcaaggagcatcactgcagctgcaaactgcagcttcaaactctccggctcaagcgaccctcctgcctcaacctccccagtagctgggcctacaggcacgtgtgtctgtgcccaataataccacattttaaaaatccatcttcagtagatggaaatttggattgtttccaccttttactaataaaaatagtactgctataaacattcatgtataggttttcttttgtttttgttttttcttttttgtagagatgggggtctcgctgtgttgcccaggctggtctcaaattcctggactcaagtgatcctcccatcaaaaactcccaaagtgctgggattacaggcgtgagccactatgcctggcctgtatacaagtttttgtgtagacatgtttacatccaattaatgaacacaggatgtctttccattgatttagctcctctttaatttccttcaacagtgttctgtagtttccagtctacaagtcttacacttttgggttaaatttattcataattattttattatttttgataatattataaatggaattgtttacttaattttacttgaattgttccttgctggtgtataagtagacatctcatttttttagttgacctcgtatggtacaatctctttgaactcatttattatcactgatagtttaggtctttttttttcgaggtttcattaaggttttctatagataagatcatgtcaagacaccctcagaccacagggcggcgccacgagcccggccgagtgcagctggagcgccgacgtcgccgaggatacacagtgctgaggcagaacgcaggttcgtcacagtgggcctccgtgggcggcgccgcacgctcgtcacagtgggcctccgccggctacgccgctgcttcagtggcttgcaggcactttcctcttggaagtggcgactgctgcggggctgagcggtgctcgcacgcgtctcgggagccaggttggcggcgcgatgaggcgcagcaaggccgatgtggagcggtacgtcgcctcggtgctgggtctcaccccgtcgcctcgacagaagtcaatgaaaggattctattttgcaaagctgtattatgaagctaaagaatatgatcttgctaaaaaatacatatgtacttacattaatgtgcaagagagggatcccaaagctcacagatttctgggtcttctttatgaattggaagaaaacacagagaaagccgttgaatgttacaggcgttcagtggaattaaacccaacacaaaaagatcttgtgttgaagattgcagaattgctttgtaaaaatgatgttactgatggaagagcaaaatactgggtcgaaagagcagcaaaacttttcccaggaagtcctgcaatttataaactaaaggaacagcttctagattgtgaaggtgaagatggatggaataaactttttgacttgattcagtcagaactttatgtaagacctgatgacgtccatgtgaacatccggctagtggagttgtatcgctcaactaaaagattgaaggatgctgtggcccactgccatgaggcagagaggaacatagctttgcgttcaagtttagagtggaattcgtgtgttgtacagacccttaaggaatatctggagtctttacagtgtttggagtctgataaaagtgactggcaagcaaccaatacagacttactgctggcctatgctaatcttatgcttcttacgctttccactagagatgtgcaggaaaatagagaattactggaaagttttgatagtgctcttcagtctgcgaaatcttctttgggtggaaatgatgaactgtcagctactttcttagaaatgaaaggacatttctatatgtatgctggttctctgctcttgaagatgggtcagcatggtaataatgttcaatggcgagctctttctgagctggctgcattgtgctatctcatagcatttcaggttccaagaccaaagattaaattaagagaaggtaaagctggacaaaatctgctggaaatgatggcctgtgaccgactgagccaatcagggcacatgttgctaagcttaagtcgtggcaagcaagatttcttaaaagaggttgttgaaacttttgccaacaaaattgggcagtctgcgttatatgatgctctgttttctagtcagtcacctaaggatacatcttttcttggtagcgatgatattggaaaaattgatgtacaagaaccagagcttgaagatttggctagatacgatgttggtgctattcgagcacataatggtagtcttcagcatcttacttggcttggcttacagtggaattcattgcctgctttacctggaatccgaaaatggctaaaacagcttttccatcgtttgccccatgaaacctcaaggcttgaaacaaatgcgcctgaatcaatatgtattttagatcttgaagtatttctccttggagtagtatataccagccacttacaattaaaggagaaatgtaattctcaccatagctcctatcagccgttatgcctgccctttcctgtgtgtaaacagctttgtacagaaagacaaaaatcttggtgggatgcggtttgtactctgattcacagaaaagcagtacctggaaacttggcaaaattgagacttctagttcagcatgaaataaacactctaagagcccaggaaaaacatggccttcaacctgctctgcttgtacattgggcaaaataccttcagaaaacgggcagcggtcttaattctttttatggtcaactagaatacatagggagaagtgttcattattggaagaaagttttgccattgttgaagataataaagaagaacagtattcctgaacctattgatcctctgtttaaacattttcatagtgtagacattcaggcatcagaaattgttgaatatgaagaagacgcacacataacttttgctatgttggatgcagtaaatggaaatatagaagatgctgtgactgcttttgaatctataaaaagtgttgtttcttattggaatcttgcactgatttttcacaggaaggcagaagacattgaaaatgatgccctttctcctgaagaacaagaagaatgcagaaattatctgacaaagaccagggactacctaataaagattatagatgacggtgattcaaatctttcagtggtcaagaaattgcctgtgcccctggagtctgtaaaacagatgcttaattcagtcatgcaggaactcgaagactatagtgaaggaggtcctctctataaaaatggttctttgcgaaatgcagattcagaaataaaacattctacaccgtctcctaccaaatattcactatcaccaagtaaaagttacaagtattctcccgaaacaccacctcgatggacagaagatcggaattctttactgaatatgatttgccaacaagtagaggccattaagaaagaaatgcaggagttgaaactaaatagcagtaagtcagcatcccgtcatcgttggcccacagagaattatggaccagactcggtgcctgatggatatcaggggtcacagacatttcatggggctccactaacagttgcaactactggcccttcagtatattatagtcagtcaccagcatataattcccagtatcttctcagaccagcagctaatgttactcccacaaagggttcttctaatacagaatttaagtcaaccaaagaaggattttccatccctgtgtctgctgatggatttaaatttggcatttcggaaccaggaaatcaagaaaagaaaagggaaaagcctcttgaaaatgatactggcttccaggctcaggatattagtggccggaagaagggccgtggtgtgatttttggccaaacaagtagcacttttacatttgcagatgttgcaaaatcaacttcaggagaaggatttcagtttggcaaaaaagacctcaatttcaagggattttcaggtgctggagaaaaattattctcatcacgatacggtaaaatggccaataaagcaaacacttccggtgactttgagaaagatgatgatgcctataagactgaggacagcgatgacatccattttgaaccagtagttcaaatgcctgaaaaagtagaacttgtaacaggagaagaaggtgaaaaagttctgtattcacagggggtaaaactatttagatttgatgctgaggtaaggcagtggaaagaaaggggcttggggaacttaaaaattctcaaaaacgaggtcaatggcaaactaagaatgctgatgcgaagagaacaagtactaaaagtgtgtgctaatcattggataacgactacaatgaacctgaagcccctctctggatcagatagagcatggatgtggtcagccagtgatttctctgacggtgatgccaaactagagcggttggcagcaaaatttaaaacaccagagctggctgaagaattcaagcagaaatttgaggaatgccagcggcttctgttagacataccacttcaaactccccataaacttgtagatactggcagagctgccaagttaatacagagagctgaagaaatgaagagtggactgaaagatttcaaaacatttttgacaaatgatcaaacaaaagtcactgaggaagaaaataagggttcaggtacaggtgtggccggtgcctcagacacaacaataaaacccaatgctgaaaacactgggcccacattagaatgggataactatgacttaagggaagatgctttggatgatagtgtcagtagtagctcagtacatgcttctccattggcaagtagccctgtgagaaaaaatcttttccgctttgatgagtcaacaacaggatctaacttcagttttaaatctgctttgagtctatctaagtctcctgccaagttgaatcagagtgggacttcagttggcactgatgaagaatctgttgttactcaagaagaagagagagatggacagtactttgaacctgttgttcctttacctgatctagttgaagtatccagtggtgaggaaaatgaacaagttgtttttagtcacagggcagaaatctacagatatgataaagatgttggtcaatggaaagaaaggggcattggtgatataaagattttacagaattatgataataagcaagttcgtatagtgatgagaagggaccaagtattaaaactttgtgccaatcacagaataactccagacatgagtttgcaaaatatgaaagggacagaaagagtatgggtgtggactgcatgtgattttgcagatggagaaagaaaagtagagcatttagctgttcgttttaaactacaggatgttgcagactcgtttaagaaaatttttgatgaagcaaaaacagcccaggaaaaagattctttgataacacctcatgtttctcggtcaagcactcccagagagtcaccatgtggcaaaattgctgtagctntattagaagaaaccacaagagagaggacagatgttattcagggtgatgatgtagcagatgcagcttcagaagttgaagtgtctagcacatctgaaacaacaacaaaagcagtggtttctcctccaaagtttgtatttgtttcagagtctgttaaaagaatttttagtagtgaaaaatcaaaaccatttgcatttggcaacagttctgccactgggtctttgtttagatttagttttaatgcacctttgaaaagtaacaatagtgaaactagttcagtagcccagagtggatctgaaagcaaagtggaacctaaaaaatgtgaactgtcaaagaactctgatatcgaacagtcttcagatagcaaagtcaaaaatctctctgcttcctttccaacggaagaatcttcaatcaactacacatttaaaacaccagaaaaggagcctccattatggcatgctgaatttaccaaagaagaattggttcagaagctccgttccaccacaaaaagtgcagatcacttaaacggcctgcttcgggaaatagaggcaaccaatgcagtccttatggagcaaattaagcttctcaaaagtgaaataagaagattggaaaggaatcaagagcgagagaagtctgcagctaacctggaatacttgaagaacgtcttgctgcagttcattttcttgaagccaggtagtgaaagagagagacttcttcctgttataaatacgatgttgcagctcagccctgaagaaaagggaaaacttgctgcggttgctcaagatgaggaagaaaatgcttcccgttcttctggatgagcatcctatcttcgtagttggtttggacttcgataggttgatggaaggaatacttctattaactaaatagaatctgtttacaaaaatggttcgtgtgtgttaccattattcttttgtcaaaaagtgtgtatatatgtttgcatttacatatatttgtacatctgtatgacagatgtattttaaaagtttcaacttgaagtaaaagtacaacagcttgaagtgttgataccaggccacagccctctaactcatgtgatctcccatgcatgctgccagaataaaaccaccaggaatgaattcactccccacttctctggaacctcaggacccgcccatttctcggcagtactgtgaattttgaagttaaactaaattttggtaccataccaactggaatttaggctttaaaaataatgtttcaaggccaggtgtggtgattcatgcctgaaatcccactactttgggaggctgaggctggagaatcgcttgaggctagtgagctgtgattgtaccactgcactccagctcggggaacagagcgagaccttgtctctaaaaataataatagtaataaaaataacgttttatgactatttattgcaaggtcagatttacagattgttataaattgttgagaaatttttgtgattagaatatgaaggaaaaagctttgttggtaaaagtgacatgttaaggggctatgaagtaaatatgctgcagttaattgtgctaagttaaaatacagtttagttatttgctttaaaataaactcttctttttttctttaaagtatactacctcaataggtgggcccaccacttgagttgaggtgatttcatggtgtctttccaggctcttgatagggtgtcactgcatgcaagccatgaatctgttttgagaatcctctccattttcccaaataaaaacctatcccaacagtgactatatcactcagcattggatctaaatataaaagtggtgctttcagtgtttttggcagatagtgttccataacctttccatcagaagggattttagacaccttagaggtccgtgctacatcttcacagttcctccgaataaccttaggtggtagtgttacttgcctttgacacctgtgcatatgttttaatgactagatccaaactgtgttgttcttaaatcaaaaattggataatttttaatatttatgtattaatcacacagtgtgctctctgaagttctcttaagccttcagtttatactcttaattttctttctgagctggggaactgactttgcactttggttacacagaacattggtttccaatttagtttaactgaaatttgctgctgatatgttgagtttgttctttaaaaaatatctcatatatctcgtctttcctccttagaagaacagacctaactagcgaatgtatgaatgaaaatgcatctatttcagagccgacatgaagagtttagtttttttactttataaactgtgaatatgagtatgccagctgcattagatgtaactaatcatatttaaatatatttcactttgactttagaccttttgaagtctgtataaacttgttttgaaatacagtctccacttacgaatgtcataacaaaatacttttttgcatgataaaaaattactttgattacaaaaggcatattctttcatggtttctgcaatgagaggaagtgtaatgattattttaatatttctattaaaactgtatattttta

SEQ ID NO: 447361 - DNA, 8041 bp, Homo sapiens
  misc_feature (5490)..(5490): n is a, c, g, or t
gatcacagctcctgcatggatcaaggagcatcactgcagctgcaaactgcagcttcaaactctccggctcaagcgaccctcctgcctcaacctccccagtagctgggcctacaggcacgtgtgtctgtgcccaataataccacattttaaaaatccatcttcagtagatggaaatttggattgtttccaccttttactaataaaaatagtactgctataaacattcatgtataggttttcttttgtttttgttttttcttttttgtagagatgggggtctcgctgtgttgcccaggctggtctcaaattcctggactcaagtgatcctcccatcaaaaactcccaaagtgctgggattacaggcgtgagccactatgcctggcctgtatacaagtttttgtgtagacatgtttacatccaattaatgaacacaggatgtctttccattgatttagctcctctttaatttccttcaacagtgttctgtagtttccagtctacaagtcttacacttttgggttaaatttattcataattattttattatttttgataatattataaatggaattgtttacttaattttacttgaattgttccttgctggtgtataagtagacatctcatttttttagttgacctcgtatggtacaatctctttgaactcatttattatcactgatagtttaggtctttttttttcgaggtttcattaaggttttctatagataagatcatgtcaagacaccctcagaccacagggcggcgccacgagcccggccgagtgcagctggagcgccgacgtcgccgaggatacacagtgctgaggcagaacgcaggttcgtcacagtgggcctccgtgggcggcgccgcacgctcgtcacagtgggcctccgccggctacgccgctgcttcagtggcttgcaggcactttcctcttggaagtggcgactgctgcggggctgagcggtgctcgcacgcgtctcgggagccaggttggcggcgcgatgaggcgcagcaaggccgatgtggagcggtacgtcgcctcggtgctgggtctcaccccgtcgcctcgacagaagtcaatgaaaggattctattttgcaaagctgtattatgaagctaaagaatatgatcttgctaaaaaatacatatgtacttacattaatgtgcaagagagggatcccaaagctcacagatttctgggtcttctttatgaattggaagaaaacacagagaaagccgttgaatgttacaggcgttcagtggaattaaacccaacacaaaaagatcttgtgttgaagattgcagaattgctttgtaaaaatgatgttactgatggaagagcaaaatactgggtcgaaagagcagcaaaacttttcccaggaagtcctgcaatttataaactaaaggaacagcttctagattgtgaaggtgaagatggatggaataaactttttgacttgattcagtcagaactttatgtaagacctgatgacgtccatgtgaacatccggctagtggagttgtatcgctcaactaaaagattgaaggatgctgtggcccactgccatgaggcagagaggaacatagctttgcgttcaagtttagagtggaattcgtgtgttgtacagacccttaaggaatatctggagtctttacagtgtttggagtctgataaaagtgactggcaagcaaccaatacagacttactgctggcctatgctaatcttatgcttcttacgctttccactagagatgtgcaggaaaatagagaattactggaaagttttgatagtgctcttcagtctgcgaaatcttctttgggtggaaatgatgaactgtcagctactttcttagaaatgaaaggacatttctatatgtatgctggttctctgctcttgaagatgggtcagcatggtaataatgttcaatggcgagctctttctgagctggctgcattgtgctatctcatagcatttcaggttccaagaccaaagattaaattaagagaaggtaaagctggacaaaatctgctggaaatgatggcctgtgaccgactgagccaatcagggcacatgttgctaagcttaagtcgtggcaagcaagatttcttaaaagaggttgttgaaacttttgccaacaaaattgggcagtctgcgttatatgatgctctgttttctagtcagtcacctaaggatacatcttttcttggtagcgatgatattggaaaaattgatgtacaagaaccagagcttgaagatttggctagatacgatgttggtgctattcgagcacataatggtagtcttcagcatcttacttggcttggcttacagtggaattcattgcctgctttacctggaatccgaaaatggctaaaacagcttttccatcgtttgccccatgaaacctcaaggcttgaaacaaatgcgcctgaatcaatatgtattttagatcttgaagtatttctccttggagtagtatataccagccacttacaattaaaggagaaatgtaattctcaccatagctcctatcagccgttatgcctgccctttcctgtgtgtaaacagctttgtacagaaagacaaaaatcttggtgggatgcggtttgtactctgattcacagaaaagcagtacctggaaacttggcaaaattgagacttctagttcagcatgaaataaacactctaagagcccaggaaaaacatggccttcaacctgctctgcttgtacattgggcaaaataccttcagaaaacgggcagcggtcttaattctttttatggtcaactagaatacatagggagaagtgttcattattggaagaaagttttgccattgttgaagataataaagaagaacagtattcctgaacctattgatcctctgtttaaacattttcatagtgtagacattcaggcatcagaaattgttgaatatgaagaagacgcacacataacttttgctatgttggatgcagtaaatggaaatatagaagatgctgtgactgcttttgaatctataaaaagtgttgtttcttattggaatcttgcactgatttttcacaggaaggcagaagacattgaaaatgatgccctttctcctgaagaacaagaagaatgcagaaattatctgacaaagaccagggactacctaataaagattatagatgacggtgattcaaatctttcagtggtcaagaaattgcctgtgcccctggagtctgtaaaacagatgcttaattcagtcatgcaggaactcgaagactatagtgaaggaggtcctctctataaaaatggttctttgcgaaatgcagattcagaaataaaacattctacaccgtctcctaccaaatattcactatcaccaagtaaaagttacaagtattctcccgaaacaccacctcgatggacagaagatcggaattctttactgaatatgatttgccaacaagtagaggccattaagaaagaaatgcaggagttgaaactaaatagcagtaagtcagcatcccgtcatcgttggcccacagagaattatggaccagactcggtgcctgatggatatcaggggtcacagacatttcatggggctccactaacagttgcaactactggcccttcagtatattatagtcagtcaccagcatataattcccagtatcttctcagaccagcagctaatgttactcccacaaagggttcttctaatacagaatttaagtcaaccaaagaaggattttccatccctgtgtctgctgatggatttaaatttggcatttcggaaccaggaaatcaagaaaagaaaagggaaaagcctcttgaaaatgatactggcttccaggctcaggatattagtggccggaagaagggccgtggtgtgatttttggccaaacaagtagcacttttacatttgcagatgttgcaaaatcaacttcaggagaaggatttcagtttggcaaaaaagacctcaatttcaagggattttcaggtgctggagaaaaattattctcatcacgatacggtaaaatggccaataaagcaaacacttccggtgactttgagaaagatgatgatgcctataagactgaggacagcgatgacatccattttgaaccagtagttcaaatgcctgaaaaagtagaacttgtaacaggagaagaaggtgaaaaagttctgtattcacagggggtaaaactatttagatttgatgctgaggtaaggcagtggaaagaaaggggcttggggaacttaaaaattctcaaaaacgaggtcaatggcaaactaagaatgctgatgcgaagagaacaagtactaaaagtgtgtgctaatcattggataacgactacaatgaacctgaagcccctctctggatcagatagagcatggatgtggtcagccagtgatttctctgacggtgatgccaaactagagcggttggcagcaaaatttaaaacaccagagctggctgaagaattcaagcagaaatttgaggaatgccagcggcttctgttagacataccacttcaaactccccataaacttgtagatactggcagagctgccaagttaatacagagagctgaagaaatgaagagtggactgaaagatttcaaaacatttttgacaaatgatcaaacaaaagtcactgaggaagaaaataagggttcaggtacaggtgtggccggtgcctcagacacaacaataaaacccaatgctgaaaacactgggcccacattagaatgggataactatgacttaagggaagatgctttggatgatagtgtcagtagtagctcagtacatgcttctccattggcaagtagccctgtgagaaaaaatcttttccgctttgatgagtcaacaacaggatctaacttcagttttaaatctgctttgagtctatctaagtctcctgccaagttgaatcagagtgggacttcagttggcactgatgaagaatctgttgttactcaagaagaagagagagatggacagtactttgaacctgttgttcctttacctgatctagttgaagtatccagtggtgaggaaaatgaacaagttgtttttagtcacagggcagaaatctacagatatgataaagatgttggtcaatggaaagaaaggggcattggtgatataaagattttacagaattatgataataagcaagttcgtatagtgatgagaagggaccaagtattaaaactttgtgccaatcacagaataactccagacatgagtttgcaaaatatgaaagggacagaaagagtatgggtgtggactgcatgtgattttgcagatggagaaagaaaagtagagcatttagctgttcgttttaaactacaggatgttgcagactcgtttaagaaaatttttgatgaagcaaaaacagcccaggaaaaagattctttgataacacctcatgtttctcggtcaagcactcccagagagtcaccatgtggcaaaattgctgtagctntattagaagaaaccacaagagagaggacagatgttattcagggtgatgatgtagcagatgcagcttcagaagttgaagtgtctagcacatctgaaacaacaacaaaagcagtggtttctcctccaaagtttgtatttgtttcagagtctgttaaaagaatttttagtagtgaaaaatcaaaaccatttgcatttggcaacagttctgccactgggtctttgtttagatttagttttaatgcacctttgaaaagtaacaatagtgaaactagttcagtagcccagagtggatctgaaagcaaagtggaacctaaaaaatgtgaactgtcaaagaactctgatatcgaacagtcttcagatagcaaagtcaaaaatctctctgcttcctttccaacggaagaatcttcaatcaactacacatttaaaacaccagaaaaggagcctccattatggcatgctgaatttaccaaagaagaattggttcagaagctccgttccaccacaaaaagtgcagatcacttaaacggcctgcttcgggaaatagaggcaaccaatgcagtccttatggagcaaattaagcttctcaaaagtgaaataagaagattggaaaggaatcaagagcgagagaagtctgcagctaacctggaatacttgaagaacgtcttgctgcagttcattttcttgaagccaggtagtgaaagagagagacttcttcctgttataaatacgatgttgcagctcagccctgaagaaaagggaaaacttgctgcggttgctcaagatgaggaagaaaatgcttcccgttcttctggatgagcatcctatcttcgtagttggtttggacttcgataggttgatggaaggaatacttctattaactaaatagaatctgtttacaaaaatggttcgtgtgtgttaccattattcttttgtcaaaaagtgtgtatatatgtttgcatttacatatatttgtacatctgtatgacagatgtattttaaaagtttcaacttgaagtaaaagtacaacagcttgaagtgttgataccaggccacagccctctaactcatgtgatctcccatgcatgctgccagaataaaaccaccaggaatgaattcactccccacttctctggaacctcaggacccgcccatttctcggcagtactgtgaattttgaagttaaactaaattttggtaccataccaactggaatttaggctttaaaaataatgtttcaaggccaggtgtggtgattcatgcctgaaatcccactactttgggaggctgaggctggagaatcgcttgaggctagtgagctgtgattgtaccactgcactccagctcggggaacagagcgagaccttgtctctaaaaataataatagtaataaaaataacgttttatgactatttattgcaaggtcagatttacagattgttataaattgttgagaaatttttgtgattagaatatgaaggaaaaagctttgttggtaaaagtgacatgttaaggggctatgaagtaaatatgctgcagttaattgtgctaagttaaaatacagtttagttatttgctttaaaataaactcttctttttttctttaaagtatactacctcaaaactcattatgttgtcagagccctagagctggctagtgtaacactgactatgagtaggtgggcccaccacttgagttgaggtgatttcatggtgtctttccaggctcttgatagggtgtcactgcatgcaagccatgaatctgttttgagaatcctctccattttcccaaataaaaacctatcccaacagtgactatatcactcagcattggatctaaatataaaagtggtgctttcagtgtttttggcagatagtgttccataacctttccatcagaagggattttagacaccttagaggtccgtgctacatcttcacagttcctccgaataaccttaggtggtagtgttacttgcctttgacacctgtgcatatgttttaatgactagatccaaactgtgttgttcttaaatcaattctcttaagccttcagtttatactcttaattttctttctgagctggggaactgactttgcactttggttacacagaacattggtttccaatttagtttaactgaaatttgctgctgatatgttgagtttgttctttaaaaaatatctcatatatctcgtctttcctccttagaagaacagacctaactagcgaatgtatgaatgaaaatgcatctatttcagagccgacatgaagagtttagtttttttactttataaactgtgaatatgagtatgccagctgcattagatgtaactaatcatatttaaatatatttcactttgactttagaccttttgaagtctgtataaacttgttttgaaatacagtctccacttacgaatgtcataacaaaatacttttttgcatgataaaaaattactttgattacaaaaggcatattctttcatggtttctgcaatgagaggaagtgtaatgattattttaatatttctattaaaactgtatattttta

SEQ ID NO: 447362 - DNA, 2287 bp, Homo sapiens
aagaaagcagacctataaaatatcacatagtaagatatttatatttagatttttcttatttagaatcttcatctgtaatgtatgattttgaaaattaattcttggaacaacatcttgcagagcctccattatggcatgctgaatttaccaaagaagaattggttcagaagctccgttccaccacaaaaagtgcagatcacttaaacggcctgcttcgggaaatagaggcaaccaatgcagtccttatggagcaaattaagcttctcaaaagtgaaataagaagattggaaaggaatcaagagcgagagaagtctgcagctaacctggaatacttgaagaacgtcttgctgcagttcattttcttgaagccaggtagtgaaagagagagacttcttcctgttataaatacgatgttgcagctcagccctgaagaaaagggaaaacttgctgcggttgctcaagatgaggaagaaaatgcttcccgttcttctggatgagcatcctatcttcgtagttggtttggacttcgataggttgatggaaggaatacttctattaactaaatagaatctgtttacaaaaatggttcgtgtgtgttaccattattcttttgtcaaaaagtgtgtatatatgtttgcatttacatatatttgtacatctgtatgacagatgtattttaaaagtttcaacttgaagtaaaagtacaacagcttgaagtgttgataccaggccacagccctctaactcatgtgatctcccatgcatgctgccagaataaaaccaccaggaatgaattcactccccacttctctggaacctcaggacccgcccatttctcggcagtactgtgaattttgaagttaaactaaattttggtaccataccaactggaatttaggctttaaaaataatgtttcaaggccaggtgtggtgattcatgcctgaaatcccactactttgggaggctgaggctggagaatcgcttgaggctagtgagctgtgattgtaccactgcactccagctcggggaacagagcgagaccttgtctctaaaaataataatagtaataaaaataacgttttatgactatttattgcaaggtcagatttacagattgttataaattgttgagaaatttttgtgattagaatatgaaggaaaaagctttgttggtaaaagtgacatgttaaggggctatgaagtaaatatgctgcagttaattgtgctaagttaaaatacagtttagttatttgctttaaaataaactcttctttttttctttaaagtatactacctcaaaactcattatgttgtcagagccctagagctggctagtgtaacactgactatgagtaggtgggcccaccacttgagttgaggtgatttcatggtgtctttccaggctcttgatagggtgtcactgcatgcaagccatgaatctgttttgagaatcctctccattttcccaaataaaaacctatcccaacagtgactatatcactcagcattggatctaaatataaaagtggtgctttcagtgtttttggcagatagtgttccataacctttccatcagaagggattttagacaccttagaggtccgtgctacatcttcacagttcctccgaataaccttaggtggtagtgttacttgcctttgacacctgtgcatatgttttaatgactagatccaaactgtgttgttcttaaatcaaaaattggataatttttaatatttatgtattaatcacacagtgtgctctctgaagttctcttaagccttcagtttatactcttaattttctttctgagctggggaactgactttgcactttggttacacagaacattggtttccaatttagtttaactgaaatttgctgctgatatgttgagtttgttctttaaaaaatatctcatatatctcgtctttcctccttagaagaacagacctaactagcgaatgtatgaatgaaaatgcatctatttcagagccgacatgaagagtttagtttttttactttataaactgtgaatatgagtatgccagctgcattagatgtaactaatcatatttaaatatatttcactttgactttagaccttttgaagtctgtataaacttgttttgaaatacagtctccacttacgaatgtcataacaaaatacttttttgcatgataaaaaattactttgattacaaaaggcatattctttcatggtttctgcaatgagaggaagtgtaatgattattttaatatttctattaaaactgtatattttta

SEQ ID NO: 447363 - DNA, 2300 bp, Homo sapiens
ctttaaagttccaaagaatttattatcaaaactaaaacaaaacttcagttgtacataaagtaataaactttacaacagctgttaagagaaagtcgtgatgtaagtttatacacatttaaaacaccagaaaaggagcctccattatggcatgctgaatttaccaaagaagaattggttcagaagctccgttccaccacaaaaagtgcagatcacttaaacggcctgcttcgggaaatagaggcaaccaatgcagtccttatggagcaaattaagcttctcaaaagtgaaataagaagattggaaaggaatcaagagcgagagaagtctgcagctaacctggaatacttgaagaacgtcttgctgcagttcattttcttgaagccaggtagtgaaagagagagacttcttcctgttataaatacgatgttgcagctcagccctgaagaaaagggaaaacttgctgcggttgctcaagatgaggaagaaaatgcttcccgttcttctggatgagcatcctatcttcgtagttggtttggacttcgataggttgatggaaggaatacttctattaactaaatagaatctgtttacaaaaatggttcgtgtgtgttaccattattcttttgtcaaaaagtgtgtatatatgtttgcatttacatatatttgtacatctgtatgacagatgtattttaaaagtttcaacttgaagtaaaagtacaacagcttgaagtgttgataccaggccacagccctctaactcatgtgatctcccatgcatgctgccagaataaaaccaccaggaatgaattcactccccacttctctggaacctcaggacccgcccatttctcggcagtactgtgaattttgaagttaaactaaattttggtaccataccaactggaatttaggctttaaaaataatgtttcaaggccaggtgtggtgattcatgcctgaaatcccactactttgggaggctgaggctggagaatcgcttgaggctagtgagctgtgattgtaccactgcactccagctcggggaacagagcgagaccttgtctctaaaaataataatagtaataaaaataacgttttatgactatttattgcaaggtcagatttacagattgttataaattgttgagaaatttttgtgattagaatatgaaggaaaaagctttgttggtaaaagtgacatgttaaggggctatgaagtaaatatgctgcagttaattgtgctaagttaaaatacagtttagttatttgctttaaaataaactcttctttttttctttaaagtatactacctcaaaactcattatgttgtcagagccctagagctggctagtgtaacactgactatgagtaggtgggcccaccacttgagttgaggtgatttcatggtgtctttccaggctcttgatagggtgtcactgcatgcaagccatgaatctgttttgagaatcctctccattttcccaaataaaaacctatcccaacagtgactatatcactcagcattggatctaaatataaaagtggtgctttcagtgtttttggcagatagtgttccataacctttccatcagaagggattttagacaccttagaggtccgtgctacatcttcacagttcctccgaataaccttaggtggtagtgttacttgcctttgacacctgtgcatatgttttaatgactagatccaaactgtgttgttcttaaatcaaaaattggataatttttaatatttatgtattaatcacacagtgtgctctctgaagttctcttaagccttcagtttatactcttaattttctttctgagctggggaactgactttgcactttggttacacagaacattggtttccaatttagtttaactgaaatttgctgctgatatgttgagtttgttctttaaaaaatatctcatatatctcgtctttcctccttagaagaacagacctaactagcgaatgtatgaatgaaaatgcatctatttcagagccgacatgaagagtttagtttttttactttataaactgtgaatatgagtatgccagctgcattagatgtaactaatcatatttaaatatatttcactttgactttagaccttttgaagtctgtataaacttgttttgaaatacagtctccacttacgaatgtcataacaaaatacttttttgcatgataaaaaattactttgattacaaaaggcatattctttcatggtttctgcaatgagaggaagtgtaatgattattttaatatttctattaaaactgtatattttta

SEQ ID NO: 447364 - DNA, 2299 bp, Homo sapiens
agcaatccactttctaggcaaatgcagctttgaaactatctcatagttggagttccggttttcatgtcaaatggattttatacggtgatgtcataaactcctttgaaatgcttcacatgcagctgctgtagttaactgaattccttcctttattgccatatggagggaagggggaaatttggggggaagagaagaaaaatacatgagttcagtctgccatatttaatcagaagctcctaaagcccatttttaactcatttctctaacaccagcttctcaaaagtgaaataagaagattggaaaggaatcaagagcgagagaagtctgcagctaacctggaatacttgaagaacgtcttgctgcagttcattttcttgaagccaggtagtgaaagagagagacttcttcctgttataaatacgatgttgcagctcagccctgaagaaaagggaaaacttgctgcggttgctcaagatgaggaagaaaatgcttcccgttcttctggatgagcatcctatcttcgtagttggtttggacttcgataggttgatggaaggaatacttctattaactaaatagaatctgtttacaaaaatggttcgtgtgtgttaccattattcttttgtcaaaaagtgtgtatatatgtttgcatttacatatatttgtacatctgtatgacagatgtattttaaaagtttcaacttgaagtaaaagtacaacagcttgaagtgttgataccaggccacagccctctaactcatgtgatctcccatgcatgctgccagaataaaaccaccaggaatgaattcactccccacttctctggaacctcaggacccgcccatttctcggcagtactgtgaattttgaagttaaactaaattttggtaccataccaactggaatttaggctttaaaaataatgtttcaaggccaggtgtggtgattcatgcctgaaatcccactactttgggaggctgaggctggagaatcgcttgaggctagtgagctgtgattgtaccactgcactccagctcggggaacagagcgagaccttgtctctaaaaataataatagtaataaaaataacgttttatgactatttattgcaaggtcagatttacagattgttataaattgttgagaaatttttgtgattagaatatgaaggaaaaagctttgttggtaaaagtgacatgttaaggggctatgaagtaaatatgctgcagttaattgtgctaagttaaaatacagtttagttatttgctttaaaataaactcttctttttttctttaaagtatactacctcaaaactcattatgttgtcagagccctagagctggctagtgtaacactgactatgagtaggtgggcccaccacttgagttgaggtgatttcatggtgtctttccaggctcttgatagggtgtcactgcatgcaagccatgaatctgttttgagaatcctctccattttcccaaataaaaacctatcccaacagtgactatatcactcagcattggatctaaatataaaagtggtgctttcagtgtttttggcagatagtgttccataacctttccatcagaagggattttagacaccttagaggtccgtgctacatcttcacagttcctccgaataaccttaggtggtagtgttacttgcctttgacacctgtgcatatgttttaatgactagatccaaactgtgttgttcttaaatcaaaaattggataatttttaatatttatgtattaatcacacagtgtgctctctgaagttctcttaagccttcagtttatactcttaattttctttctgagctggggaactgactttgcactttggttacacagaacattggtttccaatttagtttaactgaaatttgctgctgatatgttgagtttgttctttaaaaaatatctcatatatctcgtctttcctccttagaagaacagacctaactagcgaatgtatgaatgaaaatgcatctatttcagagccgacatgaagagtttagtttttttactttataaactgtgaatatgagtatgccagctgcattagatgtaactaatcatatttaaatatatttcactttgactttagaccttttgaagtctgtataaacttgttttgaaatacagtctccacttacgaatgtcataacaaaatacttttttgcatgataaaaaattactttgattacaaaaggcatattctttcatggtttctgcaatgagaggaagtgtaatgattattttaatatttctattaaaactgtatattttta

SEQ ID NO: 447365 - DNA, 6386 bp, Homo sapiens
  misc_feature (5490)..(5490): n is a, c, g, or t
gatcacagctcctgcatggatcaaggagcatcactgcagctgcaaactgcagcttcaaactctccggctcaagcgaccctcctgcctcaacctccccagtagctgggcctacaggcacgtgtgtctgtgcccaataataccacattttaaaaatccatcttcagtagatggaaatttggattgtttccaccttttactaataaaaatagtactgctataaacattcatgtataggttttcttttgtttttgttttttcttttttgtagagatgggggtctcgctgtgttgcccaggctggtctcaaattcctggactcaagtgatcctcccatcaaaaactcccaaagtgctgggattacaggcgtgagccactatgcctggcctgtatacaagtttttgtgtagacatgtttacatccaattaatgaacacaggatgtctttccattgatttagctcctctttaatttccttcaacagtgttctgtagtttccagtctacaagtcttacacttttgggttaaatttattcataattattttattatttttgataatattataaatggaattgtttacttaattttacttgaattgttccttgctggtgtataagtagacatctcatttttttagttgacctcgtatggtacaatctctttgaactcatttattatcactgatagtttaggtctttttttttcgaggtttcattaaggttttctatagataagatcatgtcaagacaccctcagaccacagggcggcgccacgagcccggccgagtgcagctggagcgccgacgtcgccgaggatacacagtgctgaggcagaacgcaggttcgtcacagtgggcctccgtgggcggcgccgcacgctcgtcacagtgggcctccgccggctacgccgctgcttcagtggcttgcaggcactttcctcttggaagtggcgactgctgcggggctgagcggtgctcgcacgcgtctcgggagccaggttggcggcgcgatgaggcgcagcaaggccgatgtggagcggtacgtcgcctcggtgctgggtctcaccccgtcgcctcgacagaagtcaatgaaaggattctattttgcaaagctgtattatgaagctaaagaatatgatcttgctaaaaaatacatatgtacttacattaatgtgcaagagagggatcccaaagctcacagatttctgggtcttctttatgaattggaagaaaacacagagaaagccgttgaatgttacaggcgttcagtggaattaaacccaacacaaaaagatcttgtgttgaagattgcagaattgctttgtaaaaatgatgttactgatggaagagcaaaatactgggtcgaaagagcagcaaaacttttcccaggaagtcctgcaatttataaactaaaggaacagcttctagattgtgaaggtgaagatggatggaataaactttttgacttgattcagtcagaactttatgtaagacctgatgacgtccatgtgaacatccggctagtggagttgtatcgctcaactaaaagattgaaggatgctgtggcccactgccatgaggcagagaggaacatagctttgcgttcaagtttagagtggaattcgtgtgttgtacagacccttaaggaatatctggagtctttacagtgtttggagtctgataaaagtgactggcaagcaaccaatacagacttactgctggcctatgctaatcttatgcttcttacgctttccactagagatgtgcaggaaaatagagaattactggaaagttttgatagtgctcttcagtctgcgaaatcttctttgggtggaaatgatgaactgtcagctactttcttagaaatgaaaggacatttctatatgtatgctggttctctgctcttgaagatgggtcagcatggtaataatgttcaatggcgagctctttctgagctggctgcattgtgctatctcatagcatttcaggttccaagaccaaagattaaattaagagaaggtaaagctggacaaaatctgctggaaatgatggcctgtgaccgactgagccaatcagggcacatgttgctaagcttaagtcgtggcaagcaagatttcttaaaagaggttgttgaaacttttgccaacaaaattgggcagtctgcgttatatgatgctctgttttctagtcagtcacctaaggatacatcttttcttggtagcgatgatattggaaaaattgatgtacaagaaccagagcttgaagatttggctagatacgatgttggtgctattcgagcacataatggtagtcttcagcatcttacttggcttggcttacagtggaattcattgcctgctttacctggaatccgaaaatggctaaaacagcttttccatcgtttgccccatgaaacctcaaggcttgaaacaaatgcgcctgaatcaatatgtattttagatcttgaagtatttctccttggagtagtatataccagccacttacaattaaaggagaaatgtaattctcaccatagctcctatcagccgttatgcctgccctttcctgtgtgtaaacagctttgtacagaaagacaaaaatcttggtgggatgcggtttgtactctgattcacagaaaagcagtacctggaaacttggcaaaattgagacttctagttcagcatgaaataaacactctaagagcccaggaaaaacatggccttcaacctgctctgcttgtacattgggcaaaataccttcagaaaacgggcagcggtcttaattctttttatggtcaactagaatacatagggagaagtgttcattattggaagaaagttttgccattgttgaagataataaagaagaacagtattcctgaacctattgatcctctgtttaaacattttcatagtgtagacattcaggcatcagaaattgttgaatatgaagaagacgcacacataacttttgctatgttggatgcagtaaatggaaatatagaagatgctgtgactgcttttgaatctataaaaagtgttgtttcttattggaatcttgcactgatttttcacaggaaggcagaagacattgaaaatgatgccctttctcctgaagaacaagaagaatgcagaaattatctgacaaagaccagggactacctaataaagattatagatgacggtgattcaaatctttcagtggtcaagaaattgcctgtgcccctggagtctgtaaaacagatgcttaattcagtcatgcaggaactcgaagactatagtgaaggaggtcctctctataaaaatggttctttgcgaaatgcagattcagaaataaaacattctacaccgtctcctaccaaatattcactatcaccaagtaaaagttacaagtattctcccgaaacaccacctcgatggacagaagatcggaattctttactgaatatgatttgccaacaagtagaggccattaagaaagaaatgcaggagttgaaactaaatagcagtaagtcagcatcccgtcatcgttggcccacagagaattatggaccagactcggtgcctgatggatatcaggggtcacagacatttcatggggctccactaacagttgcaactactggcccttcagtatattatagtcagtcaccagcatataattcccagtatcttctcagaccagcagctaatgttactcccacaaagggttcttctaatacagaatttaagtcaaccaaagaaggattttccatccctgtgtctgctgatggatttaaatttggcatttcggaaccaggaaatcaagaaaagaaaagggaaaagcctcttgaaaatgatactggcttccaggctcaggatattagtggccggaagaagggccgtggtgtgatttttggccaaacaagtagcacttttacatttgcagatgttgcaaaatcaacttcaggagaaggatttcagtttggcaaaaaagacctcaatttcaagggattttcaggtgctggagaaaaattattctcatcacgatacggtaaaatggccaataaagcaaacacttccggtgactttgagaaagatgatgatgcctataagactgaggacagcgatgacatccattttgaaccagtagttcaaatgcctgaaaaagtagaacttgtaacaggagaagaaggtgaaaaagttctgtattcacagggggtaaaactatttagatttgatgctgaggtaaggcagtggaaagaaaggggcttggggaacttaaaaattctcaaaaacgaggtcaatggcaaactaagaatgctgatgcgaagagaacaagtactaaaagtgtgtgctaatcattggataacgactacaatgaacctgaagcccctctctggatcagatagagcatggatgtggtcagccagtgatttctctgacggtgatgccaaactagagcggttggcagcaaaatttaaaacaccagagctggctgaagaattcaagcagaaatttgaggaatgccagcggcttctgttagacataccacttcaaactccccataaacttgtagatactggcagagctgccaagttaatacagagagctgaagaaatgaagagtggactgaaagatttcaaaacatttttgacaaatgatcaaacaaaagtcactgaggaagaaaataagggttcaggtacaggtgtggccggtgcctcagacacaacaataaaacccaatgctgaaaacactgggcccacattagaatgggataactatgacttaagggaagatgctttggatgatagtgtcagtagtagctcagtacatgcttctccattggcaagtagccctgtgagaaaaaatcttttccgctttgatgagtcaacaacaggatctaacttcagttttaaatctgctttgagtctatctaagtctcctgccaagttgaatcagagtgggacttcagttggcactgatgaagaatctgttgttactcaagaagaagagagagatggacagtactttgaacctgttgttcctttacctgatctagttgaagtatccagtggtgaggaaaatgaacaagttgtttttagtcacagggcagaaatctacagatatgataaagatgttggtcaatggaaagaaaggggcattggtgatataaagattttacagaattatgataataagcaagttcgtatagtgatgagaagggaccaagtattaaaactttgtgccaatcacagaataactccagacatgagtttgcaaaatatgaaagggacagaaagagtatgggtgtggactgcatgtgattttgcagatggagaaagaaaagtagagcatttagctgttcgttttaaactacaggatgttgcagactcgtttaagaaaatttttgatgaagcaaaaacagcccaggaaaaagattctttgataacacctcatgtttctcggtcaagcactcccagagagtcaccatgtggcaaaattgctgtagctntattagaagaaaccacaagagagaggacagatgttattcagggtgatgatgtagcagatgcagcttcagaagttgaagtgtctagcacatctgaaacaacaacaaaagcagtggtttctcctccaaagtttgtatttgtttcagagtctgttaaaagaatttttagtagtgaaaaatcaaaaccatttgcatttggcaacagttctgccactgggtctttgtttagatttagttttaatgcacctttgaaaagtaacaatagtgaaactagttcagtagcccagagtggatctgaaagcaaagtggaacctaaaaaatgtgaactgtcaaagaactctgatatcgaacagtcttcagatagcaaagtcaaaaatctctctgcttcctttccaacggaagaatcttcaatcaactacacatttaaaacaccagaaaaggagcctccattatggcatgctgaatttaccaaagaagaattggttcagaagctccgttccaccacaaaaagtgcagatcacttaaacggcctgcttcgggaaatagaggcaaccaatgcagtccttatggagcaaattaagcttctcaaaagtgaaataagaagattggaaaggaatcaagagcgagagaagtctgcagctaacctggaatacttgaagaacgtcttgctgcagttcattttcttgaagccaggtagtgaaagagagagacttcttcctgttataaatacgatgttgcagctcagccctgaagaaaagggaaaacttgctgcggttgctcaagatgaggaagaaaatgcttcccgttcttctggatgagcatcctatcttcgtagttggtttggacttcgataggttgatggaaggaatacttctattaactaaatagaatctgtttac

SEQ ID NO: 447366 - DNA, 7023 bp, Homo sapiens
  misc_feature (5490)..(5490): n is a, c, g, or t
gatcacagctcctgcatggatcaaggagcatcactgcagctgcaaactgcagcttcaaactctccggctcaagcgaccctcctgcctcaacctccccagtagctgggcctacaggcacgtgtgtctgtgcccaataataccacattttaaaaatccatcttcagtagatggaaatttggattgtttccaccttttactaataaaaatagtactgctataaacattcatgtataggttttcttttgtttttgttttttcttttttgtagagatgggggtctcgctgtgttgcccaggctggtctcaaattcctggactcaagtgatcctcccatcaaaaactcccaaagtgctgggattacaggcgtgagccactatgcctggcctgtatacaagtttttgtgtagacatgtttacatccaattaatgaacacaggatgtctttccattgatttagctcctctttaatttccttcaacagtgttctgtagtttccagtctacaagtcttacacttttgggttaaatttattcataattattttattatttttgataatattataaatggaattgtttacttaattttacttgaattgttccttgctggtgtataagtagacatctcatttttttagttgacctcgtatggtacaatctctttgaactcatttattatcactgatagtttaggtctttttttttcgaggtttcattaaggttttctatagataagatcatgtcaagacaccctcagaccacagggcggcgccacgagcccggccgagtgcagctggagcgccgacgtcgccgaggatacacagtgctgaggcagaacgcaggttcgtcacagtgggcctccgtgggcggcgccgcacgctcgtcacagtgggcctccgccggctacgccgctgcttcagtggcttgcaggcactttcctcttggaagtggcgactgctgcggggctgagcggtgctcgcacgcgtctcgggagccaggttggcggcgcgatgaggcgcagcaaggccgatgtggagcggtacgtcgcctcggtgctgggtctcaccccgtcgcctcgacagaagtcaatgaaaggattctattttgcaaagctgtattatgaagctaaagaatatgatcttgctaaaaaatacatatgtacttacattaatgtgcaagagagggatcccaaagctcacagatttctgggtcttctttatgaattggaagaaaacacagagaaagccgttgaatgttacaggcgttcagtggaattaaacccaacacaaaaagatcttgtgttgaagattgcagaattgctttgtaaaaatgatgttactgatggaagagcaaaatactgggtcgaaagagcagcaaaacttttcccaggaagtcctgcaatttataaactaaaggaacagcttctagattgtgaaggtgaagatggatggaataaactttttgacttgattcagtcagaactttatgtaagacctgatgacgtccatgtgaacatccggctagtggagttgtatcgctcaactaaaagattgaaggatgctgtggcccactgccatgaggcagagaggaacatagctttgcgttcaagtttagagtggaattcgtgtgttgtacagacccttaaggaatatctggagtctttacagtgtttggagtctgataaaagtgactggcaagcaaccaatacagacttactgctggcctatgctaatcttatgcttcttacgctttccactagagatgtgcaggaaaatagagaattactggaaagttttgatagtgctcttcagtctgcgaaatcttctttgggtggaaatgatgaactgtcagctactttcttagaaatgaaaggacatttctatatgtatgctggttctctgctcttgaagatgggtcagcatggtaataatgttcaatggcgagctctttctgagctggctgcattgtgctatctcatagcatttcaggttccaagaccaaagattaaattaagagaaggtaaagctggacaaaatctgctggaaatgatggcctgtgaccgactgagccaatcagggcacatgttgctaagcttaagtcgtggcaagcaagatttcttaaaagaggttgttgaaacttttgccaacaaaattgggcagtctgcgttatatgatgctctgttttctagtcagtcacctaaggatacatcttttcttggtagcgatgatattggaaaaattgatgtacaagaaccagagcttgaagatttggctagatacgatgttggtgctattcgagcacataatggtagtcttcagcatcttacttggcttggcttacagtggaattcattgcctgctttacctggaatccgaaaatggctaaaacagcttttccatcgtttgccccatgaaacctcaaggcttgaaacaaatgcgcctgaatcaatatgtattttagatcttgaagtatttctccttggagtagtatataccagccacttacaattaaaggagaaatgtaattctcaccatagctcctatcagccgttatgcctgccctttcctgtgtgtaaacagctttgtacagaaagacaaaaatcttggtgggatgcggtttgtactctgattcacagaaaagcagtacctggaaacttggcaaaattgagacttctagttcagcatgaaataaacactctaagagcccaggaaaaacatggccttcaacctgctctgcttgtacattgggcaaaataccttcagaaaacgggcagcggtcttaattctttttatggtcaactagaatacatagggagaagtgttcattattggaagaaagttttgccattgttgaagataataaagaagaacagtattcctgaacctattgatcctctgtttaaacattttcatagtgtagacattcaggcatcagaaattgttgaatatgaagaagacgcacacataacttttgctatgttggatgcagtaaatggaaatatagaagatgctgtgactgcttttgaatctataaaaagtgttgtttcttattggaatcttgcactgatttttcacaggaaggcagaagacattgaaaatgatgccctttctcctgaagaacaagaagaatgcagaaattatctgacaaagaccagggactacctaataaagattatagatgacggtgattcaaatctttcagtggtcaagaaattgcctgtgcccctggagtctgtaaaacagatgcttaattcagtcatgcaggaactcgaagactatagtgaaggaggtcctctctataaaaatggttctttgcgaaatgcagattcagaaataaaacattctacaccgtctcctaccaaatattcactatcaccaagtaaaagttacaagtattctcccgaaacaccacctcgatggacagaagatcggaattctttactgaatatgatttgccaacaagtagaggccattaagaaagaaatgcaggagttgaaactaaatagcagtaagtcagcatcccgtcatcgttggcccacagagaattatggaccagactcggtgcctgatggatatcaggggtcacagacatttcatggggctccactaacagttgcaactactggcccttcagtatattatagtcagtcaccagcatataattcccagtatcttctcagaccagcagctaatgttactcccacaaagggttcttctaatacagaatttaagtcaaccaaagaaggattttccatccctgtgtctgctgatggatttaaatttggcatttcggaaccaggaaatcaagaaaagaaaagggaaaagcctcttgaaaatgatactggcttccaggctcaggatattagtggccggaagaagggccgtggtgtgatttttggccaaacaagtagcacttttacatttgcagatgttgcaaaatcaacttcaggagaaggatttcagtttggcaaaaaagacctcaatttcaagggattttcaggtgctggagaaaaattattctcatcacgatacggtaaaatggccaataaagcaaacacttccggtgactttgagaaagatgatgatgcctataagactgaggacagcgatgacatccattttgaaccagtagttcaaatgcctgaaaaagtagaacttgtaacaggagaagaaggtgaaaaagttctgtattcacagggggtaaaactatttagatttgatgctgaggtaaggcagtggaaagaaaggggcttggggaacttaaaaattctcaaaaacgaggtcaatggcaaactaagaatgctgatgcgaagagaacaagtactaaaagtgtgtgctaatcattggataacgactacaatgaacctgaagcccctctctggatcagatagagcatggatgtggtcagccagtgatttctctgacggtgatgccaaactagagcggttggcagcaaaatttaaaacaccagagctggctgaagaattcaagcagaaatttgaggaatgccagcggcttctgttagacataccacttcaaactccccataaacttgtagatactggcagagctgccaagttaatacagagagctgaagaaatgaagagtggactgaaagatttcaaaacatttttgacaaatgatcaaacaaaagtcactgaggaagaaaataagggttcaggtacaggtgtggccggtgcctcagacacaacaataaaacccaatgctgaaaacactgggcccacattagaatgggataactatgacttaagggaagatgctttggatgatagtgtcagtagtagctcagtacatgcttctccattggcaagtagccctgtgagaaaaaatcttttccgctttgatgagtcaacaacaggatctaacttcagttttaaatctgctttgagtctatctaagtctcctgccaagttgaatcagagtgggacttcagttggcactgatgaagaatctgttgttactcaagaagaagagagagatggacagtactttgaacctgttgttcctttacctgatctagttgaagtatccagtggtgaggaaaatgaacaagttgtttttagtcacagggcagaaatctacagatatgataaagatgttggtcaatggaaagaaaggggcattggtgatataaagattttacagaattatgataataagcaagttcgtatagtgatgagaagggaccaagtattaaaactttgtgccaatcacagaataactccagacatgagtttgcaaaatatgaaagggacagaaagagtatgggtgtggactgcatgtgattttgcagatggagaaagaaaagtagagcatttagctgttcgttttaaactacaggatgttgcagactcgtttaagaaaatttttgatgaagcaaaaacagcccaggaaaaagattctttgataacacctcatgtttctcggtcaagcactcccagagagtcaccatgtggcaaaattgctgtagctntattagaagaaaccacaagagagaggacagatgttattcagggtgatgatgtagcagatgcagcttcagaagttgaagtgtctagcacatctgaaacaacaacaaaagcagtggtttctcctccaaagtttgtatttgtttcagagtctgttaaaagaatttttagtagtgaaaaatcaaaaccatttgcatttggcaacagttctgccactgggtctttgtttagatttagttttaatgcacctttgaaaagtaacaatagtgaaactagttcagtagcccagagtggatctgaaagcaaagtggaacctaaaaaatgtgaactgtcaaagaactctgatatcgaacagtcttcagatagcaaagtcaaaaatctctctgcttcctttccaacggaagaatcttcaatcaactacacatttaaaacaccagaaaaggagcctccattatggcatgctgaatttaccaaagaagaattggttcagaagctccgttccaccacaaaaagtgcagatcacttaaacggcctgcttcgggaaatagaggcaaccaatgcagtccttatggagcaaattaagcttctcaaaagtgaaataagaagattggaaaggaatcaagagcgagagaagtctgcagctaacctggaatacttgaagaacgtcttgctgcagttcattttcttgaagccaggtagtgaaagagagagacttcttcctgttataaatacgatgttgcagctcagccctgaagaaaagggaaaacttgctgcggttgctcaaggtgggtaaaaggagagtctcagaacttctgacttctaacttaaactaaacagcctggtggttgagaagttgtctgtatgtgtaacttttcaattttgctcatttgaattgggtctgtcatatgagtaggccgtgactagatttgaaaagctgactttttaacatcttgaggcaactgtagtacatttatataattttaacgttcagcaaaatacaataagtgcttagcttgatcttctagctctttgaaaattggatttttatcctggtggttgagttctggtgttcagctgaacgtggttttgttttaaattctactttttaaaaaacatttattagcttgttccttttctacttcacgcctcttccttcctccaaccccaaatagcctaagacaatggagccatagagcccaacacttggtctatatacagcagtccactttctaggcaaatgcagttttaaaactgtgccataggccaggcgccggtggttcacgcctataatcccaccactttgggaggccgaggcaggcggatcacaagatcaagataccgagaccatcctggccaacatggtgaaatctcgtctctactaaaaatacaaaaattagctggacgtggtggcatgcgcctgtagtcccagctactcaggaggctgaggcagcagagtcgcttgaactcacgaggcggaggttgcagtgatgtgtcacgccactgtactccagcctgatggcagagcgagactccatctc

SEQ ID NO: 447367 - DNA, 3193 bp, Homo sapiens
  misc_feature (3080)..(3080): n is a, c, g, or t
  misc_feature (3099)..(3099): n is a, c, g, or t
  misc_feature (3107)..(3107): n is a, c, g, or t
  misc_feature (3167)..(3167): n is a, c, g, or t
gatcacagctcctgcatggatcaaggagcatcactgcagctgcaaactgcagcttcaaactctccggctcaagcgaccctcctgcctcaacctccccagtagctgggcctacaggcacgtgtgtctgtgcccaataataccacattttaaaaatccatcttcagtagatggaaatttggattgtttccaccttttactaataaaaatagtactgctataaacattcatgtataggttttcttttgtttttgttttttcttttttgtagagatgggggtctcgctgtgttgcccaggctggtctcaaattcctggactcaagtgatcctcccatcaaaaactcccaaagtgctgggattacaggcgtgagccactatgcctggcctgtatacaagtttttgtgtagacatgtttacatccaattaatgaacacaggatgtctttccattgatttagctcctctttaatttccttcaacagtgttctgtagtttccagtctacaagtcttacacttttgggttaaatttattcataattattttattatttttgataatattataaatggaattgtttacttaattttacttgaattgttccttgctggtgtataagtagacatctcatttttttagttgacctcgtatggtacaatctctttgaactcatttattatcactgatagtttaggtctttttttttcgaggtttcattaaggttttctatagataagatcatgtcaagacaccctcagaccacagggcggcgccacgagcccggccgagtgcagctggagcgccgacgtcgccgaggatacacagtgctgaggcagaacgcaggttcgtcacagtgggcctccgtgggcggcgccgcacgctcgtcacagtgggcctccgccggctacgccgctgcttcagtggcttgcaggcactttcctcttggaagtggcgactgctgcggggctgagcggtgctcgcacgcgtctcgggagccaggttggcggcgcgatgaggcgcagcaaggccgatgtggagcggtacgtcgcctcggtgctgggtctcaccccgtcgcctcgacagaagtcaatgaaaggattctattttgcaaagctgtattatgaagctaaagaatatgatcttgctaaaaaatacatatgtacttacattaatgtgcaagagagggatcccaaagctcacagatttctgggtcttctttatgaattggaagaaaacacagagaaagccgttgaatgttacaggcgttcagtggaattaaacccaacacaaaaagatcttgtgttgaagattgcagaattgctttgtaaaaatgatgttactgatggaagagcaaaatactgggtcgaaagagcagcaaaacttttcccaggaagtcctgcaatttataaactaaaggaacagcttctagattgtgaaggtgaagatggatggaataaactttttgacttgattcagtcagaactttatgtaagacctgatgacgtccatgtgaacatccggctagtggagttgtatcgctcaactaaaagattgaaggatgctgtggcccactgccatgaggcagagaggaacatagctttgcgttcaagtttagagtggaattcgtgtgttgtacagacccttaaggaatatctggagtctttacagtgtttggagtctgataaaagtgactggcaagcaaccaatacagacttactgctggcctatgctaatcttatgcttcttacgctttccactagagatgtgcaggaaaatagagaattactggaaagttttgatagtgctcttcagtctgcgaaatcttctttgggtggaaatgatgaactgtcagctactttcttagaaatgaaaggacatttctatatgtatgctggttctctgctcttgaagatgggtcagcatggtaataatgttcaatggcgagctctttctgagctggctgcattgtgctatctcatagcatttcaggttccaagaccaaagattaaattaagagaaggtaaagctggacaaaatctgctggaaatgatggcctgtgaccgactgagccaatcagggcacatgttgctaagcttaagtcgtggcaagcaagatttcttaaaagaggttgttgaaacttttgccaacaaaattgggcagtctgcgttatatgatgctctgttttctagtcagtcacctaaggatacatcttttcttggtagcgatgatattggaaaaattgatgtacaagaaccagagcttgaagatttggctagatacgatgttggtgctattcgagcacataatggtagtcttcagcatcttacttggcttggcttacagtggaattcattgcctgctttacctggaatccgaaaatggctaaaacagcttttccatcgtttgccccatgaaacctcaaggcttgaaacaaatgcgcctgaatcaatatgtattttagatcttgaagtatttctccttggagtagtatataccagccacttacaattaaaggagaaatgtaattctcaccatagctcctatcagccgttatgcctgccctttcctgtgtgtaaacagctttgtacagaaagacaaaaatcttggtgggatgcggtttgtactctgattcacagaaaagcagtacctggaaacttggcaaaattgagacttctagttcagcatgaaataaacactctaagagcccaggaaaaacatggccttcaacctgctctgcttgtacattgggcaaaataccttcagaaaacgggcagcggtcttaattctttttatggtcaactagaatacatagggagaagtgttcattattggaagaaagttttgccattgttgaagataataaagaagaacagtattcctgaacctattgatcctctgtttaaacattttcatagtgtagacattcaggcatcagaaattgttgaatatgaagaagacgcacacataacttttgctatgttggatgcagtaaatggaaatatagaagatgctgtgactgcttttgaatctataaaaagtgttgtttcttattggaatcttgcactggatttttcacagggaaangggcagaaagaacatttgnaaaattgnatggcccttttctccttggaaagaaaacaaagaaagaaatgccaagaaaatttatcttgnaccaaaagaaccaagggggaacttac

SEQ ID NO: 447368 - DNA, 1836 bp, Homo sapiens
gatcacagctcctgcatggatcaaggagcatcactgcagctgcaaactgcagcttcaaactctccggctcaagcgaccctcctgcctcaacctccccagtagctgggcctacaggcacgtgtgtctgtgcccaataataccacattttaaaaatccatcttcagtagatggaaatttggattgtttccaccttttactaataaaaatagtactgctataaacattcatgtataggttttcttttgtttttgttttttcttttttgtagagatgggggtctcgctgtgttgcccaggctggtctcaaattcctggactcaagtgatcctcccatcaaaaactcccaaagtgctgggattacaggcgtgagccactatgcctggcctgtatacaagtttttgtgtagacatgtttacatccaattaatgaacacaggatgtctttccattgatttagctcctctttaatttccttcaacagtgttctgtagtttccagtctacaagtcttacacttttgggttaaatttattcataattattttattatttttgataatattataaatggaattgtttacttaattttacttgaattgttccttgctggtgtataagtagacatctcatttttttagttgacctcgtatggtacaatctctttgaactcatttattatcactgatagtttaggtctttttttttcgaggtttcattaaggttttctatagataagatcatgtcaagacaccctcagaccacagggcggcgccacgagcccggccgagtgcagctggagcgccgacgtcgccgaggatacacagtgctgaggcagaacgcaggttcgtcacagtgggcctccgtgggcggcgccgcacgctcgtcacagtgggcctccgccggctacgccgctgcttcagtggcttgcaggcactttcctcttggaagtggcgactgctgcggggctgagcggtgctcgcacgcgtctcgggagccaggttggcggcgcgatgaggcgcagcaaggccgatgtggagcggtacgtcgcctcggtgctgggtctcaccccgtcgcctcgacagaagtcaatgaaaggattctattttgcaaagctgtattatgaagctaaagaatatgatcttgctaaaaaatacatatgtacttacattaatgtgcaagagagggatcccaaagctcacagatttctgggtcttctttatgaattggaagaaaacacagagaaagccgttgaatgttacaggcgttcagtggaattaaacccaacacaaaaagatcttgtgttgaagattgcagaattgctttgtaaaaatgatgttactgatggaagagcaaaatactgggtcgaaagagcagcaaaacttttcccaggaagtcctgcaatttataaactaaaggtaaacaaacaaaacataaagggagaaaacttaagacataaccatttctaatatttggagtttaaattacttttcaatagcaaaccttaagctcaggtgtttgtgtttcctttaacatttttcttttaaaaagtgtattaaaacctttctgagcatctactgtcttattaggcattgttatactttataagtgacatctcatttacccttctggaataattaatattttagggattttacagtttagtagctgtaaactaagtagagctaagatttacattaagttctgtctgatatacaatttttgcttcattaagtgaaaattacctacaggatgacaatttagggatattttaaagaagagttttctgataactattgtctgaaagtagaagggattgtattttgagatagtaaggttttc

SEQ ID NO: 447369 - DNA, 391 bp, Homo sapiens
cctgtcttttttccccgttctgctgtcttatgtagatactgagaatattaaacctgtactcttttcatttgctacataagcacccattttgttgtccagctgtattttttgggttggagggttaggtttgcaataatcatgttatttcccctttgggtatacaaatgagacaacgtgagcaaatacaatctgtatttttaaagtgatggaaataacttaaatttttttttcagggcacatgttgctaagcttaagtcgtggcaagcaagatttcttaaaagaggttgttgaaacttttgccaacaaaattgggcagtctgcgttatatgatgctctgttttctagtcagtcacctaaggatacatcttttcttggtagcgatgatattgga

SEQ ID NO: 447370 - DNA, 355 bp, Homo sapiens
catgaaataaacactctaagagcccaggaaaaacatggccttcaacctgctctgcttgtacattgggcaaaataccttcagaaaacggtgagttttaaagtataagcatttttaatgaacattaccttaattttttaaaatcatgaactttttattgaaagtttttttgttctgaaaacagcagcttggtcatattatgacagatgtgttttttattgctgcaaaatagttaatgtagttaaatataagcacttagaggagcaatgcctggcacacagtgaatgttacatattagctgagctgttactgttattccttaataattaagttctgataattattcagcctgaaaatt

SEQ ID NO: 447371 - DNA, 373 bp, Homo sapiens
tgtaagcgctgaactgtgtatttagaaagcaattttagtaaattgaactattttttagacctggaaacttggcaaaattgagacttctagttcagcatgaaataaacactctaagagcccaggaaaaacatggccttcaacctgctctgcttgtacattgggcaaaataccttcagaaaacggtgagttttaaagtataagcatttttaatgaacattaccttaattttttaaaatcatgaactttttattgaaagtttttttgttctgaaaacagcagcttggtcatattatgacagatgtgttttttattgctgcaaaatagttaatgtagttaaatataagcacttagaggagcaatgcctggcacacag

SEQ ID NO: 447372 - DNA, 3507 bp, Homo sapiens
aagagggcagaaacaatccatgttgcttctcttccaattcagtcctcccactgcttggcttcagatgtagaaatgcatggtagagccagataccgaaagcctgttttctgcttggaagactaaaaagagaagcctcagcaaatgaaagcaacagggtaattgctgagagagagttaatcagtgaagcaaccccattaacctgtctataaaccccagggctcattcttgagctgctcctgcatagatctcgtcctgttcaacacaccaaagattgacagctgaactgagagaccatcacccacagacacaactggccactgggtggtgcacaagtcagacagaactgaatagtcctgtgaagactctggacactgaactgactttggaaccagactgcagaatggaggggtgggaacttgtggcttgaacctaatcaggtttcattaaggttttctatagataagatcatgtcaagacaccctcagaccacagggcggcgccacgagcccggccgagtgcagctggagcgccgacgtcgccgaggatacacagtgctgaggcagaacgcaggttcgtcacagtgggcctccgtgggcggcgccgcacgctcgtcacagtgggcctccgccggctacgccgctgcttcagtggcttgcaggcactttcctcttggaagtggcgactgctgcggggctgagcggtgctcgcacgcgtctcgggagccaggttggcggcgcgatgaggcgcagcaaggccgatgtggagcggtacgtcgcctcggtgctgggtctcaccccgtcgcctcgacagaagtcaatgaaaggattctattttgcaaagctgtattatgaagctaaagaatatgatcttgctaaaaaatacatatgtacttacattaatgtgcaagagagggatcccaaagctcacagatttctgggtcttctttatgaattggaagaaaacacagagaaagccgttgaatgttacaggcgttcagtggaattaaacccaacacaaaaagatcttgtgttgaagattgcagaattgctttgtaaaaatgatgttactgatggaagagcaaaatactgggtcgaaagagcagcaaaacttttcccaggaagtcctgcaatttataaactaaaggaacagcttctagattgtgaaggtgaagatggatggaataaactttttgacttgattcagtcagaactttatgtaagacctgatgacgtccatgtgaacatccggctagtggagttgtatcgctcaactaaaagattgaaggatgctgtggcccactgccatgaggcagagaggaacatagctttgcgttcaagtttagagtggaattcgtgtgttgtacagacccttaaggaatatctggagtctttacagtgtttggagtctgataaaagtgactggcaagcaaccaatacagacttactgctggcctatgctaatcttatgcttcttacgctttccactagagatgtgcaggaaaatagagaattactggaaagttttgatagtgctcttcagtctgcgaaatcttctttgggtggaaatgatgaactgtcagctactttcttagaaatgaaaggacatttctatatgtatgctggttctctgctcttgaagatgggtcagcatggtaataatgttcaatggcgagctctttctgagctggctgcattgtgctatctcatagcatttcaggttccaagaccaaagattaaattaagagaaggtaaagctggacaaaatctgctggaaatgatggcctgtgaccgactgagccaatcagggcacatgttgctaagcttaagtcgtggcaagcaagatttcttaaaagaggttgttgaaacttttgccaacaaaattgggcagtctgcgttatatgatgctctgttttctagtcagtcacctaaggatacatcttttcttggtagcgatgatattggaaaaattgatgtacaagaaccagagcttgaagatttggctagatacgatgttggtgctattcgagcacataatggtagtcttcagcatcttacttggcttggcttacagtggaattcattgcctgctttacctggaatccgaaaatggctaaaacagcttttccatcgtttgccccatgaaacctcaaggcttgaaacaaatgcgcctgaatcaatatgtattttagatcttgaagtatttctccttggagtagtatataccagccacttacaattaaaggagaaatgtaattctcaccatagctcctatcagccgttatgcctgccctttcctgtgtgtaaacagctttgtacagaaagacaaaaatcttggtgggatgcggtttgtactctgattcacagaaaagcagtacctggaaacttggcaaaattgagacttctagttcagcatgaaataaacactctaagagcccaggaaaaacatggccttcaacctgctctgcttgtacattgggcaaaataccttcagaaaacgggcagcggtcttaattctttttatggtcaactagaatacatagggagaagtgttcattattggaagaaagttttgccattgttgaagataataaagaagaacagtattcctgaacctattgatcctctgtttaaacattttcatagtgtagacattcaggcatcagaaattgttgaatatgaagaagacgcacacataacttttgctatgttggatgcagtaaatggaaatatagaagatgctgtgactgcttttgaatctataaaaagtgttgtttcttattggaatcttgcactgatttttcacaggaaggcagaagacattgaaaatgatgccctttctcctgaagaacaagaagaatgcagaaattatctgacaaagaccagggactacctaataaagattatagatgacggtgattcaaatctttcagtggtcaagaaattgcctgtgcccctggagtctgtaaaacagatgcttaattcagtcatgcaggaactcgaagactatagtgaaggaggtcctctctataaaaatggttctttgcgaaatgcagattcagaaataaaacattctacaccgtctcctaccaaatattcactatcaccaagtaaaagttacaagtattctcccgaaacaccacctcgatggacagaagatcggaattctttactgaatatgatttgccaacaagtagaggccattaagaaagaaatgcaggagttgaaactaaatagcagtaagtcagcatcccgtcatcgttggcccacagagaattatggaccagactcggtgcctgatggatatcaggggtcacagacatttcatggggctccactaacagaagcagcacatcgtcattttacaattgagaaacatggagactccaaatggattatttacaggttcacaaaacagctttgtggcactgaaagggcgagagccaagatctcctgatttctgttcctgtgttcatagattctttttccttaataaaagtaaacatatatc

SEQ ID NO: 447373 - DNA, 6593 bp, Homo sapiens
  misc_feature (3988)..(3988): n is a, c, g, or t
ttgcgatggagtctcgctctttcacccaggctggagtgcaatggcgcagtctcggcgcactacaacctctgcctcccaggttcaagctatccttgtgcctcagcctcccgtgtagctggaattaataggtgtgtgccaccacgcctggctctttgtttttttttttattatttttagtagagactgggtttcaccatgttggccaggctggtctcgaactcctgacctcaagtgatcagcccaccttggcctcccagagtgttgggattacaggtgtgagccaccacgcctgtacctggcctatctttcataggttatataaattccttggttcccagtttttgcagtcttttccaattcagtttaattaatggttaactgtttattcattatcaaaaaaagtacagtgtaatagataagaccatgttactattagaagtatgggtatcatcaaattaagatttttgattctaaaattattaggttccaagaccaaagattaaattaagagaaggtaaagctggacaaaatctgctggaaatgatggcctgtgaccgactgagccaatcagggcacatgttgctaagcttaagtcgtggcaagcaagatttcttaaaagaggttgttgaaacttttgccaacaaaattgggcagtctgcgttatatgatgctctgttttctagtcagtcacctaaggatacatcttttcttggtagcgatgatattggaaaaattgatgtacaagaaccagagcttgaagatttggctagatacgatgttggtgctattcgagcacataatggtagtcttcagcatcttacttggcttggcttacagtggaattcattgcctgctttacctggaatccgaaaatggctaaaacagcttttccatcgtttgccccatgaaacctcaaggcttgaaacaaatgcgcctgaatcaatatgtattttagatcttgaagtatttctccttggagtagtatataccagccacttacaattaaaggagaaatgtaattctcaccatagctcctatcagccgttatgcctgccctttcctgtgtgtaaacagctttgtacagaaagacaaaaatcttggtgggatgcggtttgtactctgattcacagaaaagcagtacctggaaacttggcaaaattgagacttctagttcagcatgaaataaacactctaagagcccaggaaaaacatggccttcaacctgctctgcttgtacattgggcaaaataccttcagaaaacgggcagcggtcttaattctttttatggtcaactagaatacatagggagaagtgttcattattggaagaaagttttgccattgttgaagataataaagaagaacagtattcctgaacctattgatcctctgtttaaacattttcatagtgtagacattcaggcatcagaaattgttgaatatgaagaagacgcacacataacttttgctatgttggatgcagtaaatggaaatatagaagatgctgtgactgcttttgaatctataaaaagtgttgtttcttattggaatcttgcactgatttttcacaggaaggcagaagacattgaaaatgatgccctttctcctgaagaacaagaagaatgcagaaattatctgacaaagaccagggactacctaataaagattatagatgacggtgattcaaatctttcagtggtcaagaaattgcctgtgcccctggagtctgtaaaacagatgcttaattcagtcatgcaggaactcgaagactatagtgaaggaggtcctctctataaaaatggttctttgcgaaatgcagattcagaaataaaacattctacaccgtctcctaccaaatattcactatcaccaagtaaaagttacaagtattctcccgaaacaccacctcgatggacagaagatcggaattctttactgaatatgatttgccaacaagtagaggccattaagaaagaaatgcaggagttgaaactaaatagcagtaagtcagcatcccgtcatcgttggcccacagagaattatggaccagactcggtgcctgatggatatcaggggtcacagacatttcatggggctccactaacagttgcaactactggcccttcagtatattatagtcagtcaccagcatataattcccagtatcttctcagaccagcagctaatgttactcccacaaagggttcttctaatacagaatttaagtcaaccaaagaaggattttccatccctgtgtctgctgatggatttaaatttggcatttcggaaccaggaaatcaagaaaagaaaagggaaaagcctcttgaaaatgatactggcttccaggctcaggatattagtggccggaagaagggccgtggtgtgatttttggccaaacaagtagcacttttacatttgcagatgttgcaaaatcaacttcaggagaaggatttcagtttggcaaaaaagacctcaatttcaagggattttcaggtgctggagaaaaattattctcatcacgatacggtaaaatggccaataaagcaaacacttccggtgactttgagaaagatgatgatgcctataagactgaggacagcgatgacatccattttgaaccagtagttcaaatgcctgaaaaagtagaacttgtaacaggagaagaaggtgaaaaagttctgtattcacagggggtaaaactatttagatttgatgctgaggtaaggcagtggaaagaaaggggcttggggaacttaaaaattctcaaaaacgaggtcaatggcaaactaagaatgctgatgcgaagagaacaagtactaaaagtgtgtgctaatcattggataacgactacaatgaacctgaagcccctctctggatcagatagagcatggatgtggtcagccagtgatttctctgacggtgatgccaaactagagcggttggcagcaaaatttaaaacaccagagctggctgaagaattcaagcagaaatttgaggaatgccagcggcttctgttagacataccacttcaaactccccataaacttgtagatactggcagagctgccaagttaatacagagagctgaagaaatgaagagtggactgaaagatttcaaaacatttttgacaaatgatcaaacaaaagtcactgaggaagaaaataagggttcaggtacaggtgtggccggtgcctcagacacaacaataaaacccaatgctgaaaacactgggcccacattagaatgggataactatgacttaagggaagatgctttggatgatagtgtcagtagtagctcagtacatgcttctccattggcaagtagccctgtgagaaaaaatcttttccgctttgatgagtcaacaacaggatctaacttcagttttaaatctgctttgagtctatctaagtctcctgccaagttgaatcagagtgggacttcagttggcactgatgaagaatctgttgttactcaagaagaagagagagatggacagtactttgaacctgttgttcctttacctgatctagttgaagtatccagtggtgaggaaaatgaacaagttgtttttagtcacagggcagaaatctacagatatgataaagatgttggtcaatggaaagaaaggggcattggtgatataaagattttacagaattatgataataagcaagttcgtatagtgatgagaagggaccaagtattaaaactttgtgccaatcacagaataactccagacatgagtttgcaaaatatgaaagggacagaaagagtatgggtgtggactgcatgtgattttgcagatggagaaagaaaagtagagcatttagctgttcgttttaaactacaggatgttgcagactcgtttaagaaaatttttgatgaagcaaaaacagcccaggaaaaagattctttgataacacctcatgtttctcggtcaagcactcccagagagtcaccatgtggcaaaattgctgtagctntattagaagaaaccacaagagagaggacagatgttattcagggtgatgatgtagcagatgcagcttcagaagttgaagtgtctagcacatctgaaacaacaacaaaagcagtggtttctcctccaaagtttgtatttgtttcagagtctgttaaaagaatttttagtagtgaaaaatcaaaaccatttgcatttggcaacagttctgccactgggtctttgtttagatttagttttaatgcacctttgaaaagtaacaatagtgaaactagttcagtagcccagagtggatctgaaagcaaagtggaacctaaaaaatgtgaactgtcaaagaactctgatatcgaacagtcttcagatagcaaagtcaaaaatctctctgcttcctttccaacggaagaatcttcaatcaactacacatttaaaacaccagaaaaggagcctccattatggcatgctgaatttaccaaagaagaattggttcagaagctccgttccaccacaaaaagtgcagatcacttaaacggcctgcttcgggaaatagaggcaaccaatgcagtccttatggagcaaattaagcttctcaaaagtgaaataagaagattggaaaggaatcaagagcgagagaagtctgcagctaacctggaatacttgaagaacgtcttgctgcagttcattttcttgaagccaggtagtgaaagagagagacttcttcctgttataaatacgatgttgcagctcagccctgaagaaaagggaaaacttgctgcggttgctcaagatgaggaagaaaatgcttcccgttcttctggatgagcatcctatcttcgtagttggtttggacttcgataggttgatggaaggaatacttctattaactaaatagaatctgtttacaaaaatggttcgtgtgtgttaccattattcttttgtcaaaaagtgtgtatatatgtttgcatttacatatatttgtacatctgtatgacagatgtattttaaaagtttcaacttgaagtaaaagtacaacagcttgaagtgttgataccaggccacagccctctaactcatgtgatctcccatgcatgctgccagaataaaaccaccaggaatgaattcactccccacttctctggaacctcaggacccgcccatttctcggcagtactgtgaattttgaagttaaactaaattttggtaccataccaactggaatttaggctttaaaaataatgtttcaaggccaggtgtggtgattcatgcctgaaatcccactactttgggaggctgaggctggagaatcgcttgaggctagtgagctgtgattgtaccactgcactccagctcggggaacagagcgagaccttgtctctaaaaataataatagtaataaaaataacgttttatgactatttattgcaaggtcagatttacagattgttataaattgttgagaaatttttgtgattagaatatgaaggaaaaagctttgttggtaaaagtgacatgttaaggggctatgaagtaaatatgctgcagttaattgtgctaagttaaaatacagtttagttatttgctttaaaataaactcttctttttttctttaaagtatactacctcaaaactcattatgttgtcagagccctagagctggctagtgtaacactgactatgagtaggtgggcccaccacttgagttgaggtgatttcatggtgtctttccaggctcttgatagggtgtcactgcatgcaagccatgaatctgttttgagaatcctctccattttcccaaataaaaacctatcccaacagtgactatatcactcagcattggatctaaatataaaagtggtgctttcagtgtttttggcagatagtgttccataacctttccatcagaagggattttagacaccttagaggtccgtgctacatcttcacagttcctccgaataaccttaggtggtagtgttacttgcctttgacacctgtgcatatgttttaatgactagatccaaactgtgttgttcttaaatcaaaaattggataatttttaatatttatgtattaatcacacagtgtgctctctgaagttctcttaagccttcagtttatactcttaattttctttctgagctggggaactgactttgcactttggttacacagaacattggtttccaatttagtttaactgaaatttgctgctgatatgttgagtttgttctttaaaaaatatctcatatatctcgtctttcctccttagaagaacagacctaactagcgaatgtatgaatgaaaatgcatctatttcagagccgacatgaagagtttagtttttttactttataaactgtgaatatgagtatgccagctgcattagatgtaactaatcatatttaaatatatttcactttgactttagaccttttgaagtctgtataaacttgttttgaaatacagtctccacttacgaatgtcataacaaaatacttttttgcatgataaaaaattactttgattacaaaaggcatattctttcatggtttctgcaatgagaggaagtgtaatgattattttaatatttctattaaaactgtatattttta

SEQ ID NO: 447374 - DNA, 6408 bp, Homo sapiens
  misc_feature (3803)..(3803): n is a, c, g, or t
agtggattcacaactaattaagctggtctcgaactcctgacctcaagtgatcagcccaccttggcctcccagagtgttgggattacaggtgtgagccaccacgcctgtacctggcctatctttcataggttatataaattccttggttcccagtttttgcagtcttttccaattcagtttaattaatggttaactgtttattcattatcaaaaaaagtacagtgtaatagataagaccatgttactattagaagtatgggtatcatcaaattaagatttttgattctaaaattattaggttccaagaccaaagattaaattaagagaaggtaaagctggacaaaatctgctggaaatgatggcctgtgaccgactgagccaatcagggcacatgttgctaagcttaagtcgtggcaagcaagatttcttaaaagaggttgttgaaacttttgccaacaaaattgggcagtctgcgttatatgatgctctgttttctagtcagtcacctaaggatacatcttttcttggtagcgatgatattggaaaaattgatgtacaagaaccagagcttgaagatttggctagatacgatgttggtgctattcgagcacataatggtagtcttcagcatcttacttggcttggcttacagtggaattcattgcctgctttacctggaatccgaaaatggctaaaacagcttttccatcgtttgccccatgaaacctcaaggcttgaaacaaatgcgcctgaatcaatatgtattttagatcttgaagtatttctccttggagtagtatataccagccacttacaattaaaggagaaatgtaattctcaccatagctcctatcagccgttatgcctgccctttcctgtgtgtaaacagctttgtacagaaagacaaaaatcttggtgggatgcggtttgtactctgattcacagaaaagcagtacctggaaacttggcaaaattgagacttctagttcagcatgaaataaacactctaagagcccaggaaaaacatggccttcaacctgctctgcttgtacattgggcaaaataccttcagaaaacgggcagcggtcttaattctttttatggtcaactagaatacatagggagaagtgttcattattggaagaaagttttgccattgttgaagataataaagaagaacagtattcctgaacctattgatcctctgtttaaacattttcatagtgtagacattcaggcatcagaaattgttgaatatgaagaagacgcacacataacttttgctatgttggatgcagtaaatggaaatatagaagatgctgtgactgcttttgaatctataaaaagtgttgtttcttattggaatcttgcactgatttttcacaggaaggcagaagacattgaaaatgatgccctttctcctgaagaacaagaagaatgcagaaattatctgacaaagaccagggactacctaataaagattatagatgacggtgattcaaatctttcagtggtcaagaaattgcctgtgcccctggagtctgtaaaacagatgcttaattcagtcatgcaggaactcgaagactatagtgaaggaggtcctctctataaaaatggttctttgcgaaatgcagattcagaaataaaacattctacaccgtctcctaccaaatattcactatcaccaagtaaaagttacaagtattctcccgaaacaccacctcgatggacagaagatcggaattctttactgaatatgatttgccaacaagtagaggccattaagaaagaaatgcaggagttgaaactaaatagcagtaagtcagcatcccgtcatcgttggcccacagagaattatggaccagactcggtgcctgatggatatcaggggtcacagacatttcatggggctccactaacagttgcaactactggcccttcagtatattatagtcagtcaccagcatataattcccagtatcttctcagaccagcagctaatgttactcccacaaagggttcttctaatacagaatttaagtcaaccaaagaaggattttccatccctgtgtctgctgatggatttaaatttggcatttcggaaccaggaaatcaagaaaagaaaagggaaaagcctcttgaaaatgatactggcttccaggctcaggatattagtggccggaagaagggccgtggtgtgatttttggccaaacaagtagcacttttacatttgcagatgttgcaaaatcaacttcaggagaaggatttcagtttggcaaaaaagacctcaatttcaagggattttcaggtgctggagaaaaattattctcatcacgatacggtaaaatggccaataaagcaaacacttccggtgactttgagaaagatgatgatgcctataagactgaggacagcgatgacatccattttgaaccagtagttcaaatgcctgaaaaagtagaacttgtaacaggagaagaaggtgaaaaagttctgtattcacagggggtaaaactatttagatttgatgctgaggtaaggcagtggaaagaaaggggcttggggaacttaaaaattctcaaaaacgaggtcaatggcaaactaagaatgctgatgcgaagagaacaagtactaaaagtgtgtgctaatcattggataacgactacaatgaacctgaagcccctctctggatcagatagagcatggatgtggtcagccagtgatttctctgacggtgatgccaaactagagcggttggcagcaaaatttaaaacaccagagctggctgaagaattcaagcagaaatttgaggaatgccagcggcttctgttagacataccacttcaaactccccataaacttgtagatactggcagagctgccaagttaatacagagagctgaagaaatgaagagtggactgaaagatttcaaaacatttttgacaaatgatcaaacaaaagtcactgaggaagaaaataagggttcaggtacaggtgtggccggtgcctcagacacaacaataaaacccaatgctgaaaacactgggcccacattagaatgggataactatgacttaagggaagatgctttggatgatagtgtcagtagtagctcagtacatgcttctccattggcaagtagccctgtgagaaaaaatcttttccgctttgatgagtcaacaacaggatctaacttcagttttaaatctgctttgagtctatctaagtctcctgccaagttgaatcagagtgggacttcagttggcactgatgaagaatctgttgttactcaagaagaagagagagatggacagtactttgaacctgttgttcctttacctgatctagttgaagtatccagtggtgaggaaaatgaacaagttgtttttagtcacagggcagaaatctacagatatgataaagatgttggtcaatggaaagaaaggggcattggtgatataaagattttacagaattatgataataagcaagttcgtatagtgatgagaagggaccaagtattaaaactttgtgccaatcacagaataactccagacatgagtttgcaaaatatgaaagggacagaaagagtatgggtgtggactgcatgtgattttgcagatggagaaagaaaagtagagcatttagctgttcgttttaaactacaggatgttgcagactcgtttaagaaaatttttgatgaagcaaaaacagcccaggaaaaagattctttgataacacctcatgtttctcggtcaagcactcccagagagtcaccatgtggcaaaattgctgtagctntattagaagaaaccacaagagagaggacagatgttattcagggtgatgatgtagcagatgcagcttcagaagttgaagtgtctagcacatctgaaacaacaacaaaagcagtggtttctcctccaaagtttgtatttgtttcagagtctgttaaaagaatttttagtagtgaaaaatcaaaaccatttgcatttggcaacagttctgccactgggtctttgtttagatttagttttaatgcacctttgaaaagtaacaatagtgaaactagttcagtagcccagagtggatctgaaagcaaagtggaacctaaaaaatgtgaactgtcaaagaactctgatatcgaacagtcttcagatagcaaagtcaaaaatctctctgcttcctttccaacggaagaatcttcaatcaactacacatttaaaacaccagaaaaggagcctccattatggcatgctgaatttaccaaagaagaattggttcagaagctccgttccaccacaaaaagtgcagatcacttaaacggcctgcttcgggaaatagaggcaaccaatgcagtccttatggagcaaattaagcttctcaaaagtgaaataagaagattggaaaggaatcaagagcgagagaagtctgcagctaacctggaatacttgaagaacgtcttgctgcagttcattttcttgaagccaggtagtgaaagagagagacttcttcctgttataaatacgatgttgcagctcagccctgaagaaaagggaaaacttgctgcggttgctcaagatgaggaagaaaatgcttcccgttcttctggatgagcatcctatcttcgtagttggtttggacttcgataggttgatggaaggaatacttctattaactaaatagaatctgtttacaaaaatggttcgtgtgtgttaccattattcttttgtcaaaaagtgtgtatatatgtttgcatttacatatatttgtacatctgtatgacagatgtattttaaaagtttcaacttgaagtaaaagtacaacagcttgaagtgttgataccaggccacagccctctaactcatgtgatctcccatgcatgctgccagaataaaaccaccaggaatgaattcactccccacttctctggaacctcaggacccgcccatttctcggcagtactgtgaattttgaagttaaactaaattttggtaccataccaactggaatttaggctttaaaaataatgtttcaaggccaggtgtggtgattcatgcctgaaatcccactactttgggaggctgaggctggagaatcgcttgaggctagtgagctgtgattgtaccactgcactccagctcggggaacagagcgagaccttgtctctaaaaataataatagtaataaaaataacgttttatgactatttattgcaaggtcagatttacagattgttataaattgttgagaaatttttgtgattagaatatgaaggaaaaagctttgttggtaaaagtgacatgttaaggggctatgaagtaaatatgctgcagttaattgtgctaagttaaaatacagtttagttatttgctttaaaataaactcttctttttttctttaaagtatactacctcaaaactcattatgttgtcagagccctagagctggctagtgtaacactgactatgagtaggtgggcccaccacttgagttgaggtgatttcatggtgtctttccaggctcttgatagggtgtcactgcatgcaagccatgaatctgttttgagaatcctctccattttcccaaataaaaacctatcccaacagtgactatatcactcagcattggatctaaatataaaagtggtgctttcagtgtttttggcagatagtgttccataacctttccatcagaagggattttagacaccttagaggtccgtgctacatcttcacagttcctccgaataaccttaggtggtagtgttacttgcctttgacacctgtgcatatgttttaatgactagatccaaactgtgttgttcttaaatcaaaaattggataatttttaatatttatgtattaatcacacagtgtgctctctgaagttctcttaagccttcagtttatactcttaattttctttctgagctggggaactgactttgcactttggttacacagaacattggtttccaatttagtttaactgaaatttgctgctgatatgttgagtttgttctttaaaaaatatctcatatatctcgtctttcctccttagaagaacagacctaactagcgaatgtatgaatgaaaatgcatctatttcagagccgacatgaagagtttagtttttttactttataaactgtgaatatgagtatgccagctgcattagatgtaactaatcatatttaaatatatttcactttgactttagaccttttgaagtctgtataaacttgttttgaaatacagtctccacttacgaatgtcataacaaaatacttttttgcatgataaaaaattactttgattacaaaaggcatattctttcatggtttctgcaatgagaggaagtgtaatgattattttaatatttctattaaaactgtatattttta

SEQ ID NO: 447375 - DNA, 4183 bp, Homo sapiens
  misc_feature (1578)..(1578): n is a, c, g, or t
cctattagacatcatcatctttctcaacttcaggagaaggatttcagtttggcaaaaaagacctcaatttcaagggattttcaggtgctggagaaaaattattctcatcacgatacggtaaaatggccaataaagcaaacacttccggtgactttgagaaagatgatgatgcctataagactgaggacagcgatgacatccattttgaaccagtagttcaaatgcctgaaaaagtagaacttgtaacaggagaagaaggtgaaaaagttctgtattcacagggggtaaaactatttagatttgatgctgaggtaaggcagtggaaagaaaggggcttggggaacttaaaaattctcaaaaacgaggtcaatggcaaactaagaatgctgatgcgaagagaacaagtactaaaagtgtgtgctaatcattggataacgactacaatgaacctgaagcccctctctggatcagatagagcatggatgtggtcagccagtgatttctctgacggtgatgccaaactagagcggttggcagcaaaatttaaaacaccagagctggctgaagaattcaagcagaaatttgaggaatgccagcggcttctgttagacataccacttcaaactccccataaacttgtagatactggcagagctgccaagttaatacagagagctgaagaaatgaagagtggactgaaagatttcaaaacatttttgacaaatgatcaaacaaaagtcactgaggaagaaaataagggttcaggtacaggtgtggccggtgcctcagacacaacaataaaacccaatgctgaaaacactgggcccacattagaatgggataactatgacttaagggaagatgctttggatgatagtgtcagtagtagctcagtacatgcttctccattggcaagtagccctgtgagaaaaaatcttttccgctttgatgagtcaacaacaggatctaacttcagttttaaatctgctttgagtctatctaagtctcctgccaagttgaatcagagtgggacttcagttggcactgatgaagaatctgttgttactcaagaagaagagagagatggacagtactttgaacctgttgttcctttacctgatctagttgaagtatccagtggtgaggaaaatgaacaagttgtttttagtcacagggcagaaatctacagatatgataaagatgttggtcaatggaaagaaaggggcattggtgatataaagattttacagaattatgataataagcaagttcgtatagtgatgagaagggaccaagtattaaaactttgtgccaatcacagaataactccagacatgagtttgcaaaatatgaaagggacagaaagagtatgggtgtggactgcatgtgattttgcagatggagaaagaaaagtagagcatttagctgttcgttttaaactacaggatgttgcagactcgtttaagaaaatttttgatgaagcaaaaacagcccaggaaaaagattctttgataacacctcatgtttctcggtcaagcactcccagagagtcaccatgtggcaaaattgctgtagctntattagaagaaaccacaagagagaggacagatgttattcagggtgatgatgtagcagatgcagcttcagaagttgaagtgtctagcacatctgaaacaacaacaaaagcagtggtttctcctccaaagtttgtatttgtttcagagtctgttaaaagaatttttagtagtgaaaaatcaaaaccatttgcatttggcaacagttctgccactgggtctttgtttagatttagttttaatgcacctttgaaaagtaacaatagtgaaactagttcagtagcccagagtggatctgaaagcaaagtggaacctaaaaaatgtgaactgtcaaagaactctgatatcgaacagtcttcagatagcaaagtcaaaaatctctctgcttcctttccaacggaagaatcttcaatcaactacacatttaaaacaccagaaaaggagcctccattatggcatgctgaatttaccaaagaagaattggttcagaagctccgttccaccacaaaaagtgcagatcacttaaacggcctgcttcgggaaatagaggcaaccaatgcagtccttatggagcaaattaagcttctcaaaagtgaaataagaagattggaaaggaatcaagagcgagagaagtctgcagctaacctggaatacttgaagaacgtcttgctgcagttcattttcttgaagccaggtagtgaaagagagagacttcttcctgttataaatacgatgttgcagctcagccctgaagaaaagggaaaacttgctgcggttgctcaagatgaggaagaaaatgcttcccgttcttctggatgagcatcctatcttcgtagttggtttggacttcgataggttgatggaaggaatacttctattaactaaatagaatctgtttacaaaaatggttcgtgtgtgttaccattattcttttgtcaaaaagtgtgtatatatgtttgcatttacatatatttgtacatctgtatgacagatgtattttaaaagtttcaacttgaagtaaaagtacaacagcttgaagtgttgataccaggccacagccctctaactcatgtgatctcccatgcatgctgccagaataaaaccaccaggaatgaattcactccccacttctctggaacctcaggacccgcccatttctcggcagtactgtgaattttgaagttaaactaaattttggtaccataccaactggaatttaggctttaaaaataatgtttcaaggccaggtgtggtgattcatgcctgaaatcccactactttgggaggctgaggctggagaatcgcttgaggctagtgagctgtgattgtaccactgcactccagctcggggaacagagcgagaccttgtctctaaaaataataatagtaataaaaataacgttttatgactatttattgcaaggtcagatttacagattgttataaattgttgagaaatttttgtgattagaatatgaaggaaaaagctttgttggtaaaagtgacatgttaaggggctatgaagtaaatatgctgcagttaattgtgctaagttaaaatacagtttagttatttgctttaaaataaactcttctttttttctttaaagtatactacctcaaaactcattatgttgtcagagccctagagctggctagtgtaacactgactatgagtaggtgggcccaccacttgagttgaggtgatttcatggtgtctttccaggctcttgatagggtgtcactgcatgcaagccatgaatctgttttgagaatcctctccattttcccaaataaaaacctatcccaacagtgactatatcactcagcattggatctaaatataaaagtggtgctttcagtgtttttggcagatagtgttccataacctttccatcagaagggattttagacaccttagaggtccgtgctacatcttcacagttcctccgaataaccttaggtggtagtgttacttgcctttgacacctgtgcatatgttttaatgactagatccaaactgtgttgttcttaaatcaaaaattggataatttttaatatttatgtattaatcacacagtgtgctctctgaagttctcttaagccttcagtttatactcttaattttctttctgagctggggaactgactttgcactttggttacacagaacattggtttccaatttagtttaactgaaatttgctgctgatatgttgagtttgttctttaaaaaatatctcatatatctcgtctttcctccttagaagaacagacctaactagcgaatgtatgaatgaaaatgcatctatttcagagccgacatgaagagtttagtttttttactttataaactgtgaatatgagtatgccagctgcattagatgtaactaatcatatttaaatatatttcactttgactttagaccttttgaagtctgtataaacttgttttgaaatacagtctccacttacgaatgtcataacaaaatacttttttgcatgataaaaaattactttgattacaaaaggcatattctttcatggtttctgcaatgagaggaagtgtaatgattattttaatatttctattaaaactgtatattttta

SEQ ID NO: 447376 - DNA, 8328 bp, Homo sapiens
  misc_feature (5490)..(5490): n is a, c, g, or t
gatcacagctcctgcatggatcaaggagcatcactgcagctgcaaactgcagcttcaaactctccggctcaagcgaccctcctgcctcaacctccccagtagctgggcctacaggcacgtgtgtctgtgcccaataataccacattttaaaaatccatcttcagtagatggaaatttggattgtttccaccttttactaataaaaatagtactgctataaacattcatgtataggttttcttttgtttttgttttttcttttttgtagagatgggggtctcgctgtgttgcccaggctggtctcaaattcctggactcaagtgatcctcccatcaaaaactcccaaagtgctgggattacaggcgtgagccactatgcctggcctgtatacaagtttttgtgtagacatgtttacatccaattaatgaacacaggatgtctttccattgatttagctcctctttaatttccttcaacagtgttctgtagtttccagtctacaagtcttacacttttgggttaaatttattcataattattttattatttttgataatattataaatggaattgtttacttaattttacttgaattgttccttgctggtgtataagtagacatctcatttttttagttgacctcgtatggtacaatctctttgaactcatttattatcactgatagtttaggtctttttttttcgaggtttcattaaggttttctatagataagatcatgtcaagacaccctcagaccacagggcggcgccacgagcccggccgagtgcagctggagcgccgacgtcgccgaggatacacagtgctgaggcagaacgcaggttcgtcacagtgggcctccgtgggcggcgccgcacgctcgtcacagtgggcctccgccggctacgccgctgcttcagtggcttgcaggcactttcctcttggaagtggcgactgctgcggggctgagcggtgctcgcacgcgtctcgggagccaggttggcggcgcgatgaggcgcagcaaggccgatgtggagcggtacgtcgcctcggtgctgggtctcaccccgtcgcctcgacagaagtcaatgaaaggattctattttgcaaagctgtattatgaagctaaagaatatgatcttgctaaaaaatacatatgtacttacattaatgtgcaagagagggatcccaaagctcacagatttctgggtcttctttatgaattggaagaaaacacagagaaagccgttgaatgttacaggcgttcagtggaattaaacccaacacaaaaagatcttgtgttgaagattgcagaattgctttgtaaaaatgatgttactgatggaagagcaaaatactgggtcgaaagagcagcaaaacttttcccaggaagtcctgcaatttataaactaaaggaacagcttctagattgtgaaggtgaagatggatggaataaactttttgacttgattcagtcagaactttatgtaagacctgatgacgtccatgtgaacatccggctagtggagttgtatcgctcaactaaaagattgaaggatgctgtggcccactgccatgaggcagagaggaacatagctttgcgttcaagtttagagtggaattcgtgtgttgtacagacccttaaggaatatctggagtctttacagtgtttggagtctgataaaagtgactggcaagcaaccaatacagacttactgctggcctatgctaatcttatgcttcttacgctttccactagagatgtgcaggaaaatagagaattactggaaagttttgatagtgctcttcagtctgcgaaatcttctttgggtggaaatgatgaactgtcagctactttcttagaaatgaaaggacatttctatatgtatgctggttctctgctcttgaagatgggtcagcatggtaataatgttcaatggcgagctctttctgagctggctgcattgtgctatctcatagcatttcaggttccaagaccaaagattaaattaagagaaggtaaagctggacaaaatctgctggaaatgatggcctgtgaccgactgagccaatcagggcacatgttgctaagcttaagtcgtggcaagcaagatttcttaaaagaggttgttgaaacttttgccaacaaaattgggcagtctgcgttatatgatgctctgttttctagtcagtcacctaaggatacatcttttcttggtagcgatgatattggaaaaattgatgtacaagaaccagagcttgaagatttggctagatacgatgttggtgctattcgagcacataatggtagtcttcagcatcttacttggcttggcttacagtggaattcattgcctgctttacctggaatccgaaaatggctaaaacagcttttccatcgtttgccccatgaaacctcaaggcttgaaacaaatgcgcctgaatcaatatgtattttagatcttgaagtatttctccttggagtagtatataccagccacttacaattaaaggagaaatgtaattctcaccatagctcctatcagccgttatgcctgccctttcctgtgtgtaaacagctttgtacagaaagacaaaaatcttggtgggatgcggtttgtactctgattcacagaaaagcagtacctggaaacttggcaaaattgagacttctagttcagcatgaaataaacactctaagagcccaggaaaaacatggccttcaacctgctctgcttgtacattgggcaaaataccttcagaaaacgggcagcggtcttaattctttttatggtcaactagaatacatagggagaagtgttcattattggaagaaagttttgccattgttgaagataataaagaagaacagtattcctgaacctattgatcctctgtttaaacattttcatagtgtagacattcaggcatcagaaattgttgaatatgaagaagacgcacacataacttttgctatgttggatgcagtaaatggaaatatagaagatgctgtgactgcttttgaatctataaaaagtgttgtttcttattggaatcttgcactgatttttcacaggaaggcagaagacattgaaaatgatgccctttctcctgaagaacaagaagaatgcagaaattatctgacaaagaccagggactacctaataaagattatagatgacggtgattcaaatctttcagtggtcaagaaattgcctgtgcccctggagtctgtaaaacagatgcttaattcagtcatgcaggaactcgaagactatagtgaaggaggtcctctctataaaaatggttctttgcgaaatgcagattcagaaataaaacattctacaccgtctcctaccaaatattcactatcaccaagtaaaagttacaagtattctcccgaaacaccacctcgatggacagaagatcggaattctttactgaatatgatttgccaacaagtagaggccattaagaaagaaatgcaggagttgaaactaaatagcagtaagtcagcatcccgtcatcgttggcccacagagaattatggaccagactcggtgcctgatggatatcaggggtcacagacatttcatggggctccactaacagttgcaactactggcccttcagtatattatagtcagtcaccagcatataattcccagtatcttctcagaccagcagctaatgttactcccacaaagggttcttctaatacagaatttaagtcaaccaaagaaggattttccatccctgtgtctgctgatggatttaaatttggcatttcggaaccaggaaatcaagaaaagaaaagggaaaagcctcttgaaaatgatactggcttccaggctcaggatattagtggccggaagaagggccgtggtgtgatttttggccaaacaagtagcacttttacatttgcagatgttgcaaaatcaacttcaggagaaggatttcagtttggcaaaaaagacctcaatttcaagggattttcaggtgctggagaaaaattattctcatcacgatacggtaaaatggccaataaagcaaacacttccggtgactttgagaaagatgatgatgcctataagactgaggacagcgatgacatccattttgaaccagtagttcaaatgcctgaaaaagtagaacttgtaacaggagaagaaggtgaaaaagttctgtattcacagggggtaaaactatttagatttgatgctgaggtaaggcagtggaaagaaaggggcttggggaacttaaaaattctcaaaaacgaggtcaatggcaaactaagaatgctgatgcgaagagaacaagtactaaaagtgtgtgctaatcattggataacgactacaatgaacctgaagcccctctctggatcagatagagcatggatgtggtcagccagtgatttctctgacggtgatgccaaactagagcggttggcagcaaaatttaaaacaccagagctggctgaagaattcaagcagaaatttgaggaatgccagcggcttctgttagacataccacttcaaactccccataaacttgtagatactggcagagctgccaagttaatacagagagctgaagaaatgaagagtggactgaaagatttcaaaacatttttgacaaatgatcaaacaaaagtcactgaggaagaaaataagggttcaggtacaggtgtggccggtgcctcagacacaacaataaaacccaatgctgaaaacactgggcccacattagaatgggataactatgacttaagggaagatgctttggatgatagtgtcagtagtagctcagtacatgcttctccattggcaagtagccctgtgagaaaaaatcttttccgctttgatgagtcaacaacaggatctaacttcagttttaaatctgctttgagtctatctaagtctcctgccaagttgaatcagagtgggacttcagttggcactgatgaagaatctgttgttactcaagaagaagagagagatggacagtactttgaacctgttgttcctttacctgatctagttgaagtatccagtggtgaggaaaatgaacaagttgtttttagtcacagggcagaaatctacagatatgataaagatgttggtcaatggaaagaaaggggcattggtgatataaagattttacagaattatgataataagcaagttcgtatagtgatgagaagggaccaagtattaaaactttgtgccaatcacagaataactccagacatgagtttgcaaaatatgaaagggacagaaagagtatgggtgtggactgcatgtgattttgcagatggagaaagaaaagtagagcatttagctgttcgttttaaactacaggatgttgcagactcgtttaagaaaatttttgatgaagcaaaaacagcccaggaaaaagattctttgataacacctcatgtttctcggtcaagcactcccagagagtcaccatgtggcaaaattgctgtagctntattagaagaaaccacaagagagaggacagatgttattcagggtgatgatgtagcagatgcagcttcagaagttgaagtgtctagcacatctgaaacaacaacaaaagcagtggtttctcctccaaagtttgtatttgtttcagagtctgttaaaagaatttttagtagtgaaaaatcaaaaccatttgcatttggcaacagttctgccactgggtctttgtttagatttagttttaatgcacctttgaaaagtaacaatagtgaaactagttcagtagcccagagtggatctgaaagcaaagtggaacctaaaaaatgtgaactgtcaaagaactctgatatcgaacagtcttcagatagcaaagtcaaaaatctctctgcttcctttccaacggaagaatcttcaatcaactacacatttaaaacaccagaaaaggagcctccattatggcatgctgaatttaccaaagaagaattggttcagaagctccgttccaccacaaaaagtgcagatcacttaaacggcctgcttcgggaaatagaggcaaccaatgcagtccttatggagcaaattaagcttctcaaaagtgaaataagaagattggaaaggaatcaagagcgagagaagtctgcagctaacctggaatacttgaagaacgtcttgctgcagttcattttcttgaagccaggtagtgaaagagagagacttcttcctgttataaatacgatgttgcagctcagccctgaagaaaagggaaaacttgctgcggttgctcaagatgaggaagaaaatgcttcccgttcttctggatgagcatcctatcttcgtagttggtttggacttcgataggttgatggaaggaatacttctattaactaaatagaatctgtttacaaaaatggttcgtgtgtgttaccattattcttttgtcaaaaagtgtgtatatatgtttgcatttacatatatttgtacatctgtatgacagatgtattttaaaagtttcaacttgaagtaaaagtacaacagcttgaagtgttgataccaggccacagccctctaactcatgtgatctcccatgcatgctgccagaataaaaccaccaggaatgaattcactccccacttctctggaacctcaggacccgcccatttctcggcagtactgtgaattttgaagttaaactaaattttggtaccataccaactggaatttaggctttaaaaataatgtttcaaggccaggtgtggtgattcatgcctgaaatcccactactttgggaggctgaggctggagaatcgcttgaggctagtgagctgtgattgtaccactgcactccagctcggggaacagagcgagaccttgtctctaaaaataataatagtaataaaaataacgttttatgactatttattgcaaggtcagatttacagattgttataaattgttgagaaatttttgtgattagaatatgaaggaaaaagctttgttggtaaaagtgacatgttaaggggctatgaagtaaatatgctgcagttaattgtgctaagttaaaatacagtttagttatttgctttaaaataaactcttctttttttctttaaagtatactacctcaaaactcattatgttgtcagagccctagagctggctagtgtaacactgactatgagtaggtgggcccaccacttgagttgaggtgatttcatggtgtctttccaggctcttgatagggtgtcactgcatgcaagccatgaatctgttttgagaatcctctccattttcccaaataaaaacctatcccaacagtgactatatcactcagcattggatctaaatataaaagtggtgctttcagtgtttttggcagatagtgttccataacctttccatcagaagggattttagacaccttagaggtccgtgctacatcttcacagttcctccgaataaccttaggtggtagtgttacttgcctttgacacctgtgcatatgttttaatgactagatccaaactgtgttgttcttaaatcaaaaattggataatttttaatatttatgtattaatcacacagtgtgctctctgaagttctcttaagccttcagtttatactcttaattttctttctgagctggggaactgactttgcactttggttacacagaacattggtttccaatttagtttaactgaaatttgctgctgatatgttgagtttgttctttaaaaaatatctcatatatctcgtctttcctccttagaagaacagacctaactagcgaatgtatgaatgaaaatgcatctatttcagagccgacatgaagagtttagtttttttactttataaactgtgaatatgagtatgccagctgcattagatgtaactaatcatatttaaatatatttcactttgactttagaccttttgaagtctgtataaacttgttttgaaatacagtctccacttacgaatgtcataacaaaatacttttttgcatgataaaaaattactttgattacaaaaggcatattctttcatggtttctgcaatgagaggaagtgtaatgattattttaatatttctattaaaactgtatatttttatggctgctcttttatgttacccactgtctctttggggttgttaattggtttctgaaagggaacttcaaactcctttactactggccttccatggttggtccctattaggtttttgtgagaacgtcgaccaactctttgatacccgccaggtagaccgtagtacctgccatgtctgacaccctgcatccaagctaaaaccagaaacagcgctgggcctccctgtggacaagtat

SEQ ID NO: 447377 - DNA, 3421 bp, Homo sapiens
  misc_feature (816)..(816): n is a, c, g, or t
gctagtcggccctgcactacaacgttcgaacgtttcgtataagacatcgctgctccttcagagtgatacgtaatgatcaagcgcttgtattgtgctggcccaccaatcctataggcctcaactagcttaaagtcagctcgcggactgtctctggacaaaatctgctggaaatgatggcctgtgaccgactgagccaatcagggcacatgttgctaagcttaagtcgtggcaagcaagatttcttaaaagaggttgttgaaacttttgccaacaaaattgggcagtctgcgttatatgatgctctgttttctagtcagtcacctaaggatacatcttttcttggtagcgatgatattggaaaaattgaagtatccagtggtgaggaaaatgaacaagttgtttttagtcacagggcagaaatctacagatatgataaagatgttggtcaatggaaagaaaggggcattggtgatataaagattttacagaattatgataataagcaagttcgtatagtgatgagaagggaccaagtattaaaactttgtgccaatcacagaataactccagacatgagtttgcaaaatatgaaagggacagaaagagtatgggtgtggactgcatgtgattttgcagatggagaaagaaaagtagagcatttagctgttcgttttaaactacaggatgttgcagactcgtttaagaaaatttttgatgaagcaaaaacagcccaggaaaaagattctttgataacacctcatgtttctcggtcaagcactcccagagagtcaccatgtggcaaaattgctgtagctntattagaagaaaccacaagagagaggacagatgttattcagggtgatgatgtagcagatgcagcttcagaagttgaagtgtctagcacatctgaaacaacaacaaaagcagtggtttctcctccaaagtttgtatttgtttcagagtctgttaaaagaatttttagtagtgaaaaatcaaaaccatttgcatttggcaacagttctgccactgggtctttgtttagatttagttttaatgcacctttgaaaagtaacaatagtgaaactagttcagtagcccagagtggatctgaaagcaaagtggaacctaaaaaatgtgaactgtcaaagaactctgatatcgaacagtcttcagatagcaaagtcaaaaatctctctgcttcctttccaacggaagaatcttcaatcaactacacatttaaaacaccagaaaaggagcctccattatggcatgctgaatttaccaaagaagaattggttcagaagctccgttccaccacaaaaagtgcagatcacttaaacggcctgcttcgggaaatagaggcaaccaatgcagtccttatggagcaaattaagcttctcaaaagtgaaataagaagattggaaaggaatcaagagcgagagaagtctgcagctaacctggaatacttgaagaacgtcttgctgcagttcattttcttgaagccaggtagtgaaagagagagacttcttcctgttataaatacgatgttgcagctcagccctgaagaaaagggaaaacttgctgcggttgctcaagatgaggaagaaaatgcttcccgttcttctggatgagcatcctatcttcgtagttggtttggacttcgataggttgatggaaggaatacttctattaactaaatagaatctgtttacaaaaatggttcgtgtgtgttaccattattcttttgtcaaaaagtgtgtatatatgtttgcatttacatatatttgtacatctgtatgacagatgtattttaaaagtttcaacttgaagtaaaagtacaacagcttgaagtgttgataccaggccacagccctctaactcatgtgatctcccatgcatgctgccagaataaaaccaccaggaatgaattcactccccacttctctggaacctcaggacccgcccatttctcggcagtactgtgaattttgaagttaaactaaattttggtaccataccaactggaatttaggctttaaaaataatgtttcaaggccaggtgtggtgattcatgcctgaaatcccactactttgggaggctgaggctggagaatcgcttgaggctagtgagctgtgattgtaccactgcactccagctcggggaacagagcgagaccttgtctctaaaaataataatagtaataaaaataacgttttatgactatttattgcaaggtcagatttacagattgttataaattgttgagaaatttttgtgattagaatatgaaggaaaaagctttgttggtaaaagtgacatgttaaggggctatgaagtaaatatgctgcagttaattgtgctaagttaaaatacagtttagttatttgctttaaaataaactcttctttttttctttaaagtatactacctcaaaactcattatgttgtcagagccctagagctggctagtgtaacactgactatgagtaggtgggcccaccacttgagttgaggtgatttcatggtgtctttccaggctcttgatagggtgtcactgcatgcaagccatgaatctgttttgagaatcctctccattttcccaaataaaaacctatcccaacagtgactatatcactcagcattggatctaaatataaaagtggtgctttcagtgtttttggcagatagtgttccataacctttccatcagaagggattttagacaccttagaggtccgtgctacatcttcacagttcctccgaataaccttaggtggtagtgttacttgcctttgacacctgtgcatatgttttaatgactagatccaaactgtgttgttcttaaatcaaaaattggataatttttaatatttatgtattaatcacacagtgtgctctctgaagttctcttaagccttcagtttatactcttaattttctttctgagctggggaactgactttgcactttggttacacagaacattggtttccaatttagtttaactgaaatttgctgctgatatgttgagtttgttctttaaaaaatatctcatatatctcgtctttcctccttagaagaacagacctaactagcgaatgtatgaatgaaaatgcatctatttcagagccgacatgaagagtttagtttttttactttataaactgtgaatatgagtatgccagctgcattagatgtaactaatcatatttaaatatatttcactttgactttagaccttttgaagtctgtataaacttgttttgaaatacagtctccacttacgaatgtcataacaaaatacttttttgcatgataaaaaattactttgattacaaaaggcatattctttcatggtttctgcaatgagaggaagtgtaatgattattttaatatttctattaaaactgtatattttta

SEQ ID NO: 447378 - DNA, 6354 bp, Homo sapiens
  misc_feature (5490)..(5490): n is a, c, g, or t
gatcacagctcctgcatggatcaaggagcatcactgcagctgcaaactgcagcttcaaactctccggctcaagcgaccctcctgcctcaacctccccagtagctgggcctacaggcacgtgtgtctgtgcccaataataccacattttaaaaatccatcttcagtagatggaaatttggattgtttccaccttttactaataaaaatagtactgctataaacattcatgtataggttttcttttgtttttgttttttcttttttgtagagatgggggtctcgctgtgttgcccaggctggtctcaaattcctggactcaagtgatcctcccatcaaaaactcccaaagtgctgggattacaggcgtgagccactatgcctggcctgtatacaagtttttgtgtagacatgtttacatccaattaatgaacacaggatgtctttccattgatttagctcctctttaatttccttcaacagtgttctgtagtttccagtctacaagtcttacacttttgggttaaatttattcataattattttattatttttgataatattataaatggaattgtttacttaattttacttgaattgttccttgctggtgtataagtagacatctcatttttttagttgacctcgtatggtacaatctctttgaactcatttattatcactgatagtttaggtctttttttttcgaggtttcattaaggttttctatagataagatcatgtcaagacaccctcagaccacagggcggcgccacgagcccggccgagtgcagctggagcgccgacgtcgccgaggatacacagtgctgaggcagaacgcaggttcgtcacagtgggcctccgtgggcggcgccgcacgctcgtcacagtgggcctccgccggctacgccgctgcttcagtggcttgcaggcactttcctcttggaagtggcgactgctgcggggctgagcggtgctcgcacgcgtctcgggagccaggttggcggcgcgatgaggcgcagcaaggccgatgtggagcggtacgtcgcctcggtgctgggtctcaccccgtcgcctcgacagaagtcaatgaaaggattctattttgcaaagctgtattatgaagctaaagaatatgatcttgctaaaaaatacatatgtacttacattaatgtgcaagagagggatcccaaagctcacagatttctgggtcttctttatgaattggaagaaaacacagagaaagccgttgaatgttacaggcgttcagtggaattaaacccaacacaaaaagatcttgtgttgaagattgcagaattgctttgtaaaaatgatgttactgatggaagagcaaaatactgggtcgaaagagcagcaaaacttttcccaggaagtcctgcaatttataaactaaaggaacagcttctagattgtgaaggtgaagatggatggaataaactttttgacttgattcagtcagaactttatgtaagacctgatgacgtccatgtgaacatccggctagtggagttgtatcgctcaactaaaagattgaaggatgctgtggcccactgccatgaggcagagaggaacatagctttgcgttcaagtttagagtggaattcgtgtgttgtacagacccttaaggaatatctggagtctttacagtgtttggagtctgataaaagtgactggcaagcaaccaatacagacttactgctggcctatgctaatcttatgcttcttacgctttccactagagatgtgcaggaaaatagagaattactggaaagttttgatagtgctcttcagtctgcgaaatcttctttgggtggaaatgatgaactgtcagctactttcttagaaatgaaaggacatttctatatgtatgctggttctctgctcttgaagatgggtcagcatggtaataatgttcaatggcgagctctttctgagctggctgcattgtgctatctcatagcatttcaggttccaagaccaaagattaaattaagagaaggtaaagctggacaaaatctgctggaaatgatggcctgtgaccgactgagccaatcagggcacatgttgctaagcttaagtcgtggcaagcaagatttcttaaaagaggttgttgaaacttttgccaacaaaattgggcagtctgcgttatatgatgctctgttttctagtcagtcacctaaggatacatcttttcttggtagcgatgatattggaaaaattgatgtacaagaaccagagcttgaagatttggctagatacgatgttggtgctattcgagcacataatggtagtcttcagcatcttacttggcttggcttacagtggaattcattgcctgctttacctggaatccgaaaatggctaaaacagcttttccatcgtttgccccatgaaacctcaaggcttgaaacaaatgcgcctgaatcaatatgtattttagatcttgaagtatttctccttggagtagtatataccagccacttacaattaaaggagaaatgtaattctcaccatagctcctatcagccgttatgcctgccctttcctgtgtgtaaacagctttgtacagaaagacaaaaatcttggtgggatgcggtttgtactctgattcacagaaaagcagtacctggaaacttggcaaaattgagacttctagttcagcatgaaataaacactctaagagcccaggaaaaacatggccttcaacctgctctgcttgtacattgggcaaaataccttcagaaaacgggcagcggtcttaattctttttatggtcaactagaatacatagggagaagtgttcattattggaagaaagttttgccattgttgaagataataaagaagaacagtattcctgaacctattgatcctctgtttaaacattttcatagtgtagacattcaggcatcagaaattgttgaatatgaagaagacgcacacataacttttgctatgttggatgcagtaaatggaaatatagaagatgctgtgactgcttttgaatctataaaaagtgttgtttcttattggaatcttgcactgatttttcacaggaaggcagaagacattgaaaatgatgccctttctcctgaagaacaagaagaatgcagaaattatctgacaaagaccagggactacctaataaagattatagatgacggtgattcaaatctttcagtggtcaagaaattgcctgtgcccctggagtctgtaaaacagatgcttaattcagtcatgcaggaactcgaagactatagtgaaggaggtcctctctataaaaatggttctttgcgaaatgcagattcagaaataaaacattctacaccgtctcctaccaaatattcactatcaccaagtaaaagttacaagtattctcccgaaacaccacctcgatggacagaagatcggaattctttactgaatatgatttgccaacaagtagaggccattaagaaagaaatgcaggagttgaaactaaatagcagtaagtcagcatcccgtcatcgttggcccacagagaattatggaccagactcggtgcctgatggatatcaggggtcacagacatttcatggggctccactaacagttgcaactactggcccttcagtatattatagtcagtcaccagcatataattcccagtatcttctcagaccagcagctaatgttactcccacaaagggttcttctaatacagaatttaagtcaaccaaagaaggattttccatccctgtgtctgctgatggatttaaatttggcatttcggaaccaggaaatcaagaaaagaaaagggaaaagcctcttgaaaatgatactggcttccaggctcaggatattagtggccggaagaagggccgtggtgtgatttttggccaaacaagtagcacttttacatttgcagatgttgcaaaatcaacttcaggagaaggatttcagtttggcaaaaaagacctcaatttcaagggattttcaggtgctggagaaaaattattctcatcacgatacggtaaaatggccaataaagcaaacacttccggtgactttgagaaagatgatgatgcctataagactgaggacagcgatgacatccattttgaaccagtagttcaaatgcctgaaaaagtagaacttgtaacaggagaagaaggtgaaaaagttctgtattcacagggggtaaaactatttagatttgatgctgaggtaaggcagtggaaagaaaggggcttggggaacttaaaaattctcaaaaacgaggtcaatggcaaactaagaatgctgatgcgaagagaacaagtactaaaagtgtgtgctaatcattggataacgactacaatgaacctgaagcccctctctggatcagatagagcatggatgtggtcagccagtgatttctctgacggtgatgccaaactagagcggttggcagcaaaatttaaaacaccagagctggctgaagaattcaagcagaaatttgaggaatgccagcggcttctgttagacataccacttcaaactccccataaacttgtagatactggcagagctgccaagttaatacagagagctgaagaaatgaagagtggactgaaagatttcaaaacatttttgacaaatgatcaaacaaaagtcactgaggaagaaaataagggttcaggtacaggtgtggccggtgcctcagacacaacaataaaacccaatgctgaaaacactgggcccacattagaatgggataactatgacttaagggaagatgctttggatgatagtgtcagtagtagctcagtacatgcttctccattggcaagtagccctgtgagaaaaaatcttttccgctttgatgagtcaacaacaggatctaacttcagttttaaatctgctttgagtctatctaagtctcctgccaagttgaatcagagtgggacttcagttggcactgatgaagaatctgttgttactcaagaagaagagagagatggacagtactttgaacctgttgttcctttacctgatctagttgaagtatccagtggtgaggaaaatgaacaagttgtttttagtcacagggcagaaatctacagatatgataaagatgttggtcaatggaaagaaaggggcattggtgatataaagattttacagaattatgataataagcaagttcgtatagtgatgagaagggaccaagtattaaaactttgtgccaatcacagaataactccagacatgagtttgcaaaatatgaaagggacagaaagagtatgggtgtggactgcatgtgattttgcagatggagaaagaaaagtagagcatttagctgttcgttttaaactacaggatgttgcagactcgtttaagaaaatttttgatgaagcaaaaacagcccaggaaaaagattctttgataacacctcatgtttctcggtcaagcactcccagagagtcaccatgtggcaaaattgctgtagctntattagaagaaaccacaagagagaggacagatgttattcagggtgatgatgtagcagatgcagcttcagaagttgaagtgtctagcacatctgaaacaacaacaaaagcagtggtttctcctccaaagtttgtatttgtttcagagtctgttaaaagaatttttagtagtgaaaaatcaaaaccatttgcatttggcaacagttctgccactgggtctttgtttagatttagttttaatgcacctttgaaaagtaacaatagtgaaactagttcagtagcccagagtggatctgaaagcaaagtggaacctaaaaaatgtgaactgtcaaagaactctgatatcgaacagtcttcagatagcaaagtcaaaaatctctctgcttcctttccaacggaagaatcttcaatcaactacacatttaaaacaccagaaaagggtaggtactttgttgttaaagttaagcacaatttttctttcttttaatgtttagcttgatgcagactctttgtgggatactaatgttgggatataaacgatgctttgtgaacacccccaaaatatttgagcaattttttttctcccttaataagttcacggtgaggtttcaaagagcaagagaacttagttaaagacatttcagtaactggaagatacttctatcatgctagggcagagcaaaagaacttggtacagtgtacggactcatgcttgaatcatgcgcattaacgtgagtctttttttaaagtgttcattttcatttgttctgtttcttttgtcactcagaaaacatgatattgaggctgggcacggtggctcactcctagaatgccagcactttgggaggttgaggtgggcagatcac

SEQ ID NO: 447379 - DNA, 2042 bp, Homo sapiens
gatcacagctcctgcatggatcaaggagcatcactgcagctgcaaactgcagcttcaaactctccggctcaagcgaccctcctgcctcaacctccccagtagctgggcctacaggcacgtgtgtctgtgcccaataataccacattttaaaaatccatcttcagtagatggaaatttggattgtttccaccttttactaataaaaatagtactgctataaacattcatgtataggttttcttttgtttttgttttttcttttttgtagagatgggggtctcgctgtgttgcccaggctggtctcaaattcctggactcaagtgatcctcccatcaaaaactcccaaagtgctgggattacaggcgtgagccactatgcctggcctgtatacaagtttttgtgtagacatgtttacatccaattaatgaacacaggatgtctttccattgatttagctcctctttaatttccttcaacagtgttctgtagtttccagtctacaagtcttacacttttgggttaaatttattcataattattttattatttttgataatattataaatggaattgtttacttaattttacttgaattgttccttgctggtgtataagtagacatctcatttttttagttgacctcgtatggtacaatctctttgaactcatttattatcactgatagtttaggtctttttttttcgaggtttcattaaggttttctatagataagatcatgtcaagacaccctcagaccacagggcggcgccacgagcccggccgagtgcagctggagcgccgacgtcgccgaggatacacagtgctgaggcagaacgcaggttcgtcacagtgggcctccgtgggcggcgccgcacgctcgtcacagtgggcctccgccggctacgccgctgcttcagtggcttgcaggcactttcctcttggaagtggcgactgctgcggggctgagcggtgctcgcacgcgtctcgggagccaggttggcggcgcgatgaggcgcagcaaggccgatgtggagcggtacgtcgcctcggtgctgggtctcaccccgtcgcctcgacagaagtcaatgaaaggattctattttgcaaagctgtattatgaagctaaagaatatgatcttgctaaaaaatacatatgtacttacattaatgtgcaagagagggatcccaaagctcacagatttctgggtcttctttatgaattggaagaaaacacagagaaagccgttgaatgttacaggcgttcagtggaattaaacccaacacaaaaagatcttgtgttgaagattgcagaattgctttgtaaaaatgatgttactgatggaagagcaaaatactgggtcgaaagagcagcaaaacttttcccaggaagtcctgcaatttataaactaaaggaacagcttctagattgtgaaggtgaagatggatggaataaactttttgacttgattcagtcagaactttatgtaagacctgatgacgtccatgtgaacatccggctagtggagttgtatcgctcaactaaaagattgaaggatgctgtggcccactgccatgaggcagagaggaacatagctttgcgttcaagtttagagtggaattcgtgtgttgtacagacccttaagttttgatagtgctcttcagtctgcgaaatcttctttgggtggaaatgatgaactgtcagctactttcttagaaatgaaaggacatttctatatgtatgctggttctctgctcttgaagatgggtcagcatggtaataatgttcaatggcgagctctttctgagctggctgcattgtgctatctcatagcatttcaggtaagtcttccacttgtaggagcaattgacatttcacggagtcttgatgtgttttaaatgaaggtgtgctctggtatgtaatgacaatatgtgaacaaacctgtggaattaaagttaaaatgaaatagtcaatttgatacagtggaaaataactaagcatacacaatactggtgaggctggtgaaacagggatgttgaatgca

SEQ ID NO: 447380 - DNA, 5685 bp, Homo sapiens
tcatttttgagattgagttaccatggagggaaagaacatgtgttttaccagtggaacgcattctttgtgttatctcttcgatttttaacattttatgtttccagtttataaactttgcctccagtttgatgaagaaaatttagctattagaaagtatttaaaatctcaaaagtatgacattttaaaatgttagcaggtttaaagataacttagtttttcaactcttaacccaaaattatacttgtatactataatttgtgttgaattacttggtattatttatcatcctagtaagatctattttatataatttgattcactttttatattgaattatgttaattgtttttgtaatacacctttcatatttcttcaaagaaaactagtgttgggttattgctaattttgcttcgtggtttggttatttacatataaaaattatattgttttaaaaattgcaaagtgatcatttattgacacatcagcaagaattaatgttgaaatgcaagttttttcccctatccttaactaagtgtgtagatatctttgttttgtttctttaatagatagcaaacaataaagatgcattgaggaagacatggaaccctaagtttacattgagaagtcactttgatggcatccgagcccttgctttccatcccattgagcctgttttgataacagcatcagaggatcacacattaaaaatgtggaatttacagaaaacagccccagccaaaaagtgagaatattctactttaacattatttgaatattttaagtaacattttcagcagaaaactacatattttatgatttctgttaaatttcccaaacatttcttctagttctttcttccatgtcatgtaatttattgtgtttttccatttatacaacctaatgctaggttagaaaactgatgcttaggaagatatggtattatcttttggtttcaccagggtttgtgaatactgattacagtctttatacataacagtatttttaaatggctgctatatttggggagccccttgtctatactgaaggtttggactgttcttgtaaacaggtatatgcatctttaaaataatcaaatgtccacctccaccttgccccattgtttactagatttagacttatgagatggagcagagaaaagcctcactgggatgggtggagggtcttggtcttgtcttttggccttgagactttaggtactttccatacccaccaatatgtctagactcagaggctaacatgactgctagtgctcaccttggccctttagttcctgtctaagcatggatagacatgagttagtataaaccctttaaaagtcacaaagctaaatctggttctacttgcttgggtccttatcggagctccactcctttgggtcacatgtcaaaaaaaaaaaaaaaaaggtccgctgcgctgggggctcggtctatgacgagcagcggggtctgccatgggtcgggggctgctcaggggcctgtggccgctgcacatcgtcctgtggacgcgtatcgccagcacgatcccaccgcacgttcagaagtcggttaataacgacatgatagtcactgacaacaacggtgcagtcaagtttccacaactgtgtaaattttgtgatgtgagattttccacctgtgacaaccagaaatcctgcatgagcaactgcagcatcacctccatctgtgagaagccacaggaagtctgtgtggctgtatggagaaagaatgacgagaacataacactagagacagtttgccatgaccccaagctcccctaccatgactttattctggaagatgctgcttctccaaagtgcattatgaaggaaaaaaaaaagcctggtgagactttcttcatgtgttcctgtagctctgatgagtgcaatgacaacatcatcttctcagaagaatataacaccagcaatcctgacttgttgctagtcatatttcaagtgacaggcatcagcctcctgccaccactgggagttgccatatctgtcatcatcatcttctactgctaccgcgttaaccggcagcagaagctgagttcaacctgggaaaccggcaagacgcggaagctcatggagttcagcgagcactgtgccatcatcctggaagatgaccgctctgacatcagctccacgtgtgccaacaacatcaaccacaacacagagctgctgcccattgagctggacaccctggtggggaaaggtcgctttgctgaggtctataaggccaagctgaagcagaacacttcagagcagtttgagacagtggcagtcaagatctttccctatgaggagtatgcctcttggaagacagagaaggacatcttctcagacatcaatctgaagcatgagaacatactccagttcctgacggctgaggagcggaagacggagttggggaaacaatactggctgatcaccgccttccacgccaagggcaacctacaggagtacctgacgcggcatgtcatcagctgggaggacctgcgcaagctgggcagctccctcgcccgggggattgctcacctccacagtgatcacactccatgtgggaggcccaagatgcccatcgtgcacagggacctcaagagctccaatatcctcgtgaagaacgacctaacctgctgcctgtgtgactttgggctttccctgcgtctggaccctactctgtctgtggatgacctggctaacagtgggcaggtgggaactgcaagatacatggctccagaagtcctagaatccaggatgaatttggagaatgttgagtccttcaagcagaccgatgtctactccatggctctggtgctctgggaaatgacatctcgctgtaatgcagtgggagaagtaaaagattatgagcctccatttggttccaaggtgcgggagcacccctgtgtcgaaagcatgaaggacaacgtgttgagagatcgagggcgaccagaaattcccagcttctggctcaaccaccagggcatccagatggtgtgtgagacgttgactgagtgctgggaccacgacccagaggcccgtctcacagcccagtgtgtggcagaacgcttcagtgagctggagcatctggacaggctctcggggaggagctgctcggaggagaagattcctgaagacggctccctaaacactaccaaatagctcttctggggcaggctgggccatgtccaaagaggctgcccctctcaccaaagaacagaggcagcaggaagctgcccctgaactgatgcttcctggaaaaccaagggggtcactcccctccctgtaagctgtggggataagcagaaacaacagcagcagggagtgggtgacatagagcattctatgcctttgacattgtcataggataagctgtgttagcacttcctcaggaaatgagattgatttttacaatagccaataacatttgcactttattaatgcctgtatataaatatgaatagctatgttttatatatatatatatatatctatatatgtctatagctctatatatatagccataccttgaaaagagacaaggaaaaacatcaaatattcccaggaaattggttttattggagaactccagaaccaagcagagaaggaagggacccatgacagcattagcatttgacaatcacacatgcagtggttctctgactgtaaaacagtgaactttgcatgaggaaagaggctccatgtctcacagccagctatgaccacattgcacttgcttttgcaaaataatcattccctgcctagcacttctcttctggccatggaactaagtacagtggcactgtttgaggaccagtgttcccggggttcctgtgtgcccttatttctcctggacttttcatttaagctccaagccccaaatctggggggctagtttagaaactctccctcaacctagtttagaaactctaccccatctttaataccttgaatgttttgaaccccactttttaccttcatgggttgcagaaaaatcagaacagatgtccccatccatgcgattgccccaccatctactaatgaaaaattgttctttttttcatctttcccctgcacttatgttactattctctgctcccagccttcatccttttctaaaaaggagcaaattctcactctaggctttatcgtgtttactttttcattacacttgacttgattttctagttttctatacaaacaccaatgggttccatctttctgggctcctgattgctcaagcacagtttggcctgatgaagaggatttcaactacacaatactatcattgtcaggactatgacctcaggcactctaaacatatgttttgtttggtcagcacagcgtttcaaaaagtgaagccactttataaatatttggagattttgcaggaaaatctggatccccaggtaaggatagcagatggttttcagttatctccagtccacgttcacaaaatgtgaaggtgtggagacacttacaaagctgcctcacttctcactgtaaacattagctctttccactgcctacctggaccccagtctaggaattaaatctgcacctaaccaaggtcccttgtaagaaatgtccattcaagcagtcattctctgggtatataatatgattttgactaccttatctggtgttaagatttgaagttggccttttattggactaaaggggaactcctttaagggtctcagttagcccaagtttcttttgcttatatgttaatagttttaccctctgcattggagagaggagtgctttactccaagaagctttcctcatggttaccgttctctccatcatgccagccttctcaacctttgcagaaattactagagaggatttgaatgtgggacacaaaggtcccatttgcagttagaaaatttgtgtccacaaggacaagaacaaagtatgagctttaaaactccataggaaacttgttaatcaacaaagaagtgttaatgctgcaagtaatctcttttttaaaactttttgaagctacttattttcagccaaataggaatattagagagggactggtagtgagaatatcagctctgtttggatggtggaaggtctcattttattgagatttttaagatacatgcaaaggtttggaaatagaacctctaggcaccctcctcagtgtgggtgggctgagagttaaagacagtgtggctgcagtagcatagaggcgcctagaaattccacttgcaccgtagggcatgctgataccatcccaatagctgttgcccattgacctctagtggtgagtttctagaatactggtccattcatgagatattcaagattcaagagtattctcacttctgggttatcagcataaactggaatgtagtgtcagaggatactgtggcttgttttgtttatgtttttttttcttattcaagaaaaaagaccaaggaataacattctgtagttcctaaaaatactgacttttttcactactatacataaagggaaagttttattcttttatggaacacttcagctgtactcatgtattaaaataggaatgtgaatgctatatactctttttatatcaaaagtctcaagcacttatttttattctatgcattgtttgtcttttacataaataaaatgtttattagattgaataaagcaaaatactcaggtgagca

SEQ ID NO: 447381 - DNA, 4863 bp, Homo sapiens
aactacaaattcacatctcctgtgtgagccatgggtgagttgagtagaatggtggtagaattatatgggttacattaactacttagactttgtcctatttttcctatatgaaaatagttgaaattctcataaaaatgcatgtatgatgtgaaactgaagtataatgtacagtcagataattttgaatatattttgtgaaatagatgtttatgatttataacagcagtattttaatttctatgcagcttaaattgatgcttggataggggaaaaggatgaagaagaaactcaatggtatgttaactgagagaatgaagtaaagtggcatagtaacgacagttataaaaggggcactgcataccccattgctgtcaagggattgtaaacttccagactgggctaaacgaatgctgggaaaggtctgtacagccacaacaagtccttagacttaggacttagaagcttatttgcagtagttattttaggagttacaggattctggggactaattcatgttaactgaatttacaagacatatatatatttagttgagacatttaattaccaagataactagaaatctcatcagtaggaaggtctccttgggctgtttgttgctatgtttatgaagatggtttcatgaacatggagggagaagccgtaaaatggttttaactaatgaccaggcatgatagcttattcctttgggaagccaaggcgagaggatcccttgagccttgagcctaggaatttgagaccagcctgggcaacataataagaccccatctgtacaaaacattaaaagttacctgggcataacttttcctataatcctataattcctataatcccagctacttgggaggctgaggtgggaggattgcttgagcctgggaggtcgaggatgcagtgagcgatgatactaccactgcataacctgggcaatggagtgaggtcccataacttttcttttctttactttattctggaagatgctgcttctccaaagtgcattatgaaggaaaaaaaaaagcctggtgagactttcttcatgtgttcctgtagctctgatgagtgcaatgacaacatcatcttctcagaagaatataacaccagcaatcctgacttgttgctagtcatatttcaagtgacaggcatcagcctcctgccaccactgggagttgccatatctgtcatcatcatcttctactgctaccgcgttaaccggcagcagaagctgagttcaacctgggaaaccggcaagacgcggaagctcatggagttcagcgagcactgtgccatcatcctggaagatgaccgctctgacatcagctccacgtgtgccaacaacatcaaccacaacacagagctgctgcccattgagctggacaccctggtggggaaaggtcgctttgctgaggtctataaggccaagctgaagcagaacacttcagagcagtttgagacagtggcagtcaagatctttccctatgaggagtatgcctcttggaagacagagaaggacatcttctcagacatcaatctgaagcatgagaacatactccagttcctgacggctgaggagcggaagacggagttggggaaacaatactggctgatcaccgccttccacgccaagggcaacctacaggagtacctgacgcggcatgtcatcagctgggaggacctgcgcaagctgggcagctccctcgcccgggggattgctcacctccacagtgatcacactccatgtgggaggcccaagatgcccatcgtgcacagggacctcaagagctccaatatcctcgtgaagaacgacctaacctgctgcctgtgtgactttgggctttccctgcgtctggaccctactctgtctgtggatgacctggctaacagtgggcaggtgggaactgcaagatacatggctccagaagtcctagaatccaggatgaatttggagaatgttgagtccttcaagcagaccgatgtctactccatggctctggtgctctgggaaatgacatctcgctgtaatgcagtgggagaagtaaaagattatgagcctccatttggttccaaggtgcgggagcacccctgtgtcgaaagcatgaaggacaacgtgttgagagatcgagggcgaccagaaattcccagcttctggctcaaccaccagggcatccagatggtgtgtgagacgttgactgagtgctgggaccacgacccagaggcccgtctcacagcccagtgtgtggcagaacgcttcagtgagctggagcatctggacaggctctcggggaggagctgctcggaggagaagattcctgaagacggctccctaaacactaccaaatagctcttctggggcaggctgggccatgtccaaagaggctgcccctctcaccaaagaacagaggcagcaggaagctgcccctgaactgatgcttcctggaaaaccaagggggtcactcccctccctgtaagctgtggggataagcagaaacaacagcagcagggagtgggtgacatagagcattctatgcctttgacattgtcataggataagctgtgttagcacttcctcaggaaatgagattgatttttacaatagccaataacatttgcactttattaatgcctgtatataaatatgaatagctatgttttatatatatatatatatatctatatatgtctatagctctatatatatagccataccttgaaaagagacaaggaaaaacatcaaatattcccaggaaattggttttattggagaactccagaaccaagcagagaaggaagggacccatgacagcattagcatttgacaatcacacatgcagtggttctctgactgtaaaacagtgaactttgcatgaggaaagaggctccatgtctcacagccagctatgaccacattgcacttgcttttgcaaaataatcattccctgcctagcacttctcttctggccatggaactaagtacagtggcactgtttgaggaccagtgttcccggggttcctgtgtgcccttatttctcctggacttttcatttaagctccaagccccaaatctggggggctagtttagaaactctccctcaacctagtttagaaactctaccccatctttaataccttgaatgttttgaaccccactttttaccttcatgggttgcagaaaaatcagaacagatgtccccatccatgcgattgccccaccatctactaatgaaaaattgttctttttttcatctttcccctgcacttatgttactattctctgctcccagccttcatccttttctaaaaaggagcaaattctcactctaggctttatcgtgtttactttttcattacacttgacttgattttctagttttctatacaaacaccaatgggttccatctttctgggctcctgattgctcaagcacagtttggcctgatgaagaggatttcaactacacaatactatcattgtcaggactatgacctcaggcactctaaacatatgttttgtttggtcagcacagcgtttcaaaaagtgaagccactttataaatatttggagattttgcaggaaaatctggatccccaggtaaggatagcagatggttttcagttatctccagtccacgttcacaaaatgtgaaggtgtggagacacttacaaagctgcctcacttctcactgtaaacattagctctttccactgcctacctggaccccagtctaggaattaaatctgcacctaaccaaggtcccttgtaagaaatgtccattcaagcagtcattctctgggtatataatatgattttgactaccttatctggtgttaagatttgaagttggccttttattggactaaaggggaactcctttaagggtctcagttagcccaagtttcttttgcttatatgttaatagttttaccctctgcattggagagaggagtgctttactccaagaagctttcctcatggttaccgttctctccatcatgccagccttctcaacctttgcagaaattactagagaggatttgaatgtgggacacaaaggtcccatttgcagttagaaaatttgtgtccacaaggacaagaacaaagtatgagctttaaaactccataggaaacttgttaatcaacaaagaagtgttaatgctgcaagtaatctcttttttaaaactttttgaagctacttattttcagccaaataggaatattagagagggactggtagtgagaatatcagctctgtttggatggtggaaggtctcattttattgagatttttaagatacatgcaaaggtttggaaatagaacctctaggcaccctcctcagtgtgggtgggctgagagttaaagacagtgtggctgcagtagcatagaggcgcctagaaattccacttgcaccgtagggcatgctgataccatcccaatagctgttgcccattgacctctagtggtgagtttctagaatactggtccattcatgagatattcaagattcaagagtattctcacttctgggttatcagcataaactggaatgtagtgtcagaggatactgtggcttgttttgtttatgtttttttttcttattcaagaaaaaagaccaaggaataacattctgtagttcctaaaaatactgacttttttcactactatacataaagggaaagttttattcttttatggaacacttcagctgtactcatgtattaaaataggaatgtgaatgctatatactctttttatatcaaaagtctcaagcacttatttttattctatgcattgtttgtcttttacataaataaaatgtttattagattgaataaagcaaaatactcaggtgagca

SEQ ID NO: 447382 - DNA, 4988 bp, Homo sapiens
acctaaagaaaaacattttacaacttgacagtgtatgcacatacatacatgcatatagacacaactgaagcacaaatttaatgaagtagaatttaccgttactattttatttgggaaagaaatgtgctcgcgactcaatagattggagtattcactcctggatctcaacttgcaatttgaaaacgcatctctaaagcacctaggagcaatctgaagaaagctgaggggaggcggcagatgttctgatctactagggaaaacgtggacgttttctgttgttactttgtgaactgtgtgcacttagtcattcttgagtaaatacttggagcgaggaactcctgagtggtgtgggagggcggtgaggggcagctgaaagtcggccaaagctctcggaggggctggtctaggaaacatgattggcagctacgagagagctaggggctggacgtcgaggagagggagaaggctctcgggcggagagaggtcctgcccagctgttggcgaggagtttcctgtttcccccgcagcgctgagttgaagttgagtgagtcactcgcgcgcacggagcgacgacacccccgcgcgtgcacccgctcgggacaggagccggactcctgtgcagcttccctcggccgccgggggcctccccgcgcctcgccggcctccaggccccctcctggctggcgagcgggcgccacatctggcccgcacatctgcgctgccggcccggcgcggggtccggagagggcgcggcgcggaggcgcagccaggggtccgggaaggcgccgtccgctgcgctgggggctcggtctatgacgagcagcggggtctgccatgggtcgggggctgctcaggggcctgtggccgctgcacatcgtcctgtggacgcgtatcgccagcacgatcccaccgcacgttcagaagtcggttaataacgacatgatagtcactgacaacaacggtgcagtcaagtttccacaactgtgtaaattttgtgatgtgagattttccacctgtgacaaccagaaatcctgcatgagcaactgcagcatcacctccatctgtgagaagccacaggaagtctgtgtggctgtatggagaaagaatgacgagaacataacactagagacagtttgccatgaccccaagctcccctaccatgactttattctggaagatgctgcttctccaaagtgcattatgaaggaaaaaaaaaagcctggtgagaaatataacaccagcaatcctgacttgttgctagtcatatttcaagtgacaggcatcagcctcctgccaccactgggagttgccatatctgtcatcatcatcttctactgctaccgcgttaaccggcagcagaagctgagttcaacctgggaaaccggcaagacgcggaagctcatggagttcagcgagcactgtgccatcatcctggaagatgaccgctctgacatcagctccacgtgtgccaacaacatcaaccacaacacagagctgctgcccattgagctggacaccctggtggggaaaggtcgctttgctgaggtctataaggccaagctgaagcagaacacttcagagcagtttgagacagtggcagtcaagatctttccctatgaggagtatgcctcttggaagacagagaaggacatcttctcagacatcaatctgaagcatgagaacatactccagttcctgacggctgaggagcggaagacggagttggggaaacaatactggctgatcaccgccttccacgccaagggcaacctacaggagtacctgacgcggcatgtcatcagctgggaggacctgcgcaagctgggcagctccctcgcccgggggattgctcacctccacagtgatcacactccatgtgggaggcccaagatgcccatcgtgcacagggacctcaagagctccaatatcctcgtgaagaacgacctaacctgctgcctgtgtgactttgggctttccctgcgtctggaccctactctgtctgtggatgacctggctaacagtgggcaggtgggaactgcaagatacatggctccagaagtcctagaatccaggatgaatttggagaatgttgagtccttcaagcagaccgatgtctactccatggctctggtgctctgggaaatgacatctcgctgtaatgcagtgggagaagtaaaagattatgagcctccatttggttccaaggtgcgggagcacccctgtgtcgaaagcatgaaggacaacgtgttgagagatcgagggcgaccagaaattcccagcttctggctcaaccaccagggcatccagatggtgtgtgagacgttgactgagtgctgggaccacgacccagaggcccgtctcacagcccagtgtgtggcagaacgcttcagtgagctggagcatctggacaggctctcggggaggagctgctcggaggagaagattcctgaagacggctccctaaacactaccaaatagctcttctggggcaggctgggccatgtccaaagaggctgcccctctcaccaaagaacagaggcagcaggaagctgcccctgaactgatgcttcctggaaaaccaagggggtcactcccctccctgtaagctgtggggataagcagaaacaacagcagcagggagtgggtgacatagagcattctatgcctttgacattgtcataggataagctgtgttagcacttcctcaggaaatgagattgatttttacaatagccaataacatttgcactttattaatgcctgtatataaatatgaatagctatgttttatatatatatatatatatctatatatgtctatagctctatatatatagccataccttgaaaagagacaaggaaaaacatcaaatattcccaggaaattggttttattggagaactccagaaccaagcagagaaggaagggacccatgacagcattagcatttgacaatcacacatgcagtggttctctgactgtaaaacagtgaactttgcatgaggaaagaggctccatgtctcacagccagctatgaccacattgcacttgcttttgcaaaataatcattccctgcctagcacttctcttctggccatggaactaagtacagtggcactgtttgaggaccagtgttcccggggttcctgtgtgcccttatttctcctggacttttcatttaagctccaagccccaaatctggggggctagtttagaaactctccctcaacctagtttagaaactctaccccatctttaataccttgaatgttttgaaccccactttttaccttcatgggttgcagaaaaatcagaacagatgtccccatccatgcgattgccccaccatctactaatgaaaaattgttctttttttcatctttcccctgcacttatgttactattctctgctcccagccttcatccttttctaaaaaggagcaaattctcactctaggctttatcgtgtttactttttcattacacttgacttgattttctagttttctatacaaacaccaatgggttccatctttctgggctcctgattgctcaagcacagtttggcctgatgaagaggatttcaactacacaatactatcattgtcaggactatgacctcaggcactctaaacatatgttttgtttggtcagcacagcgtttcaaaaagtgaagccactttataaatatttggagattttgcaggaaaatctggatccccaggtaaggatagcagatggttttcagttatctccagtccacgttcacaaaatgtgaaggtgtggagacacttacaaagctgcctcacttctcactgtaaacattagctctttccactgcctacctggaccccagtctaggaattaaatctgcacctaaccaaggtcccttgtaagaaatgtccattcaagcagtcattctctgggtatataatatgattttgactaccttatctggtgttaagatttgaagttggccttttattggactaaaggggaactcctttaagggtctcagttagcccaagtttcttttgcttatatgttaatagttttaccctctgcattggagagaggagtgctttactccaagaagctttcctcatggttaccgttctctccatcatgccagccttctcaacctttgcagaaattactagagaggatttgaatgtgggacacaaaggtcccatttgcagttagaaaatttgtgtccacaaggacaagaacaaagtatgagctttaaaactccataggaaacttgttaatcaacaaagaagtgttaatgctgcaagtaatctcttttttaaaactttttgaagctacttattttcagccaaataggaatattagagagggactggtagtgagaatatcagctctgtttggatggtggaaggtctcattttattgagatttttaagatacatgcaaaggtttggaaatagaacctctaggcaccctcctcagtgtgggtgggctgagagttaaagacagtgtggctgcagtagcatagaggcgcctagaaattccacttgcaccgtagggcatgctgataccatcccaatagctgttgcccattgacctctagtggtgagtttctagaatactggtccattcatgagatattcaagattcaagagtattctcacttctgggttatcagcataaactggaatgtagtgtcagaggatactgtggcttgttttgtttatgtttttttttcttattcaagaaaaaagaccaaggaataacattctgtagttcctaaaaatactgacttttttcactactatacataaagggaaagttttattcttttatggaacacttcagctgtactcatgtattaaaataggaatgtgaatgctatatactctttttatatcaaaagtctcaagcacttatttttattctatgcattgtttgtcttttacataaataaaatgtttattagattgaataaagcaaaatactcaggtgagca

SEQ ID NO: 447383 - DNA, 4994 bp, Homo sapiens
acctaaagaaaaacattttacaacttgacagtgtatgcacatacatacatgcatatagacacaactgaagcacaaatttaatgaagtagaatttaccgttactattttatttgggaaagaaatgtgctcgcgactcaatagattggagtattcactcctggatctcaacttgcaatttgaaaacgcatctctaaagcacctaggagcaatctgaagaaagctgaggggaggcggcagatgttctgatctactagggaaaacgtggacgttttctgttgttactttgtgaactgtgtgcacttagtcattcttgagtaaatacttggagcgaggaactcctgagtggtgtgggagggcggtgaggggcagctgaaagtcggccaaagctctcggaggggctggtctaggaaacatgattggcagctacgagagagctaggggctggacgtcgaggagagggagaaggctctcgggcggagagaggtcctgcccagctgttggcgaggagtttcctgtttcccccgcagcgctgagttgaagttgagtgagtcactcgcgcgcacggagcgacgacacccccgcgcgtgcacccgctcgggacaggagccggactcctgtgcagcttccctcggccgccgggggcctccccgcgcctcgccggcctccaggccccctcctggctggcgagcgggcgccacatctggcccgcacatctgcgctgccggcccggcgcggggtccggagagggcgcggcgcggaggcgcagccaggggtccgggaaggcgccgtccgctgcgctgggggctcggtctatgacgagcagcggggtctgccatgggtcgggggctgctcaggggcctgtggccgctgcacatcgtcctgtggacgcgtatcgccagcacgatcccaccgcacgttcagaagtcggttaataacgacatgatagtcactgacaacaacggtgcagtcaagtttccacaactgtgtaaattttgtgatgtgagattttccacctgtgacaaccagaaatcctgcatgagcaactgcagcatcacctccatctgtgagaagccacaggaagtctgtgtggctgtatggagaaagaatgacgagaacataacactagagacagtttgccatgaccccaagctcccctaccatgactttattctggaagatgctgcttctccaaagtgcattatgaaggaaaaaaaaaagcctggtgagactttcttcatgtgttcctgtagctctgatgagtgcaatgacaacatcatcttctcagaagaatataacaccagcaatcctgacttgttgctagtcatatttcaagtgacaggcatcagcctcctgccaccactgggagttgccatatctgtcatcatcatcttctactgctaccgcgttaaccggcagcagaagctgagttcaacctgggaaaccggcaagacgcggaagctcatggagttcagcgagcactgtgccatcatcctggaagatgaccgctctgacatcagctccacgtgtgccaacaacatcaaccacaacacagagctgctgcccattgagctggacaccctggtggggaaaggtcgctttgctgaggtctataaggccaagctgaagcagaacacttcagagcagtttgagacagtggcagtcaagatctttccctatgaggagtatgcctcttggaagacagagaaggacatcttctcagacatcaatctgaagcatgagaacatactccagttcctgacggctgaggagcggaagacggagttggggaaacaatactggctgatcaccgccttccacgccaagggcaacctacaggagtacctgacgcggcatgtcatcagctgggaggacctgcgcaagctgggcagctccctcgcccgggggattgctcacctccacagtgatcacactccatgtgggaggcccaagatgcccatcgtgcacagggacctcaagagctccaatatcctcgtgaagaacgacctaacctgctgcctgtgtgactttgggctttccctgcgtctggaccctactctgtctgtggatgacctggctaacagtgggcaggtgggaactgcaagatacatggctccagaagtcctagaatccaggatgaatttggagaatgttgagtccttcaagcagaccgatgtctactccatggctctggtgctctgggaaatgacatctcgctgtaatgcagtgggagaagtaaaagattatgagcctccatttggttccaaggtgcgggagcacccctgtgtcgaaagcatgaaggacaacgtgttgagagatcgagggcgaccagaaattcccagcttctggctcaaccaccagggcatccagatggtgtgtgagacgttgactgagtgctgggaccacgacccagaggcccgtctcacagcccagtgtgtggcagaacgcttcagtgagctggagcatctggacaggctctcggggaggagctgctcggaggagaagattcctgaagacggctccctaaacactaccaaatagctcttctggggcaggctgggccatgtccaaagaggctgcccctctcaccaaagaacagaggcagcaggaagctgcccctgaactgatgcttcctggaaaaccaagggggtcactcccctccctgtaagctgtggggataagcagaaacaacagcagcagggagtgggtgacatagagcattctatgcctttgacattgtcataggataagctgtgttagcacttcctcaggaaatgagattgatttttacaatagccaataacatttgcactttattaatgcctgtatataaatatgaatagctatgttttatatatatatatatatatctatatatgtctatagctctatatatatagccataccttgaaaagagacaaggaaaaacatcaaatattcccaggaaattggttttattggagaactccagaaccaagcagagaaggaagggacccatgacagcattagcatttgacaatcacacatgcagtggttctctgactgtaaaacagtgaactttgcatgaggaaagaggctccatgtctcacagccagctatgaccacattgcacttgcttttgcaaaataatcattccctgcctagcacttctcttctggccatggaactaagtacagtggcactgtttgaggaccagtgttcccggggttcctgtgtgcccttatttctcctggacttttcatttaagctccaagccccaaatctggggggctagtttagaaactctccctcaacctagtttagaaactctaccccatctttaataccttgaatgttttgaaccccactttttaccttcatgggttgcagaaaaatcagaacagatgtccccatccatgcgattgccccaccatctactaatgaaaaattgttctttttttcatctttcccctgcacttatgttactattctctgctcccagccttcatccttttctaaaaaggagcaaattctcactctaggctttatcgtgtttactttttcattacacttgacttgattttctagttttctatacaaacaccaatgggttccatctttctgggctcctgattgctcaagcacagtttggcctgatgaagaggatttcaactacacaatactatcattgtcaggactatgacctcaggcactctaaacatatgttttgtttggtcagcacagcgtttcaaaaagtgaagccactttataaatatttggagattttgcaggaaaatctggatccccaggtaaggatagcagatggttttcagttatctccagtccacgttcacaaaatgtgaaggtgtggagacacttacaaagctgcctcacttctcactgtaaacattagctctttccactgcctacctggaccccagtctaggaattaaatctgcacctaaccaaggtcccttgtaagaaatgtccattcaagcagtcattctctgggtatataatatgattttgactaccttatctggtgttaagatttgaagttggccttttattggactaaaggggaactcctttaagggtctcagttagcccaagtttcttttgcttatatgttaatagttttaccctctgcattggagagaggagtgctttactccaagaagctttcctcatggttaccgttctctccatcatgccagccttctcaacctttgcagaaattactagagaggatttgaatgtgggacacaaaggtcccatttgcagttagaaaatttgtgtccacaaggacaagaacaaagtatgagctttaaaactccataggaaacttgttaatcaacaaagaagtgttaatgctgcaagtaatctcttttttggtagtgagaatatcagctctgtttggatggtggaaggtctcattttattgagatttttaagatacatgcaaaggtttggaaatagaacctctaggcaccctcctcagtgtgggtgggctgagagttaaagacagtgtggctgcagtagcatagaggcgcctagaaattccacttgcaccgtagggcatgctgataccatcccaatagctgttgcccattgacctctagtggtgagtttctagaatactggtccattcatgagatattcaagattcaagagtattctcacttctgggttatcagcataaactggaatgtagtgtcagaggatactgtggcttgttttgtttatgtttttttttcttattcaagaaaaaagaccaaggaataacattctgtagttcctaaaaatactgacttttttcactactatacataaagggaaagttttattcttttatggaacacttcagctgtactcatgtattaaaataggaatgtgaatgctatatactctttttatatcaaaagtctcaagcacttatttttattctatgcattgtttgtcttttacataaataaaatgtttattagattgaataaagcaaaatactcaggtgagca

SEQ ID NO: 447384 - DNA, 3534 bp, Homo sapiens
gatctagcaggactccgtgatgttatcgcccaacacagagctgctgcccattgagctggacaccctggtggggaaaggtcgctttgctgaggtctataaggccaagctgaagcagaacacttcagagcagtttgagacagtggcagtcaagatctttccctatgaggagtatgcctcttggaagacagagaaggacatcttctcagacatcaatctgaagcatgagaacatactccagttcctgacggctgaggagcggaagacggagttggggaaacaatactggctgatcaccgccttccacgccaagggcaacctacaggagtacctgacgcggcatgtcatcagctgggaggacctgcgcaagctgggcagctccctcgcccgggggattgctcacctccacagtgatcacactccatgtgggaggcccaagatgcccatcgtgcacagggacctcaagagctccaatatcctcgtgaagaacgacctaacctgctgcctgtgtgactttgggctttccctgcgtctggaccctactctgtctgtggatgacctggctaacagtgggcaggtgggaactgcaagatacatggctccagaagtcctagaatccaggatgaatttggagaatgttgagtccttcaagcagaccgatgtctactccatggctctggtgctctgggaaatgacatctcgctgtaatgcagtgggagaagtaaaagattatgagcctccatttggttccaaggtgcgggagcacccctgtgtcgaaagcatgaaggacaacgtgttgagagatcgagggcgaccagaaattcccagcttctggctcaaccaccagggcatccagatggtgtgtgagacgttgactgagtgctgggaccacgacccagaggcccgtctcacagcccagtgtgtggcagaacgcttcagtgagctggagcatctggacaggctctcggggaggagctgctcggaggagaagattcctgaagacggctccctaaacactaccaaatagctcttctggggcaggctgggccatgtccaaagaggctgcccctctcaccaaagaacagaggcagcaggaagctgcccctgaactgatgcttcctggaaaaccaagggggtcactcccctccctgtaagctgtggggataagcagaaacaacagcagcagggagtgggtgacatagagcattctatgcctttgacattgtcataggataagctgtgttagcacttcctcaggaaatgagattgatttttacaatagccaataacatttgcactttattaatgcctgtatataaatatgaatagctatgttttatatatatatatatatatctatatatgtctatagctctatatatatagccataccttgaaaagagacaaggaaaaacatcaaatattcccaggaaattggttttattggagaactccagaaccaagcagagaaggaagggacccatgacagcattagcatttgacaatcacacatgcagtggttctctgactgtaaaacagtgaactttgcatgaggaaagaggctccatgtctcacagccagctatgaccacattgcacttgcttttgcaaaataatcattccctgcctagcacttctcttctggccatggaactaagtacagtggcactgtttgaggaccagtgttcccggggttcctgtgtgcccttatttctcctggacttttcatttaagctccaagccccaaatctggggggctagtttagaaactctccctcaacctagtttagaaactctaccccatctttaataccttgaatgttttgaaccccactttttaccttcatgggttgcagaaaaatcagaacagatgtccccatccatgcgattgccccaccatctactaatgaaaaattgttctttttttcatctttcccctgcacttatgttactattctctgctcccagccttcatccttttctaaaaaggagcaaattctcactctaggctttatcgtgtttactttttcattacacttgacttgattttctagttttctatacaaacaccaatgggttccatctttctgggctcctgattgctcaagcacagtttggcctgatgaagaggatttcaactacacaatactatcattgtcaggactatgacctcaggcactctaaacatatgttttgtttggtcagcacagcgtttcaaaaagtgaagccactttataaatatttggagattttgcaggaaaatctggatccccaggtaaggatagcagatggttttcagttatctccagtccacgttcacaaaatgtgaaggtgtggagacacttacaaagctgcctcacttctcactgtaaacattagctctttccactgcctacctggaccccagtctaggaattaaatctgcacctaaccaaggtcccttgtaagaaatgtccattcaagcagtcattctctgggtatataatatgattttgactaccttatctggtgttaagatttgaagttggccttttattggactaaaggggaactcctttaagggtctcagttagcccaagtttcttttgcttatatgttaatagttttaccctctgcattggagagaggagtgctttactccaagaagctttcctcatggttaccgttctctccatcatgccagccttctcaacctttgcagaaattactagagaggatttgaatgtgggacacaaaggtcccatttgcagttagaaaatttgtgtccacaaggacaagaacaaagtatgagctttaaaactccataggaaacttgttaatcaacaaagaagtgttaatgctgcaagtaatctcttttttaaaactttttgaagctacttattttcagccaaataggaatattagagagggactggtagtgagaatatcagctctgtttggatggtggaaggtctcattttattgagatttttaagatacatgcaaaggtttggaaatagaacctctaggcaccctcctcagtgtgggtgggctgagagttaaagacagtgtggctgcagtagcatagaggcgcctagaaattccacttgcaccgtagggcatgctgataccatcccaatagctgttgcccattgacctctagtggtgagtttctagaatactggtccattcatgagatattcaagattcaagagtattctcacttctgggttatcagcataaactggaatgtagtgtcagaggatactgtggcttgttttgtttatgtttttttttcttattcaagaaaaaagaccaaggaataacattctgtagttcctaaaaatactgacttttttcactactatacataaagggaaagttttattcttttatggaacacttcagctgtactcatgtattaaaataggaatgtgaatgctatatactctttttatatcaaaagtctcaagcacttatttttattctatgcattgtttgtcttttacataaataaaatgtttattagattgaataaagcaaaatactcaggtgagca

SEQ ID NO: 447385 - DNA, 5828 bp, Homo sapiens
tcatttttgagattgagttaccatggagggaaagaacatgtgttttaccagtggaacgcattctttgtgttatctcttcgatttttaacattttatgtttccagtttataaactttgcctccagtttgatgaagaaaatttagctattagaaagtatttaaaatctcaaaagtatgacattttaaaatgttagcaggtttaaagataacttagtttttcaactcttaacccaaaattatacttgtatactataatttgtgttgaattacttggtattatttatcatcctagtaagatctattttatataatttgattcactttttatattgaattatgttaattgtttttgtaatacacctttcatatttcttcaaagaaaactagtgttgggttattgctaattttgcttcgtggtttggttatttacatataaaaattatattgttttaaaaattgcaaagtgatcatttattgacacatcagcaagaattaatgttgaaatgcaagttttttcccctatccttaactaagtgtgtagatatctttgttttgtttctttaatagatagcaaacaataaagatgcattgaggaagacatggaaccctaagtttacattgagaagtcactttgatggcatccgagcccttgctttccatcccattgagcctgttttgataacagcatcagaggatcacacattaaaaatgtggaatttacagaaaacagccccagccaaaaagtgagaatattctactttaacattatttgaatattttaagtaacattttcagcagaaaactacatattttatgatttctgttaaatttcccaaacatttcttctagttctttcttccatgtcatgtaatttattgtgtttttccatttatacaacctaatgctaggttagaaaactgatgcttaggaagatatggtattatcttttggtttcaccagggtttgtgaatactgattacagtctttatacataacagtatttttaaatggctgctatatttggggagccccttgtctatactgaaggtttggactgttcttgtaaacaggtatatgcatctttaaaataatcaaatgtccacctccaccttgccccattgtttactagatttagacttatgagatggagcagagaaaagcctcactgggatgggtggagggtcttggtcttgtcttttggccttgagactttaggtactttccatacccaccaatatgtctagactcagaggctaacatgactgctagtgctcaccttggccctttagttcctgtctaagcatggatagacatgagttagtataaaccctttaaaagtcacaaagctaaatctggttctacttgcttgggtccttatcggagctccactcctttgggtcacatgtcaaaaaaaaaaaaaaaaaggtccgctgcgctgggggctcggtctatgacgagcagcggggtctgccatgggtcgggggctgctcaggggcctgtggccgctgcacatcgtcctgtggacgcgtatcgccagcacgatcccaccgcacgttcagaagtcggttaataacgacatgatagtcactgacaacaacggtgcagtcaagtttccacaactgtgtaaattttgtgatgtgagattttccacctgtgacaaccagaaatcctgcatgagcaactgcagcatcacctccatctgtgagaagccacaggaagtctgtgtggctgtatggagaaagaatgacgagaacataacactagagacagtttgccatgaccccaagctcccctaccatgactttattctggaagatgctgcttctccaaagtgcattatgaaggaaaaaaaaaagcctggtgagactttcttcatgtgttcctgtagctctgatgagtgcaatgacaacatcatcttctcagaagaatataacaccagcaatcctgacttgttgctagtcatatttcaagtgacaggcatcagcctcctgccaccactgggagttgccatatctgtcatcatcatcttctactgctaccgcgttaaccggcagcagaagctgagttcaacctgggaaaccggcaagacgcggaagctcatggagttcagcgagcactgtgccatcatcctggaagatgaccgctctgacatcagctccacgtgtgccaacaacatcaaccacaacacagagctgctgcccattgagctggacaccctggtggggaaaggtcgctttgctgaggtctataaggccaagctgaagcagaacacttcagagcagtttgagacagtggcagtcaagatctttccctatgaggagtatgcctcttggaagacagagaaggacatcttctcagacatcaatctgaagcatgagaacatactccagttcctgacggctgaggagcggaagacggagttggggaaacaatactggctgatcaccgccttccacgccaagggcaacctacaggagtacctgacgcggcatgtcatcagctgggaggacctgcgcaagctgggcagctccctcgcccgggggattgctcacctccacagtgatcacactccatgtgggaggcccaagatgcccatcgtgcacagggacctcaagagctccaatatcctcgtgaagaacgacctaacctgctgcctgtgtgactttgggctttccctgcgtctggaccctactctgtctgtggatgacctggctaacagtgggcaggtgggaactgcaagatacatggctccagaagtcctagaatccaggatgaatttggagaatgttgagtccttcaagcagaccgatgtctactccatggctctggtgctctgggaaatgacatctcgctgtaatgcagtgggagaagtaaaagattatgagcctccatttggttccaaggtgcgggagcacccctgtgtcgaaagcatgaaggacaacgtgttgagagatcgagggcgaccagaaattcccagcttctggctcaaccaccagggcatccagatggtgtgtgagacgttgactgagtgctgggaccacgacccagaggcccgtctcacagcccagtgtgtggcagaacgcttcagtgagctggagcatctggacaggctctcggggaggagctgctcggaggagaagattcctgaagacggctccctaaacactaccaaatagctcttctggggcaggctgggccatgtccaaagaggctgcccctctcaccaaagaacagaggcagcaggaagctgcccctgaactgatgcttcctggaaaaccaagggggtcactcccctccctgtaagctgtggggataagcagaaacaacagcagcagggagtgggtgacatagagcattctatgcctttgacattgtcataggataagctgtgttagcacttcctcaggaaatgagattgatttttacaatagccaataacatttgcactttattaatgcctgtatataaatatgaatagctatgttttatatatatatatatatatctatatatgtctatagctctatatatatagccataccttgaaaagagacaaggaaaaacatcaaatattcccaggaaattggttttattggagaactccagaaccaagcagagaaggaagggacccatgacagcattagcatttgacaatcacacatgcagtggttctctgactgtaaaacagtgaactttgcatgaggaaagaggctccatgtctcacagccagctatgaccacattgcacttgcttttgcaaaataatcattccctgcctagcacttctcttctggccatggaactaagtacagtggcactgtttgaggaccagtgttcccggggttcctgtgtgcccttatttctcctggacttttcatttaagctccaagccccaaatctggggggctagtttagaaactctccctcaacctagtttagaaactctaccccatctttaataccttgaatgttttgaaccccactttttaccttcatgggttgcagaaaaatcagaacagatgtccccatccatgcgattgccccaccatctactaatgaaaaattgttctttttttcatctttcccctgcacttatgttactattctctgctcccagccttcatccttttctaaaaaggagcaaattctcactctaggctttatcgtgtttactttttcattacacttgacttgattttctagttttctatacaaacaccaatgggttccatctttctgggctcctgattgctcaagcacagtttggcctgatgaagaggatttcaactacacaatactatcattgtcaggactatgacctcaggcactctaaacatatgttttgtttggtcagcacagcgtttcaaaaagtgaagccactttataaatatttggagattttgcaggaaaatctggatccccaggtaaggatagcagatggttttcagttatctccagtccacgttcacaaaatgtgaaggtgtggagacacttacaaagctgcctcacttctcactgtaaacattagctctttccactgcctacctggaccccagtctaggaattaaatctgcacctaaccaaggtcccttgtaagaaatgtccattcaagcagtcattctctgggtatataatatgattttgactaccttatctggtgttaagatttgaagttggccttttattggactaaaggggaactcctttaagggtctcagttagcccaagtttcttttgcttatatgttaatagttttaccctctgcattggagagaggagtgctttactccaagaagctttcctcatggttaccgttctctccatcatgccagccttctcaacctttgcagaaattactagagaggatttgaatgtgggacacaaaggtcccatttgcagttagaaaatttgtgtccacaaggacaagaacaaagtatgagctttaaaactccataggaaacttgttaatcaacaaagaagtgttaatgctgcaagtaatctcttttttaaaactttttgaagctacttattttcagccaaataggaatattagagagggactggtagtgagaatatcagctctgtttggatggtggaaggtctcattttattgagatttttaagatacatgcaaaggtttggaaatagaacctctaggcaccctcctcagtgtgggtgggctgagagttaaagacagtgtggctgcagtagcatagaggcgcctagaaattccacttgcaccgtagggcatgctgataccatcccaatagctgttgcccattgacctctagtggtgagtttctagaatactggtccattcatgagatattcaagattcaagagtattctcacttctgggttatcagcataaactggaatgtagtgtcagaggatactgtggcttgttttgtttatgtttttttttcttattcaagaaaaaagaccaaggaataacattctgtagttcctaaaaatactgacttttttcactactatacataaagggaaagttttattcttttatggaacacttcagctgtactcatgtattaaaataggaatgtgaatgctatatactctttttatatcaaaagtctcaagcacttatttttattctatgcattgtttgtcttttacataaataaaatgtttattagattgaataaagcaaaatactcaggtgagcaatcctgcctcctgttcccattcctagtagctaaatccatttgcctcatttggttattttgcaatttatgcagaaaacgtcaccaagtaaataatctccaactttttcatactgtctttctcaactgacagtctcacagtcctt

SEQ ID NO: 447386 - DNA, 364 bp, Homo sapiens
tccgctgcgctgggggctcggtctatgacgagcagcggggtctgccatgggtcgggggctgctcaggggcctgtggccgctgcacatcgtcctgtggacgcgtatcgccagcacgatcccaccgcacgttcagaagtcgggtgagtggtccccagcccgggctcggcggggcgccgggggtcttcctggggtccccgcctctccgctgcgcttgacagtcgggcccggcaacccggcccccgggcggaaacgaggaaagtttcccccgcgacactcacgcagcccgactcccgtagctgcagggattgtgagtttttcttgaaaaagagaaggaaagttcagttgcaaggggcgcggggcacgt

SEQ ID NO: 447387 - DNA, 457 bp, Homo sapiens
cagggagagaacatctattttaaaaaataaccatctatctgtacctttctgtgcatttctcattctttaaaacagcactttgattttttaaaaaaatcctctgcacgtgtcaggggccaccatcagctatattgtgaaaataaaaaggcagctggaattaaatgatgggcctcactgtctgtttttgctataggtgggaactgcaagatacatggctccagaagtcctagaatccaggatgaatttggagaatgttgagtccttcaagcagaccgatgtctactccatggctctggtgctctgggaaatgacatctcgctgtaatgcagtgggaggtaggtgtggaccagcatcattgtgtagtggtaaacttgtcttcaaaataagatcatgtgttgcttcgagcattattccaggggttacaaagcagttattagagctagttgagatctgatat

SEQ ID NO: 447388 - DNA, 5048 bp, Homo sapiens
acctaaagaaaaacattttacaacttgacagtgtatgcacatacatacatgcatatagacacaactgaagcacaaatttaatgaagtagaatttaccgttactattttatttgggaaagaaatgtgctcgcgactcaatagattggagtattcactcctggatctcaacttgcaatttgaaaacgcatctctaaagcacctaggagcaatctgaagaaagctgaggggaggcggcagatgttctgatctactagggaaaacgtggacgttttctgttgttactttgtgaactgtgtgcacttagtcattcttgagtaaatacttggagcgaggaactcctgagtggtgtgggagggcggtgaggggcagctgaaagtcggccaaagctctcggaggggctggtctaggaaacatgattggcagctacgagagagctaggggctggacgtcgaggagagggagaaggctctcgggcggagagaggtcctgcccagctgttggcgaggagtttcctgtttcccccgcagcgctgagttgaagttgagtgagtcactcgcgcgcacggagcgacgacacccccgcgcgtgcacccgctcgggacaggagccggactcctgtgcagcttccctcggccgccgggggcctccccgcgcctcgccggcctccaggccccctcctggctggcgagcgggcgccacatctggcccgcacatctgcgctgccggcccggcgcggggtccggagagggcgcggcgcggaggcgcagccaggggtccgggaaggcgccgtccgctgcgctgggggctcggtctatgacgagcagcggggtctgccatgggtcgggggctgctcaggggcctgtggccgctgcacatcgtcctgtggacgcgtatcgccagcacgatcccaccgcacgttcagaagtcggttaataacgacatgatagtcactgacaacaacggtgcagtcaagtttccacaactgtgtaaattttgtgatgtgagattttccacctgtgacaaccagaaatcctgcatgagcaactgcagcatcacctccatctgtgagaagccacaggaagtctgtgtggctgtatggagaaagaatgacgagaacataacactagagacagtttgccatgaccccaagctcccctaccatgactttattctggaagatgctgcttctccaaagtgcattatgaaggaaaaaaaaaagcctggtgagactttcttcatgtgttcctgtagctctgatgagtgcaatgacaacatcatcttctcagaagaatataacaccagcaatcctgacttgttgctagtcatatttcaagtgacaggcatcagcctcctgccaccactgggagttgccatatctgtcatcatcatcttctactgctaccgcgttaaccggcagcagaagctgagttcaacctgggaaaccggcaagacgcggaagctcatggagttcagcgagcactgtgccatcatcctggaagatgaccgctctgacatcagctccacgtgtgccaacaacatcaaccacaacacagagctgctgcccattgagctggacaccctggtggggaaaggtcgctttgctgaggtctataaggccaagctgaagcagaacacttcagagcagtttgagacagtggcagtcaagatctttccctatgaggagtatgcctcttggaagacagagaaggacatcttctcagacatcaatctgaagcatgagaacatactccagttcctgacggctgaggagcggaagacggagttggggaaacaatactggctgatcaccgccttccacgccaagggcaacctacaggagtacctgacgcggcatgtcatcagctgggaggacctgcgcaagctgggcagctccctcgcccgggggattgctcacctccacagtgatcacactccatgtgggaggcccaagatgcccatcgtgcacagggacctcaagagctccaatatcctcgtgaagaacgacctaacctgctgcctgtgtgactttgggctttccctgcgtctggaccctactctgtctgtggatgacctggctaacagtgggcaggtgggaactgcaagatacatggctccagaagtcctagaatccaggatgaatttggagaatgttgagtccttcaagcagaccgatgtctactccatggctctggtgctctgggaaatgacatctcgctgtaatgcagtgggagaagtaaaagattatgagcctccatttggttccaaggtgcgggagcacccctgtgtcgaaagcatgaaggacaacgtgttgagagatcgagggcgaccagaaattcccagcttctggctcaaccaccagggcatccagatggtgtgtgagacgttgactgagtgctgggaccacgacccagaggcccgtctcacagcccagtgtgtggcagaacgcttcagtgagctggagcatctggacaggctctcggggaggagctgctcggaggagaagattcctgaagacggctccctaaacactaccaaatagctcttctggggcaggctgggccatgtccaaagaggctgcccctctcaccaaagaacagaggcagcaggaagctgcccctgaactgatgcttcctggaaaaccaagggggtcactcccctccctgtaagctgtggggataagcagaaacaacagcagcagggagtgggtgacatagagcattctatgcctttgacattgtcataggataagctgtgttagcacttcctcaggaaatgagattgatttttacaatagccaataacatttgcactttattaatgcctgtatataaatatgaatagctatgttttatatatatatatatatatctatatatgtctatagctctatatatatagccataccttgaaaagagacaaggaaaaacatcaaatattcccaggaaattggttttattggagaactccagaaccaagcagagaaggaagggacccatgacagcattagcatttgacaatcacacatgcagtggttctctgactgtaaaacagtgaactttgcatgaggaaagaggctccatgtctcacagccagctatgaccacattgcacttgcttttgcaaaataatcattccctgcctagcacttctcttctggccatggaactaagtacagtggcactgtttgaggaccagtgttcccggggttcctgtgtgcccttatttctcctggacttttcatttaagctccaagccccaaatctggggggctagtttagaaactctccctcaacctagtttagaaactctaccccatctttaataccttgaatgttttgaaccccactttttaccttcatgggttgcagaaaaatcagaacagatgtccccatccatgcgattgccccaccatctactaatgaaaaattgttctttttttcatctttcccctgcacttatgttactattctctgctcccagccttcatccttttctaaaaaggagcaaattctcactctaggctttatcgtgtttactttttcattacacttgacttgattttctagttttctatacaaacaccaatgggttccatctttctgggctcctgattgctcaagcacagtttggcctgatgaagaggatttcaactacacaatactatcattgtcaggactatgacctcaggcactctaaacatatgttttgtttggtcagcacagcgtttcaaaaagtgaagccactttataaatatttggagattttgcaggaaaatctggatccccaggtaaggatagcagatggttttcagttatctccagtccacgttcacaaaatgtgaaggtgtggagacacttacaaagctgcctcacttctcactgtaaacattagctctttccactgcctacctggaccccagtctaggaattaaatctgcacctaaccaaggtcccttgtaagaaatgtccattcaagcagtcattctctgggtatataatatgattttgactaccttatctggtgttaagatttgaagttggccttttattggactaaaggggaactcctttaagggtctcagttagcccaagtttcttttgcttatatgttaatagttttaccctctgcattggagagaggagtgctttactccaagaagctttcctcatggttaccgttctctccatcatgccagccttctcaacctttgcagaaattactagagaggatttgaatgtgggacacaaaggtcccatttgcagttagaaaatttgtgtccacaaggacaagaacaaagtatgagctttaaaactccataggaaacttgttaatcaacaaagaagtgttaatgctgcaagtaatctcttttttaaaactttttgaagctacttattttcagccaaataggaatattagagagggactggtagtgagaatatcagctctgtttggatggtggaaggtctcattttattgagatttttaagatacatgcaaaggtttggaaatagaacctctaggcaccctcctcagtgtgggtgggctgagagttaaagacagtgtggctgcagtagcatagaggcgcctagaaattccacttgcaccgtagggcatgctgataccatcccaatagctgttgcccattgacctctagtggtgagtttctagaatactggtccattcatgagatattcaagattcaagagtattctcacttctgggttatcagcataaactggaatgtagtgtcagaggatactgtggcttgttttgtttatgtttttttttcttattcaagaaaaaagaccaaggaataacattctgtagttcctaaaaatactgacttttttcactactatacataaagggaaagttttattcttttatggaacacttcagctgtactcatgtattaaaataggaatgtgaatgctatatactctttttatatcaaaagtctcaagcacttatttttattctatgcattgtttgtcttttacataaataaaatgtttattagattgaataaagcaaaatactcaggtgagca

SEQ ID NO: 447389 - DNA, 5123 bp, Homo sapiens
acctaaagaaaaacattttacaacttgacagtgtatgcacatacatacatgcatatagacacaactgaagcacaaatttaatgaagtagaatttaccgttactattttatttgggaaagaaatgtgctcgcgactcaatagattggagtattcactcctggatctcaacttgcaatttgaaaacgcatctctaaagcacctaggagcaatctgaagaaagctgaggggaggcggcagatgttctgatctactagggaaaacgtggacgttttctgttgttactttgtgaactgtgtgcacttagtcattcttgagtaaatacttggagcgaggaactcctgagtggtgtgggagggcggtgaggggcagctgaaagtcggccaaagctctcggaggggctggtctaggaaacatgattggcagctacgagagagctaggggctggacgtcgaggagagggagaaggctctcgggcggagagaggtcctgcccagctgttggcgaggagtttcctgtttcccccgcagcgctgagttgaagttgagtgagtcactcgcgcgcacggagcgacgacacccccgcgcgtgcacccgctcgggacaggagccggactcctgtgcagcttccctcggccgccgggggcctccccgcgcctcgccggcctccaggccccctcctggctggcgagcgggcgccacatctggcccgcacatctgcgctgccggcccggcgcggggtccggagagggcgcggcgcggaggcgcagccaggggtccgggaaggcgccgtccgctgcgctgggggctcggtctatgacgagcagcggggtctgccatgggtcgggggctgctcaggggcctgtggccgctgcacatcgtcctgtggacgcgtatcgccagcacgatcccaccgcacgttcagaagtcggatgtggaaatggaggcccagaaagatgaaatcatctgccccagctgtaataggactgcccatccactgagacatattaataacgacatgatagtcactgacaacaacggtgcagtcaagtttccacaactgtgtaaattttgtgatgtgagattttccacctgtgacaaccagaaatcctgcatgagcaactgcagcatcacctccatctgtgagaagccacaggaagtctgtgtggctgtatggagaaagaatgacgagaacataacactagagacagtttgccatgaccccaagctcccctaccatgactttattctggaagatgctgcttctccaaagtgcattatgaaggaaaaaaaaaagcctggtgagactttcttcatgtgttcctgtagctctgatgagtgcaatgacaacatcatcttctcagaagaatataacaccagcaatcctgacttgttgctagtcatatttcaagtgacaggcatcagcctcctgccaccactgggagttgccatatctgtcatcatcatcttctactgctaccgcgttaaccggcagcagaagctgagttcaacctgggaaaccggcaagacgcggaagctcatggagttcagcgagcactgtgccatcatcctggaagatgaccgctctgacatcagctccacgtgtgccaacaacatcaaccacaacacagagctgctgcccattgagctggacaccctggtggggaaaggtcgctttgctgaggtctataaggccaagctgaagcagaacacttcagagcagtttgagacagtggcagtcaagatctttccctatgaggagtatgcctcttggaagacagagaaggacatcttctcagacatcaatctgaagcatgagaacatactccagttcctgacggctgaggagcggaagacggagttggggaaacaatactggctgatcaccgccttccacgccaagggcaacctacaggagtacctgacgcggcatgtcatcagctgggaggacctgcgcaagctgggcagctccctcgcccgggggattgctcacctccacagtgatcacactccatgtgggaggcccaagatgcccatcgtgcacagggacctcaagagctccaatatcctcgtgaagaacgacctaacctgctgcctgtgtgactttgggctttccctgcgtctggaccctactctgtctgtggatgacctggctaacagtgggcaggtgggaactgcaagatacatggctccagaagtcctagaatccaggatgaatttggagaatgttgagtccttcaagcagaccgatgtctactccatggctctggtgctctgggaaatgacatctcgctgtaatgcagtgggagaagtaaaagattatgagcctccatttggttccaaggtgcgggagcacccctgtgtcgaaagcatgaaggacaacgtgttgagagatcgagggcgaccagaaattcccagcttctggctcaaccaccagggcatccagatggtgtgtgagacgttgactgagtgctgggaccacgacccagaggcccgtctcacagcccagtgtgtggcagaacgcttcagtgagctggagcatctggacaggctctcggggaggagctgctcggaggagaagattcctgaagacggctccctaaacactaccaaatagctcttctggggcaggctgggccatgtccaaagaggctgcccctctcaccaaagaacagaggcagcaggaagctgcccctgaactgatgcttcctggaaaaccaagggggtcactcccctccctgtaagctgtggggataagcagaaacaacagcagcagggagtgggtgacatagagcattctatgcctttgacattgtcataggataagctgtgttagcacttcctcaggaaatgagattgatttttacaatagccaataacatttgcactttattaatgcctgtatataaatatgaatagctatgttttatatatatatatatatatctatatatgtctatagctctatatatatagccataccttgaaaagagacaaggaaaaacatcaaatattcccaggaaattggttttattggagaactccagaaccaagcagagaaggaagggacccatgacagcattagcatttgacaatcacacatgcagtggttctctgactgtaaaacagtgaactttgcatgaggaaagaggctccatgtctcacagccagctatgaccacattgcacttgcttttgcaaaataatcattccctgcctagcacttctcttctggccatggaactaagtacagtggcactgtttgaggaccagtgttcccggggttcctgtgtgcccttatttctcctggacttttcatttaagctccaagccccaaatctggggggctagtttagaaactctccctcaacctagtttagaaactctaccccatctttaataccttgaatgttttgaaccccactttttaccttcatgggttgcagaaaaatcagaacagatgtccccatccatgcgattgccccaccatctactaatgaaaaattgttctttttttcatctttcccctgcacttatgttactattctctgctcccagccttcatccttttctaaaaaggagcaaattctcactctaggctttatcgtgtttactttttcattacacttgacttgattttctagttttctatacaaacaccaatgggttccatctttctgggctcctgattgctcaagcacagtttggcctgatgaagaggatttcaactacacaatactatcattgtcaggactatgacctcaggcactctaaacatatgttttgtttggtcagcacagcgtttcaaaaagtgaagccactttataaatatttggagattttgcaggaaaatctggatccccaggtaaggatagcagatggttttcagttatctccagtccacgttcacaaaatgtgaaggtgtggagacacttacaaagctgcctcacttctcactgtaaacattagctctttccactgcctacctggaccccagtctaggaattaaatctgcacctaaccaaggtcccttgtaagaaatgtccattcaagcagtcattctctgggtatataatatgattttgactaccttatctggtgttaagatttgaagttggccttttattggactaaaggggaactcctttaagggtctcagttagcccaagtttcttttgcttatatgttaatagttttaccctctgcattggagagaggagtgctttactccaagaagctttcctcatggttaccgttctctccatcatgccagccttctcaacctttgcagaaattactagagaggatttgaatgtgggacacaaaggtcccatttgcagttagaaaatttgtgtccacaaggacaagaacaaagtatgagctttaaaactccataggaaacttgttaatcaacaaagaagtgttaatgctgcaagtaatctcttttttaaaactttttgaagctacttattttcagccaaataggaatattagagagggactggtagtgagaatatcagctctgtttggatggtggaaggtctcattttattgagatttttaagatacatgcaaaggtttggaaatagaacctctaggcaccctcctcagtgtgggtgggctgagagttaaagacagtgtggctgcagtagcatagaggcgcctagaaattccacttgcaccgtagggcatgctgataccatcccaatagctgttgcccattgacctctagtggtgagtttctagaatactggtccattcatgagatattcaagattcaagagtattctcacttctgggttatcagcataaactggaatgtagtgtcagaggatactgtggcttgttttgtttatgtttttttttcttattcaagaaaaaagaccaaggaataacattctgtagttcctaaaaatactgacttttttcactactatacataaagggaaagttttattcttttatggaacacttcagctgtactcatgtattaaaataggaatgtgaatgctatatactctttttatatcaaaagtctcaagcacttatttttattctatgcattgtttgtcttttacataaataaaatgtttattagattgaataaagcaaaatactcaggtgagca

SEQ ID NO: 447390 - DNA, 3868 bp, Homo sapiens
gtagatgtaaaatcagacatataggttcaaacaatcgattgcaaaggagcacttgtcaaaacactggctgggaatctgctcatgtgatgaagaccccagggtttagagaatataacaccagcaatcctgacttgttgctagtcatatttcaagtgacaggcatcagcctcctgccaccactgggagttgccatatctgtcatcatcatcttctactgctaccgcgttaaccggcagcagaagctgagttcaacctgggaaaccggcaagacgcggaagctcatggagttcagcgagcactgtgccatcatcctggaagatgaccgctctgacatcagctccacgtgtgccaacaacatcaaccacaacacagagctgctgcccattgagctggacaccctggtggggaaaggtcgctttgctgaggtctataaggccaagctgaagcagaacacttcagagcagtttgagacagtggcagtcaagatctttccctatgaggagtatgcctcttggaagacagagaaggacatcttctcagacatcaatctgaagcatgagaacatactccagttcctgacggctgaggagcggaagacggagttggggaaacaatactggctgatcaccgccttccacgccaagggcaacctacaggagtacctgacgcggcatgtcatcagctgggaggacctgcgcaagctgggcagctccctcgcccgggggattgctcacctccacagtgatcacactccatgtgggaggcccaagatgcccatcgtgcacagggacctcaagagctccaatatcctcgtgaagaacgacctaacctgctgcctgtgtgactttgggctttccctgcgtctggaccctactctgtctgtggatgacctggctaacagtgggcaggtgggaactgcaagatacatggctccagaagtcctagaatccaggatgaatttggagaatgttgagtccttcaagcagaccgatgtctactccatggctctggtgctctgggaaatgacatctcgctgtaatgcagtgggagaagtaaaagattatgagcctccatttggttccaaggtgcgggagcacccctgtgtcgaaagcatgaaggacaacgtgttgagagatcgagggcgaccagaaattcccagcttctggctcaaccaccagggcatccagatggtgtgtgagacgttgactgagtgctgggaccacgacccagaggcccgtctcacagcccagtgtgtggcagaacgcttcagtgagctggagcatctggacaggctctcggggaggagctgctcggaggagaagattcctgaagacggctccctaaacactaccaaatagctcttctggggcaggctgggccatgtccaaagaggctgcccctctcaccaaagaacagaggcagcaggaagctgcccctgaactgatgcttcctggaaaaccaagggggtcactcccctccctgtaagctgtggggataagcagaaacaacagcagcagggagtgggtgacatagagcattctatgcctttgacattgtcataggataagctgtgttagcacttcctcaggaaatgagattgatttttacaatagccaataacatttgcactttattaatgcctgtatataaatatgaatagctatgttttatatatatatatatatatctatatatgtctatagctctatatatatagccataccttgaaaagagacaaggaaaaacatcaaatattcccaggaaattggttttattggagaactccagaaccaagcagagaaggaagggacccatgacagcattagcatttgacaatcacacatgcagtggttctctgactgtaaaacagtgaactttgcatgaggaaagaggctccatgtctcacagccagctatgaccacattgcacttgcttttgcaaaataatcattccctgcctagcacttctcttctggccatggaactaagtacagtggcactgtttgaggaccagtgttcccggggttcctgtgtgcccttatttctcctggacttttcatttaagctccaagccccaaatctggggggctagtttagaaactctccctcaacctagtttagaaactctaccccatctttaataccttgaatgttttgaaccccactttttaccttcatgggttgcagaaaaatcagaacagatgtccccatccatgcgattgccccaccatctactaatgaaaaattgttctttttttcatctttcccctgcacttatgttactattctctgctcccagccttcatccttttctaaaaaggagcaaattctcactctaggctttatcgtgtttactttttcattacacttgacttgattttctagttttctatacaaacaccaatgggttccatctttctgggctcctgattgctcaagcacagtttggcctgatgaagaggatttcaactacacaatactatcattgtcaggactatgacctcaggcactctaaacatatgttttgtttggtcagcacagcgtttcaaaaagtgaagccactttataaatatttggagattttgcaggaaaatctggatccccaggtaaggatagcagatggttttcagttatctccagtccacgttcacaaaatgtgaaggtgtggagacacttacaaagctgcctcacttctcactgtaaacattagctctttccactgcctacctggaccccagtctaggaattaaatctgcacctaaccaaggtcccttgtaagaaatgtccattcaagcagtcattctctgggtatataatatgattttgactaccttatctggtgttaagatttgaagttggccttttattggactaaaggggaactcctttaagggtctcagttagcccaagtttcttttgcttatatgttaatagttttaccctctgcattggagagaggagtgctttactccaagaagctttcctcatggttaccgttctctccatcatgccagccttctcaacctttgcagaaattactagagaggatttgaatgtgggacacaaaggtcccatttgcagttagaaaatttgtgtccacaaggacaagaacaaagtatgagctttaaaactccataggaaacttgttaatcaacaaagaagtgttaatgctgcaagtaatctcttttttaaaactttttgaagctacttattttcagccaaataggaatattagagagggactggtagtgagaatatcagctctgtttggatggtggaaggtctcattttattgagatttttaagatacatgcaaaggtttggaaatagaacctctaggcaccctcctcagtgtgggtgggctgagagttaaagacagtgtggctgcagtagcatagaggcgcctagaaattccacttgcaccgtagggcatgctgataccatcccaatagctgttgcccattgacctctagtggtgagtttctagaatactggtccattcatgagatattcaagattcaagagtattctcacttctgggttatcagcataaactggaatgtagtgtcagaggatactgtggcttgttttgtttatgtttttttttcttattcaagaaaaaagaccaaggaataacattctgtagttcctaaaaatactgacttttttcactactatacataaagggaaagttttattcttttatggaacacttcagctgtactcatgtattaaaataggaatgtgaatgctatatactctttttatatcaaaagtctcaagcacttatttttattctatgcattgtttgtcttttacataaataaaatgtttattagattgaataaagcaaaatactcaggtgagca

SEQ ID NO: 447391 - DNA, 3359 bp, Homo sapiens
ctgtatcactttgaatcccttttctctctgtcttcacatttgataatttatgtgatgtatctttaaattcactgactcttccttcatgttctttctactcatgaaccattctaatgagttttctatttcaaatattgtattttcagttctaaaatttccatttggttcattttatagtttctatttctctgctgagagcttacatctttttgtgcatttctagtgggctttctttaccttgtagttctaacagctgttttaaagtctttaataattccataatctgggctttcttgggttttgcatctgttgattgtcttttaccttgagagtattggttacattttctgattctttgtatagcaaacaattttggatgacctggctaacagtgggcaggtgggaactgcaagatacatggctccagaagtcctagaatccaggatgaatttggagaatgttgagtccttcaagcagaccgatgtctactccatggctctggtgctctgggaaatgacatctcgctgtaatgcagtgggagaagtaaaagattatgagcctccatttggttccaaggtgcgggagcacccctgtgtcgaaagcatgaaggacaacgtgttgagagatcgagggcgaccagaaattcccagcttctggctcaaccaccagggcatccagatggtgtgtgagacgttgactgagtgctgggaccacgacccagaggcccgtctcacagcccagtgtgtggcagaacgcttcagtgagctggagcatctggacaggctctcggggaggagctgctcggaggagaagattcctgaagacggctccctaaacactaccaaatagctcttctggggcaggctgggccatgtccaaagaggctgcccctctcaccaaagaacagaggcagcaggaagctgcccctgaactgatgcttcctggaaaaccaagggggtcactcccctccctgtaagctgtggggataagcagaaacaacagcagcagggagtgggtgacatagagcattctatgcctttgacattgtcataggataagctgtgttagcacttcctcaggaaatgagattgatttttacaatagccaataacatttgcactttattaatgcctgtatataaatatgaatagctatgttttatatatatatatatatatctatatatgtctatagctctatatatatagccataccttgaaaagagacaaggaaaaacatcaaatattcccaggaaattggttttattggagaactccagaaccaagcagagaaggaagggacccatgacagcattagcatttgacaatcacacatgcagtggttctctgactgtaaaacagtgaactttgcatgaggaaagaggctccatgtctcacagccagctatgaccacattgcacttgcttttgcaaaataatcattccctgcctagcacttctcttctggccatggaactaagtacagtggcactgtttgaggaccagtgttcccggggttcctgtgtgcccttatttctcctggacttttcatttaagctccaagccccaaatctggggggctagtttagaaactctccctcaacctagtttagaaactctaccccatctttaataccttgaatgttttgaaccccactttttaccttcatgggttgcagaaaaatcagaacagatgtccccatccatgcgattgccccaccatctactaatgaaaaattgttctttttttcatctttcccctgcacttatgttactattctctgctcccagccttcatccttttctaaaaaggagcaaattctcactctaggctttatcgtgtttactttttcattacacttgacttgattttctagttttctatacaaacaccaatgggttccatctttctgggctcctgattgctcaagcacagtttggcctgatgaagaggatttcaactacacaatactatcattgtcaggactatgacctcaggcactctaaacatatgttttgtttggtcagcacagcgtttcaaaaagtgaagccactttataaatatttggagattttgcaggaaaatctggatccccaggtaaggatagcagatggttttcagttatctccagtccacgttcacaaaatgtgaaggtgtggagacacttacaaagctgcctcacttctcactgtaaacattagctctttccactgcctacctggaccccagtctaggaattaaatctgcacctaaccaaggtcccttgtaagaaatgtccattcaagcagtcattctctgggtatataatatgattttgactaccttatctggtgttaagatttgaagttggccttttattggactaaaggggaactcctttaagggtctcagttagcccaagtttcttttgcttatatgttaatagttttaccctctgcattggagagaggagtgctttactccaagaagctttcctcatggttaccgttctctccatcatgccagccttctcaacctttgcagaaattactagagaggatttgaatgtgggacacaaaggtcccatttgcagttagaaaatttgtgtccacaaggacaagaacaaagtatgagctttaaaactccataggaaacttgttaatcaacaaagaagtgttaatgctgcaagtaatctcttttttaaaactttttgaagctacttattttcagccaaataggaatattagagagggactggtagtgagaatatcagctctgtttggatggtggaaggtctcattttattgagatttttaagatacatgcaaaggtttggaaatagaacctctaggcaccctcctcagtgtgggtgggctgagagttaaagacagtgtggctgcagtagcatagaggcgcctagaaattccacttgcaccgtagggcatgctgataccatcccaatagctgttgcccattgacctctagtggtgagtttctagaatactggtccattcatgagatattcaagattcaagagtattctcacttctgggttatcagcataaactggaatgtagtgtcagaggatactgtggcttgttttgtttatgtttttttttcttattcaagaaaaaagaccaaggaataacattctgtagttcctaaaaatactgacttttttcactactatacataaagggaaagttttattcttttatggaacacttcagctgtactcatgtattaaaataggaatgtgaatgctatatactctttttatatcaaaagtctcaagcacttatttttattctatgcattgtttgtcttttacataaataaaatgtttattagattgaataaagcaaaatactcaggtgagca

SEQ ID NO: 447392 - DNA, 1850 bp, Homo sapiens
acctaaagaaaaacattttacaacttgacagtgtatgcacatacatacatgcatatagacacaactgaagcacaaatttaatgaagtagaatttaccgttactattttatttgggaaagaaatgtgctcgcgactcaatagattggagtattcactcctggatctcaacttgcaatttgaaaacgcatctctaaagcacctaggagcaatctgaagaaagctgaggggaggcggcagatgttctgatctactagggaaaacgtggacgttttctgttgttactttgtgaactgtgtgcacttagtcattcttgagtaaatacttggagcgaggaactcctgagtggtgtgggagggcggtgaggggcagctgaaagtcggccaaagctctcggaggggctggtctaggaaacatgattggcagctacgagagagctaggggctggacgtcgaggagagggagaaggctctcgggcggagagaggtcctgcccagctgttggcgaggagtttcctgtttcccccgcagcgctgagttgaagttgagtgagtcactcgcgcgcacggagcgacgacacccccgcgcgtgcacccgctcgggacaggagccggactcctgtgcagcttccctcggccgccgggggcctccccgcgcctcgccggcctccaggccccctcctggctggcgagcgggcgccacatctggcccgcacatctgcgctgccggcccggcgcggggtccggagagggcgcggcgcggaggcgcagccaggggtccgggaaggcgccgtccgctgcgctgggggctcggtctatgacgagcagcggggtctgccatgggtcgggggctgctcaggggcctgtggccgctgcacatcgtcctgtggacgcgtatcgccagcacgatcccaccgcacgttcagaagtcggttaataacgacatgatagtcactgacaacaacggtgcagtcaagtttccacaactgtgtaaattttgtgatgtgagattttccacctgtgacaaccagaaatcctgcatgagcaactgcagcatcacctccatctgtgagaagccacaggaagtctgtgtggctgtatggagaaagaatgacgagaacataacactagagacagtttgccatgaccccaagctcccctaccatgactttattctggaagatgctgcttctccaaagtgcattatgaaggaaaaaaaaaagcctggtgagactttcttcatgtgttcctgtagctctgatgagtgcaatgacaacatcatcttctcagaaggtgagttttcttctcttaagggtgtgggacctgagatctgtgccaattttttgtatccttggtctgcagtgtcatagagcacattcctcctgtggtggattgcatacagtggattaggagctcattcagctggtggaaagaggggcttggggagtagcagggtttgttctggttctcatcaaatatggttgactggggcaaacattattatttgtctttgacaaatagtttctttcacctagagcagtgtttctcaaagtgcggccccttgagcagccagcatcagtatcacctgggaacctgttataaatgcagattctcaggccccactaaatgagaaacatagagggtgaaccccagctatctgtattttaacaagccctcccagtaattctgtgcagctaaaatttggtaactattgttctaaagatttggatggggttgtttaatcttggaggaggactttctttataactgatgttgtttcttgtacatagtcccaggatttgtctttagggtacttgtcatcgatcccatttgagagacactttgcaatacagag

SEQ ID NO: 447393 - DNA, 417 bp, Homo sapiens
aattcgcggccgcgtcgacacgacagaagggaggggtagcagaaacctgcaccaaggattgtccctatgtcttggcccctcctagagcgtgtgcagactgatgattttatatgtaaatcaagactcacatccctttcctagtcccccacatccaaagcccctcagcctgccttgcagaccaatgggctccatgttctgtagccccctcccctacgcctcacccctcctccctctcacaggttctgggcggccagtgagagaaacgcagtgggggaggcagggagtctggtgcctgcagagattctctgcttctttcctggggggaggtggggaggtcttagcaggagcgggccctgtacccacctgctgacctgctgtttggtagagaaataaaggttgtgtgactgggggaacgga

SEQ ID NO: 447394 - DNA, 405 bp, Homo sapiens
cgtcgggtaaggtcccagcacggacatggcctcgcgcggcgcccgcccgggcccgagtcccccgcgccccgctttgtagccccccggcggagaggcggcctcgacggtgcggacggcgcagacggccgggcgggcggcatggaggcggcgcatctgctcccggccgccgacgtgctgcgccacttctcggtgacagccgagggcggcctgagcccggcgcaggtgaccggcgcgcgggagcgctacggccccaacgggaagtccctgtgggagctggtgctggaacagtttgaggacctcctggtgcgcatcctgctgctggctgcccttgtctcctttgtaagtagggccctgccagccatcctgtggtagtcggtagccctggagggagagccaggctgggca

SEQ ID NO: 447395 - DNA, 4606 bp, Homo sapiens
  misc_feature (1440)..(1440): n is a, c, g, or t
cgtcgggtaaggtcccagcacggacatggcctcgcgcggcgcccgcccgggcccgagtcccccgcgccccgctttgtagccccccggcggagaggcggcctcgacggtgcggacggcgcagacggccgggcgggcggcatggaggcggcgcatctgctcccggccgccgacgtgctgcgccacttctcggtgacagccgagggcggcctgagcccggcgcaggtgaccggcgcgcgggagcgctacggccccaacgagctcccgagtgaggaagggaagtccctgtgggagctggtgctggaacagtttgaggacctcctggtgcgcatcctgctgctggctgcccttgtctcctttgtcctggcctggttcgaggagggcgaggagaccacgaccgccttcgtggagcccctggtcatcatgctgatcctcgtggccaacgccattgtgggcgtgtggcaggaacgcaacgccgagagtgccatcgaggccctgaaggagtatgagcctgagatgggcaaggtgatccgctcggaccgcaagggcgtgcagaggatccgtgcccgggacatcgtcccaggggacattgtagaagtggcagtgggggacaaagtgcctgctgacctccgcctcatcgagatcaagtccaccacgctgcgagtggaccagtccatcctgacgggtgaatctgtgtccgtgaccaagcacacagaggccatcccagaccccagagctgtgaaccaggacaagaagaacatgctgttttctggcaccaatatcacatcgggcaaagcggtgggtgtggccgtggccaccggcctgcacacggagctgggcaagatccggagccagatggcggcagtcgagcccgagcggacgccgctgcagcgcaagctggacgagtttggacggcagctgtcccacgccatctctgtgatctgcgtggccgtgtgggtcatcaacatcggccacttcgccgacccggcccacggtggctcctggctgcgtggcgctgtctactacttcaagatcgccgtggccctggcggtggcggccatccccgagggcctcccggctgtcatcactacatgcctggcactgggcacgcggcgcatggcacgcaagaacgccatcgtgcgaagcctgccgtccgtggagaccctgggctgcacctcagtcatctgctccgacaagacgggcacgctcaccaccaatcagatgtctgtctgccggatgttcgtggtagccgaggccgatgcgggctcctgccttttgcacgagttcaccatctcgggtaccacgtatacccccgagggcgaagtgcggcagggggatcagcctgtgcgctgcggccagttcgacgggctggtggagctggcgaccatctgcgccctgtgcaacgactcggcgctggactacaacgaggccaagggtgtgtangagaaggtgggagaggccacggagacagctctgacttgcctggtggagaagatgaacgtgttcgacaccgacctgcaggctctgtcccgggtggagcgagctggcgcctgtaacacggtcatcaagcagctgatgcggaaggagttcaccctggagttctcccgagaccggaaatccatgtccgtgtactgcacgcccacccgccctcaccctactggccagggcagcaagatgtttgtgaagggggctcctgagagtgtgatcgagcgctgtagctcagtccgcgtggggagccgcacagcacccctgacccccacctccagggagcagatcctggcaaagatccgggattggggctcaggctcagacacgctgcgctgcctggcactggccacccgggacgcgcccccaaggaaggaggacatggagctggacgactgcagcaagtttgtgcagtacgagacggacctgaccttcgtgggctgcgtaggcatgctggacccgccgcgacctgaggtggctgcctgcatcacacgctgctaccaggcgggcatccgcgtggtcatgatcacgggggataacaaaggcactgccgtggccatctgccgcaggcttggcatctttggggacacggaagacgtggcgggcaaggcctacacgggccgcgagtttgatgacctcagccccgagcagcagcgccaggcctgccgcaccgcccgctgcttcgcccgcgtggagcccgcacacaagtcccgcatcgtggagaacctgcagtcctttaacgagatcactgctatgactggcgatggagtgaacgacgcaccagccctgaagaaagcagagatcggcatcgccatgggctcaggcacggccgtggccaagtcggcggcagagatggtgctgtcagatgacaactttgcctccatcgtggctgcggtggaggagggccgggccatctacagcaacatgaagcaattcatccgctacctcatctcctccaatgttggcgaggtcgtctgcatcttcctcacggcaattctgggcctgcccgaagccctgatccctgtgcagctgctctgggtgaacctggtgacagacggcctacctgccacggctctgggcttcaacccgccagacctggacatcatggagaagctgccccggagcccccgagaagccctcatcagtggctggctcttcttccgatacctggctatcggagtgtacgtaggcctggccacagtggctgccgccacctggtggtttgtgtatgacgccgagggacctcacatcaacttctaccagctgaggaacttcctgaagtgctccgaagacaacccgctctttgccggcatcgactgtgaggtgttcgagtcacgcttccccaccaccatggccttgtccgtgctcgtgaccattgaaatgtgcaatgccctcaacagcgtctcggagaaccagtcgctgctgcggatgccgccctggatgaacccctggctgctggtggctgtggccatgtccatggccctgcacttcctcatcctgctcgtgccgcccctgcctctcattttccaggtgaccccactgagcgggcgccagtgggtggtggtgctccagatatctctgcctgtcatcctgctggatgaggccctcaagtacctgtcccggaaccacatgcacgaagaaatgagccagaagtgagcgctgggaacagagtggagtctccggtgtgtacctcagactgatggtgcccatgtgttcgcctccgccccccacccttgccaccacactcgcccacttgcccaccgggtcccgccggataaatgacaggcccgaggtcagaatggccatccccgggccccgtcctggggtctctgtccccacttccttctggcctgggaggtctgtaattcctgtctcctggactctcctgggaagttccctgctctgcagctctggcccaggagctgcaggctgggagggggcagccaagaagccggagctggcagcatacccagagatccggggcccccccacccccaaatcacgagtgcagctggagcttgctcccccttgttcggaagctggacgttcacttggtgactggtgcctctgcactgacggaggactctgggggtccttcttaccggctctgacctctctcttcgtgcctggtctgggactgggtcagccctgggggatcagaaggggccatctgggcccagctgtgtacagcgagggtgggcagccccctccactccactctgcttccacaaagtcggctcccgagagctcgaggctgcttctgtttatatgtgcagggcccgggcgggtgaagggtcagagagacggacacaaggagccggcaggagggcggagcgaggatgtcctttcccgggagacaagtcgggaaagcctggctggactgcctcagccccgcgcgcctcctggactcagggttccccgtcctgagctcgggagatgttcagagtcacactgccgcccggtctgccacgcagaggtccaacttgccacccgcgtccctggtacctgagaccaccgacatcctcaggttcctgaccgtggcgcccttctacccagcccagtgtgcggccgccgcgctgtctgcacagctgggggcctctgagcctggtgggcttcctggactcttggcctcactccttgccccctccccacgacacccatgagccgaaaggatgtcactaaggatggacagaatttttctcttaactcagcttttgctactttggcaaaaactagcgaggggtagcagaaacctgcaccaaggattgtccctatgtcttggcccctcctagagcgtgtgcagactgatgattttatatgtaaatcaagactcacatccctttcctagtcccccacatccaaagcccctcagcctgccttgcagaccaatgggctccatgttctgtagccccctcccctacgcctcacccctcctccctctcacaggttctgggcggccagtgagagaaacgcagtgggggaggcagggagtctggtgcctgcagagattctctgcttctttcctggggggaggtggggaggtcttagcaggagcgggccctgtacccacctgctgacctgctgtttggtagagaaataaaggttgtgtgactgggggaacgga

SEQ ID NO: 447396 - DNA, 4803 bp, Homo sapiens
  misc_feature (1440)..(1440): n is a, c, g, or t
cgtcgggtaaggtcccagcacggacatggcctcgcgcggcgcccgcccgggcccgagtcccccgcgccccgctttgtagccccccggcggagaggcggcctcgacggtgcggacggcgcagacggccgggcgggcggcatggaggcggcgcatctgctcccggccgccgacgtgctgcgccacttctcggtgacagccgagggcggcctgagcccggcgcaggtgaccggcgcgcgggagcgctacggccccaacgagctcccgagtgaggaagggaagtccctgtgggagctggtgctggaacagtttgaggacctcctggtgcgcatcctgctgctggctgcccttgtctcctttgtcctggcctggttcgaggagggcgaggagaccacgaccgccttcgtggagcccctggtcatcatgctgatcctcgtggccaacgccattgtgggcgtgtggcaggaacgcaacgccgagagtgccatcgaggccctgaaggagtatgagcctgagatgggcaaggtgatccgctcggaccgcaagggcgtgcagaggatccgtgcccgggacatcgtcccaggggacattgtagaagtggcagtgggggacaaagtgcctgctgacctccgcctcatcgagatcaagtccaccacgctgcgagtggaccagtccatcctgacgggtgaatctgtgtccgtgaccaagcacacagaggccatcccagaccccagagctgtgaaccaggacaagaagaacatgctgttttctggcaccaatatcacatcgggcaaagcggtgggtgtggccgtggccaccggcctgcacacggagctgggcaagatccggagccagatggcggcagtcgagcccgagcggacgccgctgcagcgcaagctggacgagtttggacggcagctgtcccacgccatctctgtgatctgcgtggccgtgtgggtcatcaacatcggccacttcgccgacccggcccacggtggctcctggctgcgtggcgctgtctactacttcaagatcgccgtggccctggcggtggcggccatccccgagggcctcccggctgtcatcactacatgcctggcactgggcacgcggcgcatggcacgcaagaacgccatcgtgcgaagcctgccgtccgtggagaccctgggctgcacctcagtcatctgctccgacaagacgggcacgctcaccaccaatcagatgtctgtctgccggatgttcgtggtagccgaggccgatgcgggctcctgccttttgcacgagttcaccatctcgggtaccacgtatacccccgagggcgaagtgcggcagggggatcagcctgtgcgctgcggccagttcgacgggctggtggagctggcgaccatctgcgccctgtgcaacgactcggcgctggactacaacgaggccaagggtgtgtangagaaggtgggagaggccacggagacagctctgacttgcctggtggagaagatgaacgtgttcgacaccgacctgcaggctctgtcccgggtggagcgagctggcgcctgtaacacggtcatcaagcagctgatgcggaaggagttcaccctggagttctcccgagaccggaaatccatgtccgtgtactgcacgcccacccgccctcaccctactggccagggcagcaagatgtttgtgaagggggctcctgagagtgtgatcgagcgctgtagctcagtccgcgtggggagccgcacagcacccctgacccccacctccagggagcagatcctggcaaagatccgggattggggctcaggctcagacacgctgcgctgcctggcactggccacccgggacgcgcccccaaggaaggaggacatggagctggacgactgcagcaagtttgtgcagtacgagacggacctgaccttcgtgggctgcgtaggcatgctggacccgccgcgacctgaggtggctgcctgcatcacacgctgctaccaggcgggcatccgcgtggtcatgatcacgggggataacaaaggcactgccgtggccatctgccgcaggcttggcatctttggggacacggaagacgtggcgggcaaggcctacacgggccgcgagtttgatgacctcagccccgagcagcagcgccaggcctgccgcaccgcccgctgcttcgcccgcgtggagcccgcacacaagtcccgcatcgtggagaacctgcagtcctttaacgagatcactgctatgactggcgatggagtgaacgacgcaccagccctgaagaaagcagagatcggcatcgccatgggctcaggcacggccgtggccaagtcggcggcagagatggtgctgtcagatgacaactttgcctccatcgtggctgcggtggaggagggccgggccatctacagcaacatgaagcaattcatccgctacctcatctcctccaatgttggcgaggtcgtctgcatcttcctcacggcaattctgggcctgcccgaagccctgatccctgtgcagctgctctgggtgaacctggtgacagacggcctacctgccacggctctgggcttcaacccgccagacctggacatcatggagaagctgccccggagcccccgagaagccctcatcagtggctggctcttcttccgatacctggctatcggagtgtacgtaggcctggccacagtggctgccgccacctggtggtttgtgtatgacgccgagggacctcacatcaacttctaccagctgaggaacttcctgaagtgctccgaagacaacccgctctttgccggcatcgactgtgaggtgttcgagtcacgcttccccaccaccatggccttgtccgtgctcgtgaccattgaaatgtgcaatgccctcaacagcgtctcggagaaccagtcgctgctgcggatgccgccctggatgaacccctggctgctggtggctgtggccatgtccatggccctgcacttcctcatcctgctcgtgccgcccctgcctgtgagtcaccccgcctgccccactgccctggtccctggacatcacaggccctgggctggtcactggacctctctggcccccctgcaatggaaactacctggaggagagggagctcattttccaggtgaccccactgagcgggcgccagtgggtggtggtgctccagatatctctgcctgtcatcctgctggatgaggccctcaagtacctgtcccggaaccacatgcacgaagaaatgagccagaagtgagcgctgggaacagagtggagtctccggtgtgtacctcagactgatggtgcccatgtgttcgcctccgccccccacccttgccaccacactcgcccacttgcccaccgggtcccgccggataaatgacaggcccgaggtcagaatggccatccccgggccccgtcctggggtctctgtccccacttccttctggcctgggaggtctgtaattcctgtctcctggactctcctgggaagttccctgctctgcagctctggcccaggagctgcaggctgggagggggcagccaagaagccggagctggcagcatacccagagatccggggcccccccacccccaaatcacgagtgcagctggagcttgctcccccttgttcggaagctggacgttcacttggtgactggtgcctctgcactgacggaggactctgggggtccttcttaccggctctgacctctctcttcgtgcctggtctgggactgggtcagccctgggggatcagaaggggccatctgggcccagctgtgtacagcgagggtgggcagccccctccactccactctgcttccacaaagtcggctcccgagagctcgaggctgcttctgtttatatgtgcagggcccgggcgggtgaagggtcagagagacggacacaaggagccggcaggagggcggagcgaggatgtcctttcccgggagacaagtcgggaaagcctggctggactgcctcagccccgcgcgcctcctggactcagggttccccgtcctgagctcgggagatgttcagagtcacactgccgcccggtctgccacgcagaggtccaacttgccacccgcgtccctggtacctgagaccaccgacatcctcaggttcctgaccgtggcgcccttctacccagcccagtgtgcggccgccgcgctgtctgcacagctgggggcctctgagcctggtgggcttcctggactcttggcctcactccttgccccctccccacgacacccatgagccgaaaggatgtcactaaggatggctgattccccaagggcacccgctctccctccctccctgctggaggaacacgtcatatcagatgagaggaagatggcctctgatggacagaatttttctcttaactcagcttttgctactttggcaaaaactagcgaggggtagcagaaacctgcaccaaggattgtccctatgtcttggcccctcctagagcgtgtgcagactgatgattttatatgtaaatcaagactcacatccctttcctagtcccccacatccaaagcccctcagcctgccttgcagaccaatgggctccatgttctgtagccccctcccctacgcctcacccctcctccctctcacaggttctgggcggccagtgagagaaacgcagtgggggaggcagggagtctggtgcctgcagagattctctgcttctttcctggggggaggtggggaggtcttagcaggagcgggccctgtacccacctgctgacctgctgtttggtagagaaataaaggttgtgtgactgggggaacgga

SEQ ID NO: 447397 - DNA, 3454 bp, Homo sapiens
cgtcgggtaaggtcccagcacggacatggcctcgcgcggcgcccgcccgggcccgagtcccccgcgccccgctttgtagccccccggcggagaggcggcctcgacggtgcggacggcgcagacggccgggcgggcggcatggaggcggcgcatctgctcccggccgccgacgtgctgcgccacttctcggtgacagccgagggcggcctgagcccggcgcaggtgaccggcgcgcgggagcgctacggccccaacgagctcccgagtgaggaagggaagtccctgtgggagctggtgctggaacagtttgaggacctcctggtgcgcatcctgctgctggctgcccttgtctcctttgtcctggcctggttcgaggagggcgaggagaccacgaccgccttcgtggagcccctggtcatcatgctgatcctcgtggccaacgccattgtgggcgtgtggcaggaacgcaacgccgagagtgccatcgaggccctgaaggagtatgagcctgagatgggcaaggtgatccgctcggaccgcaagggcgtgcagaggatccgtgcccgggacatcgtcccaggggacattgtagaagtggcagtgggggacaaagtgcctgctgacctccgcctcatcgagatcaagtccaccacgctgcgagtggaccagtccatcctgacgggtgaatctgtgtccgtgaccaagcacacagaggccatcccagaccccagagctgtgaaccaggacaagaagaacatgctgttttctggcaccaatatcacatcgggcaaagcggtgggtgtggccgtggccaccggcctgcacacggagctgggcaagatccggagccagatggcggcagtcgagcccgagcggacgccgctgcagcgcaagctggacgagtttggacggcagctgtcccacgccatctctgtgatctgcgtggccgtgtgggtcatcaacatcggccacttcgccgacccggcccacggtggctcctggctgcgtggcgctgtctactacttcaagatcgccgtggccctggcggtggcggccatccccgagggcctcccggctgtcatcactacatgcctggcactgggcacgcggcgcatggcacgcaagaacgccatcgtgcgaagcctgccgtccgtggagaccctgggctgcacctcagtcatctgctccgacaagacgggcacgctcaccaccaatcagatgtctgtctgccggatgttcgtggtagccgaggccgatgcgggctcctgccttttgcacgagttcaccatctcgggtaccacgtatacccccgagggcgaagtgcggcagggggatcagcctgtgcgctgcggccagttcgacgggctggtggagctggcgaccatctgcgccctgtgcaacgactcggcgctggactacaacgagtgtacgtaggcctggccacagtggctgccgccacctggtggtttgtgtatgacgccgagggacctcacatcaacttctaccagctgaggaacttcctgaagtgctccgaagacaacccgctctttgccggcatcgactgtgaggtgttcgagtcacgcttccccaccaccatggccttgtccgtgctcgtgaccattgaaatgtgcaatgccctcaacagcgtctcggagaaccagtcgctgctgcggatgccgccctggatgaacccctggctgctggtggctgtggccatgtccatggccctgcacttcctcatcctgctcgtgccgcccctgcctctcattttccaggtgaccccactgagcgggcgccagtgggtggtggtgctccagatatctctgcctgtcatcctgctggatgaggccctcaagtacctgtcccggaaccacatgcacgaagaaatgagccagaagtgagcgctgggaacagagtggagtctccggtgtgtacctcagactgatggtgcccatgtgttcgcctccgccccccacccttgccaccacactcgcccacttgcccaccgggtcccgccggataaatgacaggcccgaggtcagaatggccatccccgggccccgtcctggggtctctgtccccacttccttctggcctgggaggtctgtaattcctgtctcctggactctcctgggaagttccctgctctgcagctctggcccaggagctgcaggctgggagggggcagccaagaagccggagctggcagcatacccagagatccggggcccccccacccccaaatcacgagtgcagctggagcttgctcccccttgttcggaagctggacgttcacttggtgactggtgcctctgcactgacggaggactctgggggtccttcttaccggctctgacctctctcttcgtgcctggtctgggactgggtcagccctgggggatcagaaggggccatctgggcccagctgtgtacagcgagggtgggcagccccctccactccactctgcttccacaaagtcggctcccgagagctcgaggctgcttctgtttatatgtgcagggcccgggcgggtgaagggtcagagagacggacacaaggagccggcaggagggcggagcgaggatgtcctttcccgggagacaagtcgggaaagcctggctggactgcctcagccccgcgcgcctcctggactcagggttccccgtcctgagctcgggagatgttcagagtcacactgccgcccggtctgccacgcagaggtccaacttgccacccgcgtccctggtacctgagaccaccgacatcctcaggttcctgaccgtggcgcccttctacccagcccagtgtgcggccgccgcgctgtctgcacagctgggggcctctgagcctggtgggcttcctggactcttggcctcactccttgccccctccccacgacacccatgagccgaaaggatgtcactaaggatggctgattccccaagggcacccgctctccctccctccctgctggaggaacacgtcatatcagatgagaggaagatggcctctgatggacagaatttttctcttaactcagcttttgctactttggcaaaaactagcgaggggtagcagaaacctgcaccaaggattgtccctatgtcttggcccctcctagagcgtgtgcagactgatgattttatatgtaaatcaagactcacatccctttcctagtcccccacatccaaagcccctcagcctgccttgcagaccaatgggctccatgttctgtagccccctcccctacgcctcacccctcctccctctcacaggttctgggcggccagtgagagaaacgcagtgggggaggcagggagtctggtgcctgcagagattctctgcttctttcctggggggaggtggggaggtcttagcaggagcgggccctgtacccacctgctgacctgctgtttggtagagaaataaaggttgtgtgactgggggaacgga

SEQ ID NO: 447398 - DNA, 4445 bp, Homo sapiens
  misc_feature (1440)..(1440): n is a, c, g, or t
cgtcgggtaaggtcccagcacggacatggcctcgcgcggcgcccgcccgggcccgagtcccccgcgccccgctttgtagccccccggcggagaggcggcctcgacggtgcggacggcgcagacggccgggcgggcggcatggaggcggcgcatctgctcccggccgccgacgtgctgcgccacttctcggtgacagccgagggcggcctgagcccggcgcaggtgaccggcgcgcgggagcgctacggccccaacgagctcccgagtgaggaagggaagtccctgtgggagctggtgctggaacagtttgaggacctcctggtgcgcatcctgctgctggctgcccttgtctcctttgtcctggcctggttcgaggagggcgaggagaccacgaccgccttcgtggagcccctggtcatcatgctgatcctcgtggccaacgccattgtgggcgtgtggcaggaacgcaacgccgagagtgccatcgaggccctgaaggagtatgagcctgagatgggcaaggtgatccgctcggaccgcaagggcgtgcagaggatccgtgcccgggacatcgtcccaggggacattgtagaagtggcagtgggggacaaagtgcctgctgacctccgcctcatcgagatcaagtccaccacgctgcgagtggaccagtccatcctgacgggtgaatctgtgtccgtgaccaagcacacagaggccatcccagaccccagagctgtgaaccaggacaagaagaacatgctgttttctggcaccaatatcacatcgggcaaagcggtgggtgtggccgtggccaccggcctgcacacggagctgggcaagatccggagccagatggcggcagtcgagcccgagcggacgccgctgcagcgcaagctggacgagtttggacggcagctgtcccacgccatctctgtgatctgcgtggccgtgtgggtcatcaacatcggccacttcgccgacccggcccacggtggctcctggctgcgtggcgctgtctactacttcaagatcgccgtggccctggcggtggcggccatccccgagggcctcccggctgtcatcactacatgcctggcactgggcacgcggcgcatggcacgcaagaacgccatcgtgcgaagcctgccgtccgtggagaccctgggctgcacctcagtcatctgctccgacaagacgggcacgctcaccaccaatcagatgtctgtctgccggatgttcgtggtagccgaggccgatgcgggctcctgccttttgcacgagttcaccatctcgggtaccacgtatacccccgagggcgaagtgcggcagggggatcagcctgtgcgctgcggccagttcgacgggctggtggagctggcgaccatctgcgccctgtgcaacgactcggcgctggactacaacgaggccaagggtgtgtangagaaggtgggagaggccacggagacagctctgacttgcctggtggagaagatgaacgtgttcgacaccgacctgcaggctctgtcccgggtggagcgagctggcgcctgtaacacggtcatcaagcagctgatgcggaaggagttcaccctggagttctcccgagaccggaaatccatgtccgtgtactgcacgcccacccgccctcaccctactggccagggcagcaagatgtttgtgaagggggctcctgagagtgtgatcgagcgctgtagctcagtccgcgtggggagccgcacagcacccctgacccccacctccagggagcagatcctggcaaagatccgggattggggctcaggctcagacacgctgcgctgcctggcactggccacccgggacgcgcccccaaggaaggaggacatggagctggacgactgcagcaagtttgtgcagtacgagacggacctgaccttcgtgggctgcgtaggcatgctggacccgccgcgacctgaggtggctgcctgcatcacacgctgctaccaggcgggcatccgcgtggtcatgatcacgggggataacaaaggcactgccgtggccatctgccgcaggcttggcatctttggggacacggaagacgtggcgggcaaggcctacacgggccgcgagtttgatgacctcagccccgagcagcagcgccaggcctgccgcaccgcccgctgcttcgcccgcgtggagcccgcacacaagtcccgcatcgtggagaacctgcagtcctttaacgagatcactgctatgactggcgatggagtgaacgacgcaccagccctgaagaaagcagagatcggcatcgccatgggctcaggcacggccgtggccaagtcggcggcagagatggtgctgtcagatgacaactttgcctccatcgtggctgcggtggaggagggccgggccatctacagcaacatgaagcaattcatccgctacctcatctcctccaatgttggcgaggtcgtctgcatcttcctcacggcaattctgggcctgcccgaagccctgatccctgtgcagctgctctgggtgaacctggtgacagacggcctacctgccacggctctgggcttcaacccgccagacctggacatcatggagaagctgccccggagcccccgagaagccctcatcagtggctggctcttcttccgatacctggctatcggagtgtacgtaggcctggccacagtggctgccgccacctggtggtttgtgtatgacgccgagggacctcacatcaacttctaccagctgaggaacttcctgaagtgctccgaagacaacccgctctttgccggcatcgactgtgaggtgttcgagtcacgcttccccaccaccatggccttgtccgtgctcgtgaccattgaaatgtgcaatgccctcaacagcgtctcggagaaccagtcgctgctgcggatgccgccctggatgaacccctggctgctggtggctgtggccatgtccatggccctgcacttcctcatcctgctcgtgccgcccctgcctctcattttccaggtgaccccactgagcgggcgccagtgggtggtggtgctccagatatctctgcctgtcatcctgctggatgaggccctcaagtacctgtcccggaaccacatgcacgaagaaatgagccagaagtgagcgctgggaacagagtggagtctccggtgtgtacctcagactgatggtgcccatgtgttcgcctccgccccccacccttgccaccacactcgcccacttgcccaccgggtcccgccggataaatgacaggcccgaggtcagaatggccatccccgggccccgtcctggggtctctgtccccacttccttctggcctgggaggtctgtaattcctgtctcctggactctcctgggaagttccctgctctgcagctctggcccaggagctgcaggctgggagggggcagccaagaagccggagctggcagcatacccagagatccggggcccccccacccccaaatcacgagtgcagctggagcttgctcccccttgttcggaagctggacgttcacttggtgactggtgcctctgcactgacggagggcggagcgaggatgtcctttcccgggagacaagtcgggaaagcctggctggactgcctcagccccgcgcgcctcctggactcagggttccccgtcctgagctcgggagatgttcagagtcacactgccgcccggtctgccacgcagaggtccaacttgccacccgcgtccctggtacctgagaccaccgacatcctcaggttcctgaccgtggcgcccttctacccagcccagtgtgcggccgccgcgctgtctgcacagctgggggcctctgagcctggtgggcttcctggactcttggcctcactccttgccccctccccacgacacccatgagccgaaaggatgtcactaaggatggctgattccccaagggcacccgctctccctccctccctgctggaggaacacgtcatatcagatgagaggaagatggcctctgatggacagaatttttctcttaactcagcttttgctactttggcaaaaactagcgaggggtagcagaaacctgcaccaaggattgtccctatgtcttggcccctcctagagcgtgtgcagactgatgattttatatgtaaatcaagactcacatccctttcctagtcccccacatccaaagcccctcagcctgccttgcagaccaatgggctccatgttctgtagccccctcccctacgcctcacccctcctccctctcacaggttctgggcggccagtgagagaaacgcagtgggggaggcagggagtctggtgcctgcagagattctctgcttctttcctggggggaggtggggaggtcttagcaggagcgggccctgtacccacctgctgacctgctgtttggtagagaaataaaggttgtgtgactgggggaacgga

SEQ ID NO: 447399 - DNA, 1612 bp, Homo sapiens
tctcgctgtcagagctgctcagagagggaggaagcagggaagaaatgagccagaagtgagcgctgggaacagagtggagtctccggtgtgtacctcagactgatggtgcccatgtgttcgcctccgccccccacccttgccaccacactcgcccacttgcccaccgggtcccgccggataaatgacaggcccgaggtcagaatggccatccccgggccccgtcctggggtctctgtccccacttccttctggcctgggaggtctgtaattcctgtctcctggactctcctgggaagttccctgctctgcagctctggcccaggagctgcaggctgggagggggcagccaagaagccggagctggcagcatacccagagatccggggcccccccacccccaaatcacgagtgcagctggagcttgctcccccttgttcggaagctggacgttcacttggtgactggtgcctctgcactgacggaggactctgggggtccttcttaccggctctgacctctctcttcgtgcctggtctgggactgggtcagccctgggggatcagaaggggccatctgggcccagctgtgtacagcgagggtgggcagccccctccactccactctgcttccacaaagtcggctcccgagagctcgaggctgcttctgtttatatgtgcagggcccgggcgggtgaagggtcagagagacggacacaaggagccggcaggagggcggagcgaggatgtcctttcccgggagacaagtcgggaaagcctggctggactgcctcagccccgcgcgcctcctggactcagggttccccgtcctgagctcgggagatgttcagagtcacactgccgcccggtctgccacgcagaggtccaacttgccacccgcgtccctggtacctgagaccaccgacatcctcaggttcctgaccgtggcgcccttctacccagcccagtgtgcggccgccgcgctgtctgcacagctgggggcctctgagcctggtgggcttcctggactcttggcctcactccttgccccctccccacgacacccatgagccgaaaggatgtcactaaggatggctgattccccaagggcacccgctctccctccctccctgctggaggaacacgtcatatcagatgagaggaagatggcctctgatggacagaatttttctcttaactcagcttttgctactttggcaaaaactagcgaggggtagcagaaacctgcaccaaggattgtccctatgtcttggcccctcctagagcgtgtgcagactgatgattttatatgtaaatcaagactcacatccctttcctagtcccccacatccaaagcccctcagcctgccttgcagaccaatgggctccatgttctgtagccccctcccctacgcctcacccctcctccctctcacaggttctgggcggccagtgagagaaacgcagtgggggaggcagggagtctggtgcctgcagagattctctgcttctttcctggggggaggtggggaggtcttagcaggagcgggccctgtacccacctgctgacctgctgtttggtagagaaataaaggttgtgtgactgggggaacgga

SEQ ID NO: 447400 - DNA, 4097 bp, Homo sapiens
  misc_feature (1440)..(1440): n is a, c, g, or t
cgtcgggtaaggtcccagcacggacatggcctcgcgcggcgcccgcccgggcccgagtcccccgcgccccgctttgtagccccccggcggagaggcggcctcgacggtgcggacggcgcagacggccgggcgggcggcatggaggcggcgcatctgctcccggccgccgacgtgctgcgccacttctcggtgacagccgagggcggcctgagcccggcgcaggtgaccggcgcgcgggagcgctacggccccaacgagctcccgagtgaggaagggaagtccctgtgggagctggtgctggaacagtttgaggacctcctggtgcgcatcctgctgctggctgcccttgtctcctttgtcctggcctggttcgaggagggcgaggagaccacgaccgccttcgtggagcccctggtcatcatgctgatcctcgtggccaacgccattgtgggcgtgtggcaggaacgcaacgccgagagtgccatcgaggccctgaaggagtatgagcctgagatgggcaaggtgatccgctcggaccgcaagggcgtgcagaggatccgtgcccgggacatcgtcccaggggacattgtagaagtggcagtgggggacaaagtgcctgctgacctccgcctcatcgagatcaagtccaccacgctgcgagtggaccagtccatcctgacgggtgaatctgtgtccgtgaccaagcacacagaggccatcccagaccccagagctgtgaaccaggacaagaagaacatgctgttttctggcaccaatatcacatcgggcaaagcggtgggtgtggccgtggccaccggcctgcacacggagctgggcaagatccggagccagatggcggcagtcgagcccgagcggacgccgctgcagcgcaagctggacgagtttggacggcagctgtcccacgccatctctgtgatctgcgtggccgtgtgggtcatcaacatcggccacttcgccgacccggcccacggtggctcctggctgcgtggcgctgtctactacttcaagatcgccgtggccctggcggtggcggccatccccgagggcctcccggctgtcatcactacatgcctggcactgggcacgcggcgcatggcacgcaagaacgccatcgtgcgaagcctgccgtccgtggagaccctgggctgcacctcagtcatctgctccgacaagacgggcacgctcaccaccaatcagatgtctgtctgccggatgttcgtggtagccgaggccgatgcgggctcctgccttttgcacgagttcaccatctcgggtaccacgtatacccccgagggcgaagtgcggcagggggatcagcctgtgcgctgcggccagttcgacgggctggtggagctggcgaccatctgcgccctgtgcaacgactcggcgctggactacaacgaggccaagggtgtgtangagaaggtgggagaggccacggagacagctctgacttgcctggtggagaagatgaacgtgttcgacaccgacctgcaggctctgtcccgggtggagcgagctggcgcctgtaacacggtcatcaagcagctgatgcggaaggagttcaccctggagttctcccgagaccggaaatccatgtccgtgtactgcacgcccacccgccctcaccctactggccagggcagcaagatgtttgtgaagggggctcctgagagtgtgatcgagcgctgtagctcagtccgcgtggggagccgcacagcacccctgacccccacctccagggagcagatcctggcaaagatccgggattggggctcaggctcagacacgctgcgctgcctggcactggccacccgggacgcgcccccaaggaaggaggacatggagctggacgactgcagcaagtttgtgcagtacgagacggacctgaccttcgtgggctgcgtaggcatgctggacccgccgcgacctgaggtggctgcctgcatcacacgctgctaccaggcgggcatccgcgtggtcatgatcacgggggataacaaaggcactgccgtggccatctgccgcaggcttggcatctttggggacacggaagacgtggcgggcaaggcctacacgggccgcgagtttgatgacctcagccccgagcagcagcgccaggcctgccgcaccgcccgctgcttcgcccgcgtggagcccgcacacaagtcccgcatcgtggagaacctgcagtcctttaacgagatcactgctatgactggcgatggagtgaacgacgcaccagccctgaagaaagcagagatcggcatcgccatgggctcaggcacggccgtggccaagtcggcggcagagatggtgctgtcagatgacaactttgcctccatcgtggctgcggtggaggagggccgggccatctacagcaacatgaagcaattcatccgctacctcatctcctccaatgttggcgaggtcgtctgcatcttcctcacggcaattctgggcctgcccgaagccctgatccctgtgcagctgctctgggtgaacctggtgacagacggcctacctgccacggctctgggcttcaacccgccagacctggacatcatggagaagctgccccggagcccccgagaagccctcatcagtggctggctcttcttccgatacctggctatcggagtgtacgtaggcctggccacagtggctgccgccacctggtggtttgtgtatgacgccgagggacctcacatcaacttctaccagctgaggaacttcctgaagtgctccgaagacaacccgctctttgccggcatcgactgtgaggtgttcgagtcacgcttccccaccaccatggccttgtccgtgctcgtgaccattgaaatgtgcaatgccctcaacagcgtctcggagaaccagtcgctgctgcggatgccgccctggatgaacccctggctgctggtggctgtggccatgtccatggccctgcacttcctcatcctgctcgtgccgcccctgcctctcattttccaggtgaccccactgagcgggcgccagtgggtggtggtgctccagatatctctgcctgtcatcctgctggatgaggccctcaagtacctgtcccggaaccacatgcacgaagaaatgagccagaagtgagcgctgggaacagagtggagtctccgggcccgggcgggtgaagggtcagagagacggacacaaggagccggcaggagggcggagcgaggatgtcctttcccgggagacaagtcgggaaagcctggctggactgcctcagccccgcgcgcctcctggactcagggttccccgtcctgagctcgggagatgttcagagtcacactgccgcccggtctgccacgcagaggtccaacttgccacccgcgtccctggtacctgagaccaccgacatcctcaggttcctgaccgtggcgcccttctacccagcccagtgtgcggccgccgcgctgtctgcacagctgggggcctctgagcctggtgggcttcctggactcttggcctcactccttgccccctccccacgacacccatgagccgaaaggatgtcactaaggatggctgattccccaagggcacccgctctccctccctccctgctggaggaacacgtcatatcagatgagaggaagatggcctctgatggacagaatttttctcttaactcagcttttgctactttggcaaaaactagcgaggggtagcagaaacctgcaccaaggattgtccctatgtcttggcccctcctagagcgtgtgcagactgatgattttatatgtaaatcaagactcacatccctttcctagtcccccacatccaaagcccctcagcctgccttgcagaccaatgggctccatgttctgtagccccctcccctacgcctcacccctcctccctctcacaggttctgggcggccagtgagagaaacgcagtgggggaggcagggagtctggtgcctgcagagattctctgcttctttcctggggggaggtggggaggtcttagcaggagcgggccctgtacccacctgctgacctgctgtttggtagagaaataaaggttgtgtgactgggggaacgga

SEQ ID NO: 447401 - DNA, 1455 bp, Homo sapiens
cgtcgggtaaggtcccagcacggacatggcctcgcgcggcgcccgcccgggcccgagtcccccgcgccccgctttgtagccccccggcggagaggcggcctcgacggtgcggacggcgcagacggccgggcgggcggcatggaggcggcgcatctgctcccggccgccgacgtgctgcgccacttctcggtgacagccgagggcggcctgagcccggcgcaggtgaccggcgcgcgggagcgctacggccccaacgagctcccgagtgaggaagggaagtccctgtgggagctggtgctggaacagtttgaggacctcctggtgcgcatcctgctgctggctgcccttgtctcctttgtcctggcctggttcgaggagggcgaggagaccacgaccgccttcgtggagcccctggtcatcatgctgatcctcgtggccaacgccattgtgggcgtgtggcaggaacgcaacgccgagagtgccatcgaggccctgaaggagtatgagcctgagatgggcaaggtgatccgctcggaccgcaagggcgtgcagaggatccgtgcccgggacatcgtcccaggggacattgtagaagtggcagtgggggacaaagtgcctgctgacctccgcctcagccccgcgcgcctcctggactcagggttccccgtcctgagctcgggagatgttcagagtcacactgccgcccggtctgccacgcagaggtccaacttgccacccgcgtccctggtacctgagaccaccgacatcctcaggttcctgaccgtggcgcccttctacccagcccagtgtgcggccgccgcgctgtctgcacagctgggggcctctgagcctggtgggcttcctggactcttggcctcactccttgccccctccccacgacacccatgagccgaaaggatgtcactaaggatggctgattccccaagggcacccgctctccctccctccctgctggaggaacacgtcatatcagatgagaggaagatggcctctgatggacagaatttttctcttaactcagcttttgctactttggcaaaaactagcgaggggtagcagaaacctgcaccaaggattgtccctatgtcttggcccctcctagagcgtgtgcagactgatgattttatatgtaaatcaagactcacatccctttcctagtcccccacatccaaagcccctcagcctgccttgcagaccaatgggctccatgttctgtagccccctcccctacgcctcacccctcctccctctcacaggttctgggcggccagtgagagaaacgcagtgggggaggcagggagtctggtgcctgcagagattctctgcttctttcctggggggaggtggggaggtcttagcaggagcgggccctgtacccacctgctgacctgctgtttggtagagaaataaaggttgtgtgactgggggaacgga

SEQ ID NO: 447402 - DNA, 332 bp, Homo sapiens
ctccaagcactggggccaagggtatggcagatgctgattgaccagccagggcccaccactggcatcgaggggaggtgcctgcaaaccacagggctgagagaggaaaagggtggctccctgcagggaattcagggaattattaggcaggggaaacagacgccagaaaaccaccgccattctctacagccggtctcctcccttccccgcatgtacgtaggcctggccacagtggctgccgccacctggtggtttgtgtatgacgccgagggacctcacatcaacttctaccagctggtgagcaagggctggccagggagcctgttgaacttaca

SEQ ID NO: 447403 - DNA, 4691 bp, Homo sapiens
  misc_feature (1440)..(1440): n is a, c, g, or t
cgtcgggtaaggtcccagcacggacatggcctcgcgcggcgcccgcccgggcccgagtcccccgcgccccgctttgtagccccccggcggagaggcggcctcgacggtgcggacggcgcagacggccgggcgggcggcatggaggcggcgcatctgctcccggccgccgacgtgctgcgccacttctcggtgacagccgagggcggcctgagcccggcgcaggtgaccggcgcgcgggagcgctacggccccaacgagctcccgagtgaggaagggaagtccctgtgggagctggtgctggaacagtttgaggacctcctggtgcgcatcctgctgctggctgcccttgtctcctttgtcctggcctggttcgaggagggcgaggagaccacgaccgccttcgtggagcccctggtcatcatgctgatcctcgtggccaacgccattgtgggcgtgtggcaggaacgcaacgccgagagtgccatcgaggccctgaaggagtatgagcctgagatgggcaaggtgatccgctcggaccgcaagggcgtgcagaggatccgtgcccgggacatcgtcccaggggacattgtagaagtggcagtgggggacaaagtgcctgctgacctccgcctcatcgagatcaagtccaccacgctgcgagtggaccagtccatcctgacgggtgaatctgtgtccgtgaccaagcacacagaggccatcccagaccccagagctgtgaaccaggacaagaagaacatgctgttttctggcaccaatatcacatcgggcaaagcggtgggtgtggccgtggccaccggcctgcacacggagctgggcaagatccggagccagatggcggcagtcgagcccgagcggacgccgctgcagcgcaagctggacgagtttggacggcagctgtcccacgccatctctgtgatctgcgtggccgtgtgggtcatcaacatcggccacttcgccgacccggcccacggtggctcctggctgcgtggcgctgtctactacttcaagatcgccgtggccctggcggtggcggccatccccgagggcctcccggctgtcatcactacatgcctggcactgggcacgcggcgcatggcacgcaagaacgccatcgtgcgaagcctgccgtccgtggagaccctgggctgcacctcagtcatctgctccgacaagacgggcacgctcaccaccaatcagatgtctgtctgccggatgttcgtggtagccgaggccgatgcgggctcctgccttttgcacgagttcaccatctcgggtaccacgtatacccccgagggcgaagtgcggcagggggatcagcctgtgcgctgcggccagttcgacgggctggtggagctggcgaccatctgcgccctgtgcaacgactcggcgctggactacaacgaggccaagggtgtgtangagaaggtgggagaggccacggagacagctctgacttgcctggtggagaagatgaacgtgttcgacaccgacctgcaggctctgtcccgggtggagcgagctggcgcctgtaacacggtcatcaagcagctgatgcggaaggagttcaccctggagttctcccgagaccggaaatccatgtccgtgtactgcacgcccacccgccctcaccctactggccagggcagcaagatgtttgtgaagggggctcctgagagtgtgatcgagcgctgtagctcagtccgcgtggggagccgcacagcacccctgacccccacctccagggagcagatcctggcaaagatccgggattggggctcaggctcagacacgctgcgctgcctggcactggccacccgggacgcgcccccaaggaaggaggacatggagctggacgactgcagcaagtttgtgcagtacgagacggacctgaccttcgtgggctgcgtaggcatgctggacccgccgcgacctgaggtggctgcctgcatcacacgctgctaccaggcgggcatccgcgtggtcatgatcacgggggataacaaaggcactgccgtggccatctgccgcaggcttggcatctttggggacacggaagacgtggcgggcaaggcctacacgggccgcgagtttgatgacctcagccccgagcagcagcgccaggcctgccgcaccgcccgctgcttcgcccgcgtggagcccgcacacaagtcccgcatcgtggagaacctgcagtcctttaacgagatcactgctatgactggcgatggagtgaacgacgcaccagccctgaagaaagcagagatcggcatcgccatgggctcaggcacggccgtggccaagtcggcggcagagatggtgctgtcagatgacaactttgcctccatcgtggctgcggtggaggagggccgggccatctacagcaacatgaagcaattcatccgctacctcatctcctccaatgttggcgaggtcgtctgcatcttcctcacggcaattctgggcctgcccgaagccctgatccctgtgcagctgctctgggtgaacctggtgacagacggcctacctgccacggctctgggcttcaacccgccagacctggacatcatggagaagctgccccggagcccccgagaagccctcatcagtggctggctcttcttccgatacctggctatcggagtgtacgtaggcctggccacagtggctgccgccacctggtggtttgtgtatgacgccgagggacctcacatcaacttctaccagctgaggaacttcctgaagtgctccgaagacaacccgctctttgccggcatcgactgtgaggtgttcgagtcacgcttccccaccaccatggccttgtccgtgctcgtgaccattgaaatgtgcaatgccctcaacagcgtctcggagaaccagtcgctgctgcggatgccgccctggatgaacccctggctgctggtggctgtggccatgtccatggccctgcacttcctcatcctgctcgtgccgcccctgcctctcattttccaggtgaccccactgagcgggcgccagtgggtggtggtgctccagatatctctgcctgtcatcctgctggatgaggccctcaagtacctgtcccggaaccacatgcacgaagaaatgagccagaagtgagcgctgggaacagagtggagtctccggtgtgtacctcagactgatggtgcccatgtgttcgcctccgccccccacccttgccaccacactcgcccacttgcccaccgggtcccgccggataaatgacaggcccgaggtcagaatggccatccccgggccccgtcctggggtctctgtccccacttccttctggcctgggaggtctgtaattcctgtctcctggactctcctgggaagttccctgctctgcagctctggcccaggagctgcaggctgggagggggcagccaagaagccggagctggcagcatacccagagatccggggcccccccacccccaaatcacgagtgcagctggagcttgctcccccttgttcggaagctggacgttcacttggtgactggtgcctctgcactgacggaggactctgggggtccttcttaccggctctgacctctctcttcgtgcctggtctgggactgggtcagccctgggggatcagaaggggccatctgggcccagctgtgtacagcgagggtgggcagccccctccactccactctgcttccacaaagtcggctcccgagagctcgaggctgcttctgtttatatgtgcagggcccgggcgggtgaagggtcagagagacggacacaaggagccggcaggagggcggagcgaggatgtcctttcccgggagacaagtcgggaaagcctggctggactgcctcagccccgcgcgcctcctggactcagggttccccgtcctgagctcgggagatgttcagagtcacactgccgcccggtctgccacgcagaggtccaacttgccacccgcgtccctggtacctgagaccaccgacatcctcaggttcctgaccgtggcgcccttctacccagcccagtgtgcggccgccgcgctgtctgcacagctgggggcctctgagcctggtgggcttcctggactcttggcctcactccttgccccctccccacgacacccatgagccgaaaggatgtcactaaggatggctgattccccaagggcacccgctctccctccctccctgctggaggaacacgtcatatcagatgagaggaagatggcctctgatggacagaatttttctcttaactcagcttttgctactttggcaaaaactagcgaggggtagcagaaacctgcaccaaggattgtccctatgtcttggcccctcctagagcgtgtgcagactgatgattttatatgtaaatcaagactcacatccctttcctagtcccccacatccaaagcccctcagcctgccttgcagaccaatgggctccatgttctgtagccccctcccctacgcctcacccctcctccctctcacaggttctgggcggccagtgagagaaacgcagtgggggaggcagggagtctggtgcctgcagagattctctgcttctttcctggggggaggtggggaggtcttagcaggagcgggccctgtacccacctgctgacctgctgtttggtagagaaataaaggttgtgtgactgggggaacgga

SEQ ID NO: 447404 - DNA, 5118 bp, Homo sapiens
  misc_feature (1440)..(1440): n is a, c, g, or t
cgtcgggtaaggtcccagcacggacatggcctcgcgcggcgcccgcccgggcccgagtcccccgcgccccgctttgtagccccccggcggagaggcggcctcgacggtgcggacggcgcagacggccgggcgggcggcatggaggcggcgcatctgctcccggccgccgacgtgctgcgccacttctcggtgacagccgagggcggcctgagcccggcgcaggtgaccggcgcgcgggagcgctacggccccaacgagctcccgagtgaggaagggaagtccctgtgggagctggtgctggaacagtttgaggacctcctggtgcgcatcctgctgctggctgcccttgtctcctttgtcctggcctggttcgaggagggcgaggagaccacgaccgccttcgtggagcccctggtcatcatgctgatcctcgtggccaacgccattgtgggcgtgtggcaggaacgcaacgccgagagtgccatcgaggccctgaaggagtatgagcctgagatgggcaaggtgatccgctcggaccgcaagggcgtgcagaggatccgtgcccgggacatcgtcccaggggacattgtagaagtggcagtgggggacaaagtgcctgctgacctccgcctcatcgagatcaagtccaccacgctgcgagtggaccagtccatcctgacgggtgaatctgtgtccgtgaccaagcacacagaggccatcccagaccccagagctgtgaaccaggacaagaagaacatgctgttttctggcaccaatatcacatcgggcaaagcggtgggtgtggccgtggccaccggcctgcacacggagctgggcaagatccggagccagatggcggcagtcgagcccgagcggacgccgctgcagcgcaagctggacgagtttggacggcagctgtcccacgccatctctgtgatctgcgtggccgtgtgggtcatcaacatcggccacttcgccgacccggcccacggtggctcctggctgcgtggcgctgtctactacttcaagatcgccgtggccctggcggtggcggccatccccgagggcctcccggctgtcatcactacatgcctggcactgggcacgcggcgcatggcacgcaagaacgccatcgtgcgaagcctgccgtccgtggagaccctgggctgcacctcagtcatctgctccgacaagacgggcacgctcaccaccaatcagatgtctgtctgccggatgttcgtggtagccgaggccgatgcgggctcctgccttttgcacgagttcaccatctcgggtaccacgtatacccccgagggcgaagtgcggcagggggatcagcctgtgcgctgcggccagttcgacgggctggtggagctggcgaccatctgcgccctgtgcaacgactcggcgctggactacaacgaggccaagggtgtgtangagaaggtgggagaggccacggagacagctctgacttgcctggtggagaagatgaacgtgttcgacaccgacctgcaggctctgtcccgggtggagcgagctggcgcctgtaacacggtcatcaagcagctgatgcggaaggagttcaccctggagttctcccgagaccggaaatccatgtccgtgtactgcacgcccacccgccctcaccctactggccagggcagcaagatgtttgtgaagggggctcctgagagtgtgatcgagcgctgtagctcagtccgcgtggggagccgcacagcacccctgacccccacctccagggagcagatcctggcaaagatccgggattggggctcaggctcagacacgctgcgctgcctggcactggccacccgggacgcgcccccaaggaaggaggacatggagctggacgactgcagcaagtttgtgcagtacgagacggacctgaccttcgtgggctgcgtaggcatgctggacccgccgcgacctgaggtggctgcctgcatcacacgctgctaccaggcgggcatccgcgtggtcatgatcacgggggataacaaaggcactgccgtggccatctgccgcaggcttggcatctttggggacacggaagacgtggcgggcaaggcctacacgggccgcgagtttgatgacctcagccccgagcagcagcgccaggcctgccgcaccgcccgctgcttcgcccgcgtggagcccgcacacaagtcccgcatcgtggagaacctgcagtcctttaacgagatcactgctatgactggcgatggagtgaacgacgcaccagccctgaagaaagcagagatcggcatcgccatgggctcaggcacggccgtggccaagtcggcggcagagatggtgctgtcagatgacaactttgcctccatcgtggctgcggtggaggagggccgggccatctacagcaacatgaagcaattcatccgctacctcatctcctccaatgttggcgaggtcgtctgcatcttcctcacggcaattctgggcctgcccgaagccctgatccctgtgcagctgctctgggtgaacctggtgacagacggcctacctgccacggctctgggcttcaacccgccagacctggacatcatggagaagctgccccggagcccccgagaagccctcatcagtggctggctcttcttccgatacctggctatcggagtgtacgtaggcctggccacagtggctgccgccacctggtggtttgtgtatgacgccgagggacctcacatcaacttctaccagctgaggaacttcctgaagtgctccgaagacaacccgctctttgccggcatcgactgtgaggtgttcgagtcacgcttccccaccaccatggccttgtccgtgctcgtgaccattgaaatgtgcaatgccctcaacagcgtctcggagaaccagtcgctgctgcggatgccgccctggatgaacccctggctgctggtggctgtggccatgtccatggccctgcacttcctcatcctgctcgtgccgcccctgcctctcattttccaggtgaccccactgagcgggcgccagtgggtggtggtgctccagatatctctgcctgtcatcctgctggatgaggccctcaagtacctgtcccggaaccacatgcacggtgagtgggaggccccgtcccgcctccagcctgcctccccgcccgcctctgctcctgggctgcagtggacgctgtgggtgtggagcgcagagcctctctgtctgcacatcggggaggcgttctcggatcaccaagtggagggtgtgaaggggctctggtggctgggtcccaaggtgtccgcagggtcttgcactgcaggggacctgggctcactgggccagcaacgggagcacctcttgggccacactgcctcactgtcttcacctgccaccccctacatggccagggcactgtgtgctcttctgggcctcagcctctgacccctctgcacccagcctgtctttatccaggccttctcaggacagtctcgcaggcctggagtaggcagccgctgaccacctcttggaccccagaccacaccgggttgaagaaatgagccagaagtgagcgctgggaacagagtggagtctccggtgtgtacctcagactgatggtgcccatgtgttcgcctccgccccccacccttgccaccacactcgcccacttgcccaccgggtcccgccggataaatgacaggcccgaggtcagaatggccatccccgggccccgtcctggggtctctgtccccacttccttctggcctgggaggtctgtaattcctgtctcctggactctcctgggaagttccctgctctgcagctctggcccaggagctgcaggctgggagggggcagccaagaagccggagctggcagcatacccagagatccggggcccccccacccccaaatcacgagtgcagctggagcttgctcccccttgttcggaagctggacgttcacttggtgactggtgcctctgcactgacggaggactctgggggtccttcttaccggctctgacctctctcttcgtgcctggtctgggactgggtcagccctgggggatcagaaggggccatctgggcccagctgtgtacagcgagggtgggcagccccctccactccactctgcttccacaaagtcggctcccgagagctcgaggctgcttctgtttatatgtgcagggcccgggcgggtgaagggtcagagagacggacacaaggagccggcaggagggcggagcgaggatgtcctttcccgggagacaagtcgggaaagcctggctggactgcctcagccccgcgcgcctcctggactcagggttccccgtcctgagctcgggagatgttcagagtcacactgccgcccggtctgccacgcagaggtccaacttgccacccgcgtccctggtacctgagaccaccgacatcctcaggttcctgaccgtggcgcccttctacccagcccagtgtgcggccgccgcgctgtctgcacagctgggggcctctgagcctggtgggcttcctggactcttggcctcactccttgccccctccccacgacacccatgagccgaaaggatgtcactaaggatggctgattccccaagggcacccgctctccctccctccctgctggaggaacacgtcatatcagatgagaggaagatggcctctgatggacagaatttttctcttaactcagcttttgctactttggcaaaaactagcgaggggtagcagaaacctgcaccaaggattgtccctatgtcttggcccctcctagagcgtgtgcagactgatgattttatatgtaaatcaagactcacatccctttcctagtcccccacatccaaagcccctcagcctgccttgcagaccaatgggctccatgttctgtagccccctcccctacgcctcacccctcctccctctcacaggttctgggcggccagtgagagaaacgcagtgggggaggcagggagtctggtgcctgcagagattctctgcttctttcctggggggaggtggggaggtcttagcaggagcgggccctgtacccacctgctgacctgctgtttggtagagaaataaaggttgtgtgactgggggaacgga

SEQ ID NO: 447405 - DNA, 4166 bp, Homo sapiens
  misc_feature (915)..(915): n is a, c, g, or t
ggccccccctcgaagatcaggcccttaggccggatccggcttgggacatcgtcccatggacattgagaagtggcagtgggggacaaagtgcctgctgacctccgcctcatcgagatcaagtccaccacgctgcgagtggaccagtccatcctgacgggtgaatctgtgtccgtgaccaagcacacagaggccatcccagaccccagagctgtgaaccaggacaagaagaacatgctgttttctggcaccaatatcacatcgggcaaagcggtgggtgtggccgtggccaccggcctgcacacggagctgggcaagatccggagccagatggcggcagtcgagcccgagcggacgccgctgcagcgcaagctggacgagtttggacggcagctgtcccacgccatctctgtgatctgcgtggccgtgtgggtcatcaacatcggccacttcgccgacccggcccacggtggctcctggctgcgtggcgctgtctactacttcaagatcgccgtggccctggcggtggcggccatccccgagggcctcccggctgtcatcactacatgcctggcactgggcacgcggcgcatggcacgcaagaacgccatcgtgcgaagcctgccgtccgtggagaccctgggctgcacctcagtcatctgctccgacaagacgggcacgctcaccaccaatcagatgtctgtctgccggatgttcgtggtagccgaggccgatgcgggctcctgccttttgcacgagttcaccatctcgggtaccacgtatacccccgagggcgaagtgcggcagggggatcagcctgtgcgctgcggccagttcgacgggctggtggagctggcgaccatctgcgccctgtgcaacgactcggcgctggactacaacgaggccaagggtgtgtangagaaggtgggagaggccacggagacagctctgacttgcctggtggagaagatgaacgtgttcgacaccgacctgcaggctctgtcccgggtggagcgagctggcgcctgtaacacggtcatcaagcagctgatgcggaaggagttcaccctggagttctcccgagaccggaaatccatgtccgtgtactgcacgcccacccgccctcaccctactggccagggcagcaagatgtttgtgaagggggctcctgagagtgtgatcgagcgctgtagctcagtccgcgtggggagccgcacagcacccctgacccccacctccagggagcagatcctggcaaagatccgggattggggctcaggctcagacacgctgcgctgcctggcactggccacccgggacgcgcccccaaggaaggaggacatggagctggacgactgcagcaagtttgtgcagtacgagacggacctgaccttcgtgggctgcgtaggcatgctggacccgccgcgacctgaggtggctgcctgcatcacacgctgctaccaggcgggcatccgcgtggtcatgatcacgggggataacaaaggcactgccgtggccatctgccgcaggcttggcatctttggggacacggaagacgtggcgggcaaggcctacacgggccgcgagtttgatgacctcagccccgagcagcagcgccaggcctgccgcaccgcccgctgcttcgcccgcgtggagcccgcacacaagtcccgcatcgtggagaacctgcagtcctttaacgagatcactgctatgactggcgatggagtgaacgacgcaccagccctgaagaaagcagagatcggcatcgccatgggctcaggcacggccgtggccaagtcggcggcagagatggtgctgtcagatgacaactttgcctccatcgtggctgcggtggaggagggccgggccatctacagcaacatgaagcaattcatccgctacctcatctcctccaatgttggcgaggtcgtctgcatcttcctcacggcaattctgggcctgcccgaagccctgatccctgtgcagctgctctgggtgaacctggtgacagacggcctacctgccacggctctgggcttcaacccgccagacctggacatcatggagaagctgccccggagcccccgagaagccctcatcagtggctggctcttcttccgatacctggctatcggagtgtacgtaggcctggccacagtggctgccgccacctggtggtttgtgtatgacgccgagggacctcacatcaacttctaccagctgaggaacttcctgaagtgctccgaagacaacccgctctttgccggcatcgactgtgaggtgttcgagtcacgcttccccaccaccatggccttgtccgtgctcgtgaccattgaaatgtgcaatgccctcaacagcgtctcggagaaccagtcgctgctgcggatgccgccctggatgaacccctggctgctggtggctgtggccatgtccatggccctgcacttcctcatcctgctcgtgccgcccctgcctctcattttccaggtgaccccactgagcgggcgccagtgggtggtggtgctccagatatctctgcctgtcatcctgctggatgaggccctcaagtacctgtcccggaaccacatgcacgaagaaatgagccagaagtgagcgctgggaacagagtggagtctccggtgtgtacctcagactgatggtgcccatgtgttcgcctccgccccccacccttgccaccacactcgcccacttgcccaccgggtcccgccggataaatgacaggcccgaggtcagaatggccatccccgggccccgtcctggggtctctgtccccacttccttctggcctgggaggtctgtaattcctgtctcctggactctcctgggaagttccctgctctgcagctctggcccaggagctgcaggctgggagggggcagccaagaagccggagctggcagcatacccagagatccggggcccccccacccccaaatcacgagtgcagctggagcttgctcccccttgttcggaagctggacgttcacttggtgactggtgcctctgcactgacggaggactctgggggtccttcttaccggctctgacctctctcttcgtgcctggtctgggactgggtcagccctgggggatcagaaggggccatctgggcccagctgtgtacagcgagggtgggcagccccctccactccactctgcttccacaaagtcggctcccgagagctcgaggctgcttctgtttatatgtgcagggcccgggcgggtgaagggtcagagagacggacacaaggagccggcaggagggcggagcgaggatgtcctttcccgggagacaagtcgggaaagcctggctggactgcctcagccccgcgcgcctcctggactcagggttccccgtcctgagctcgggagatgttcagagtcacactgccgcccggtctgccacgcagaggtccaacttgccacccgcgtccctggtacctgagaccaccgacatcctcaggttcctgaccgtggcgcccttctacccagcccagtgtgcggccgccgcgctgtctgcacagctgggggcctctgagcctggtgggcttcctggactcttggcctcactccttgccccctccccacgacacccatgagccgaaaggatgtcactaaggatggctgattccccaagggcacccgctctccctccctccctgctggaggaacacgtcatatcagatgagaggaagatggcctctgatggacagaatttttctcttaactcagcttttgctactttggcaaaaactagcgaggggtagcagaaacctgcaccaaggattgtccctatgtcttggcccctcctagagcgtgtgcagactgatgattttatatgtaaatcaagactcacatccctttcctagtcccccacatccaaagcccctcagcctgccttgcagaccaatgggctccatgttctgtagccccctcccctacgcctcacccctcctccctctcacaggttctgggcggccagtgagagaaacgcagtgggggaggcagggagtctggtgcctgcagagattctctgcttctttcctggggggaggtggggaggtcttagcaggagcgggccctgtacccacctgctgacctgctgtttggtagagaaataaaggttgtgtgactgggggaacgga

SEQ ID NO: 447406 - DNA, 2913 bp, Homo sapiens
cttcccacttgcagattagcaagatgagagaaaagccccacctttaggcagtcgtgtgtgtgtccgtgtgcgaatgtgtatttgtgtgcacatggcctgagtgcctgagtgagaggtgtgtgtaatgtgtatattttgcatgtgtgctctggtgcattttgagcgtgagtacaagcagaaggatttgtgccggcgtgtgactgtgcacacactcgtattcacatgtgaggatgcctgtggggaatggtgagcgtgtgtgttgctggacatggatggattctgcatctctgcacctcagggcagatatgtaggtgtttgcttgtgtttgccggatggtgtggcatgtgctaggtttttgcacatgtctgattcttgggcatgccctcttcgtgtgcgtgtgtgtgtgtgtgtgtgtgtgtgtgtgtgtgtacttggcctctgctaggcctaaagagcaggtatgtccaggatccagagctgggactggggaaggcaggactggccaggcccgaggcagagctgtgtacacacacccttcacatcacagctggcggagggaggaggggctgctgtggagacagtgggtgggtgagctcccagccttgggtctgagcaggagctggagcctgcatctgccgggggctaggcctaccggggctagagctcatgactctgttccagcatcttcctcacggcaattctgggcctgcccgaagccctgatccctgtgcagctgctctgggtgaacctggtgacagacggcctacctgccacggctctgggcttcaacccgccagacctggacatcatggagaagctgccccggagcccccgagaagccctcatcagtggctggctcttcttccgatacctggctatcggagtgtacgtaggcctggccacagtggctgccgccacctggtggtttgtgtatgacgccgagggacctcacatcaacttctaccagctgaggaacttcctgaagtgctccgaagacaacccgctctttgccggcatcgactgtgaggtgttcgagtcacgcttccccaccaccatggccttgtccgtgctcgtgaccattgaaatgtgcaatgccctcaacagcgtctcggagaaccagtcgctgctgcggatgccgccctggatgaacccctggctgctggtggctgtggccatgtccatggccctgcacttcctcatcctgctcgtgccgcccctgcctctcattttccaggtgaccccactgagcgggcgccagtgggtggtggtgctccagatatctctgcctgtcatcctgctggatgaggccctcaagtacctgtcccggaaccacatgcacgaagaaatgagccagaagtgagcgctgggaacagagtggagtctccggtgtgtacctcagactgatggtgcccatgtgttcgcctccgccccccacccttgccaccacactcgcccacttgcccaccgggtcccgccggataaatgacaggcccgaggtcagaatggccatccccgggccccgtcctggggtctctgtccccacttccttctggcctgggaggtctgtaattcctgtctcctggactctcctgggaagttccctgctctgcagctctggcccaggagctgcaggctgggagggggcagccaagaagccggagctggcagcatacccagagatccggggcccccccacccccaaatcacgagtgcagctggagcttgctcccccttgttcggaagctggacgttcacttggtgactggtgcctctgcactgacggaggactctgggggtccttcttaccggctctgacctctctcttcgtgcctggtctgggactgggtcagccctgggggatcagaaggggccatctgggcccagctgtgtacagcgagggtgggcagccccctccactccactctgcttccacaaagtcggctcccgagagctcgaggctgcttctgtttatatgtgcagggcccgggcgggtgaagggtcagagagacggacacaaggagccggcaggagggcggagcgaggatgtcctttcccgggagacaagtcgggaaagcctggctggactgcctcagccccgcgcgcctcctggactcagggttccccgtcctgagctcgggagatgttcagagtcacactgccgcccggtctgccacgcagaggtccaacttgccacccgcgtccctggtacctgagaccaccgacatcctcaggttcctgaccgtggcgcccttctacccagcccagtgtgcggccgccgcgctgtctgcacagctgggggcctctgagcctggtgggcttcctggactcttggcctcactccttgccccctccccacgacacccatgagccgaaaggatgtcactaaggatggctgattccccaagggcacccgctctccctccctccctgctggaggaacacgtcatatcagatgagaggaagatggcctctgatggacagaatttttctcttaactcagcttttgctactttggcaaaaactagcgaggggtagcagaaacctgcaccaaggattgtccctatgtcttggcccctcctagagcgtgtgcagactgatgattttatatgtaaatcaagactcacatccctttcctagtcccccacatccaaagcccctcagcctgccttgcagaccaatgggctccatgttctgtagccccctcccctacgcctcacccctcctccctctcacaggttctgggcggccagtgagagaaacgcagtgggggaggcagggagtctggtgcctgcagagattctctgcttctttcctggggggaggtggggaggtcttagcaggagcgggccctgtacccacctgctgacctgctgtttggtagagaaataaaggttgtgtgactgggggaacgga

SEQ ID NO: 447407 - DNA, 4189 bp, Homo sapiens
  misc_feature (1440)..(1440): n is a, c, g, or t
cgtcgggtaaggtcccagcacggacatggcctcgcgcggcgcccgcccgggcccgagtcccccgcgccccgctttgtagccccccggcggagaggcggcctcgacggtgcggacggcgcagacggccgggcgggcggcatggaggcggcgcatctgctcccggccgccgacgtgctgcgccacttctcggtgacagccgagggcggcctgagcccggcgcaggtgaccggcgcgcgggagcgctacggccccaacgagctcccgagtgaggaagggaagtccctgtgggagctggtgctggaacagtttgaggacctcctggtgcgcatcctgctgctggctgcccttgtctcctttgtcctggcctggttcgaggagggcgaggagaccacgaccgccttcgtggagcccctggtcatcatgctgatcctcgtggccaacgccattgtgggcgtgtggcaggaacgcaacgccgagagtgccatcgaggccctgaaggagtatgagcctgagatgggcaaggtgatccgctcggaccgcaagggcgtgcagaggatccgtgcccgggacatcgtcccaggggacattgtagaagtggcagtgggggacaaagtgcctgctgacctccgcctcatcgagatcaagtccaccacgctgcgagtggaccagtccatcctgacgggtgaatctgtgtccgtgaccaagcacacagaggccatcccagaccccagagctgtgaaccaggacaagaagaacatgctgttttctggcaccaatatcacatcgggcaaagcggtgggtgtggccgtggccaccggcctgcacacggagctgggcaagatccggagccagatggcggcagtcgagcccgagcggacgccgctgcagcgcaagctggacgagtttggacggcagctgtcccacgccatctctgtgatctgcgtggccgtgtgggtcatcaacatcggccacttcgccgacccggcccacggtggctcctggctgcgtggcgctgtctactacttcaagatcgccgtggccctggcggtggcggccatccccgagggcctcccggctgtcatcactacatgcctggcactgggcacgcggcgcatggcacgcaagaacgccatcgtgcgaagcctgccgtccgtggagaccctgggctgcacctcagtcatctgctccgacaagacgggcacgctcaccaccaatcagatgtctgtctgccggatgttcgtggtagccgaggccgatgcgggctcctgccttttgcacgagttcaccatctcgggtaccacgtatacccccgagggcgaagtgcggcagggggatcagcctgtgcgctgcggccagttcgacgggctggtggagctggcgaccatctgcgccctgtgcaacgactcggcgctggactacaacgaggccaagggtgtgtangagaaggtgggagaggccacggagacagctctgacttgcctggtggagaagatgaacgtgttcgacaccgacctgcaggctctgtcccgggtggagcgagctggcgcctgtaacacggtcatcaagcagctgatgcggaaggagttcaccctggagttctcccgagaccggaaatccatgtccgtgtactgcacgcccacccgccctcaccctactggccagggcagcaagatgtttgtgaagggggctcctgagagtgtgatcgagcgctgtagctcagtccgcgtggggagccgcacagcacccctgacccccacctccagggagcagatcctggcaaagatccgggattggggctcaggctcagacacgctgcgctgcctggcactggccacccgggacgcgcccccaaggaaggaggacatggagctggacgactgcagcaagtttgtgcagtacgagacggacctgaccttcgtgggctgcgtaggcatgctggacccgccgcgacctgaggtggctgcctgcatcacacgctgctaccaggcgggcatccgcgtggtcatgatcacgggggataacaaaggcactgccgtggccatctgccgcaggcttggcatctttggggacacggaagacgtggcgggcaaggcctacacgggccgcgagtttgatgacctcagccccgagcagcagcgccaggcctgccgcaccgcccgctgcttcgcccgcgtggagcccgcacacaagtcccgcatcgtggagaacctgcagtcctttaacgagatcactgctatgactggcgatggagtgaacgacgcaccagccctgaagaaagcagagatcggcatcgccatgggctcaggcacggccgtggccaagtcggcggcagagatggtgctgtcagatgacaactttgcctccatcgtggctgcggtggaggagggccgggccatctacagcaacatgaagcaattcatccgctacctcatctcctccaatgttggcgaggtcgtctgcatcttcctcacggcaattctgggcctgcccgaagccctgatccctgtgcagctgctctgggtgaacctggtgacagacggcctacctgccacggctctgggcttcaacccgccagacctggacatcatggagaagctgccccggagcccccgagaagccctcatcagtggctggctcttcttccgatacctggctatcggagtgtacgtaggcctggccacagtggctgccgccacctggtggtttgtgtatgacgccgagggacctcacatcaacttctaccagctgaggaacttcctgaagtgctccgaagacaacccgctctttgccggcatcgactgtgaggtgttcgagtcacgcttccccaccaccatggccttgtccgtgctcgtgaccattgaaatgtgcaatgccctcaacagcgtctcggagaaccagtcgctgctgcggatgccgccctggatgaacccctggctgctggtggctgtggccatgtccatggccctgcacttcctcatcctgctcgtgccgcccctgcctctcattttccaggtgaccccactgagcgggcgccagtgggtggtggtgctccagatatctctgcctgtcatcctgctggatgaggccctcaagtacctgtcccggaaccacatgcacgcctgtctttatccaggccttctcaggacagtctcgcaggcctggagtaggcagccgctgaccacctcttggaccccagaccacaccgggttgaagaaatgagccagaagtgagcgctgggaacagagtggagtctccgggcccgggcgggtgaagggtcagagagacggacacaaggagccggcaggagggcggagcgaggatgtcctttcccgggagacaagtcgggaaagcctggctggactgcctcagccccgcgcgcctcctggactcagggttccccgtcctgagctcgggagatgttcagagtcacactgccgcccggtctgccacgcagaggtccaacttgccacccgcgtccctggtacctgagaccaccgacatcctcaggttcctgaccgtggcgcccttctacccagcccagtgtgcggccgccgcgctgtctgcacagctgggggcctctgagcctggtgggcttcctggactcttggcctcactccttgccccctccccacgacacccatgagccgaaaggatgtcactaaggatggctgattccccaagggcacccgctctccctccctccctgctggaggaacacgtcatatcagatgagaggaagatggcctctgatggacagaatttttctcttaactcagcttttgctactttggcaaaaactagcgaggggtagcagaaacctgcaccaaggattgtccctatgtcttggcccctcctagagcgtgtgcagactgatgattttatatgtaaatcaagactcacatccctttcctagtcccccacatccaaagcccctcagcctgccttgcagaccaatgggctccatgttctgtagccccctcccctacgcctcacccctcctccctctcacaggttctgggcggccagtgagagaaacgcagtgggggaggcagggagtctggtgcctgcagagattctctgcttctttcctggggggaggtggggaggtcttagcaggagcgggccctgtacccacctgctgacctgctgtttggtagagaaataaaggttgtgtgactgggggaacgga

SEQ ID NO: 447408 - DNA, 3004 bp, Homo sapiens
  misc_feature (1440)..(1440): n is a, c, g, or t
cgtcgggtaaggtcccagcacggacatggcctcgcgcggcgcccgcccgggcccgagtcccccgcgccccgctttgtagccccccggcggagaggcggcctcgacggtgcggacggcgcagacggccgggcgggcggcatggaggcggcgcatctgctcccggccgccgacgtgctgcgccacttctcggtgacagccgagggcggcctgagcccggcgcaggtgaccggcgcgcgggagcgctacggccccaacgagctcccgagtgaggaagggaagtccctgtgggagctggtgctggaacagtttgaggacctcctggtgcgcatcctgctgctggctgcccttgtctcctttgtcctggcctggttcgaggagggcgaggagaccacgaccgccttcgtggagcccctggtcatcatgctgatcctcgtggccaacgccattgtgggcgtgtggcaggaacgcaacgccgagagtgccatcgaggccctgaaggagtatgagcctgagatgggcaaggtgatccgctcggaccgcaagggcgtgcagaggatccgtgcccgggacatcgtcccaggggacattgtagaagtggcagtgggggacaaagtgcctgctgacctccgcctcatcgagatcaagtccaccacgctgcgagtggaccagtccatcctgacgggtgaatctgtgtccgtgaccaagcacacagaggccatcccagaccccagagctgtgaaccaggacaagaagaacatgctgttttctggcaccaatatcacatcgggcaaagcggtgggtgtggccgtggccaccggcctgcacacggagctgggcaagatccggagccagatggcggcagtcgagcccgagcggacgccgctgcagcgcaagctggacgagtttggacggcagctgtcccacgccatctctgtgatctgcgtggccgtgtgggtcatcaacatcggccacttcgccgacccggcccacggtggctcctggctgcgtggcgctgtctactacttcaagatcgccgtggccctggcggtggcggccatccccgagggcctcccggctgtcatcactacatgcctggcactgggcacgcggcgcatggcacgcaagaacgccatcgtgcgaagcctgccgtccgtggagaccctgggctgcacctcagtcatctgctccgacaagacgggcacgctcaccaccaatcagatgtctgtctgccggatgttcgtggtagccgaggccgatgcgggctcctgccttttgcacgagttcaccatctcgggtaccacgtatacccccgagggcgaagtgcggcagggggatcagcctgtgcgctgcggccagttcgacgggctggtggagctggcgaccatctgcgccctgtgcaacgactcggcgctggactacaacgaggccaagggtgtgtangagaaggtgggagaggccacggagacagctctgacttgcctggtggagaagatgaacgtgttcgacaccgacctgcaggctctgtcccgggtggagcgagctggcgcctgtaacacggtcatcaagcagctgatgcggaaggagttcaccctggagttctcccgagaccggaaatccatgtccgtgtactgcacgcccacccgccctcaccctactggccagggcagcaagatgtttgtgaagggggctcctgagagtgtgatcgagcgctgtagctcagtccgcgtggggagccgcacagcacccctgacccccacctccagggagcagatcctggcaaagatccgggattggggctcaggctcagacacgctgcgctgcctggcactggccacccgggacgcgcccccaaggaaggaggacatggagctggacgactgcagcaagtttgtgcagtacgagacggacctgaccttcgtgggctgcgtaggcatgctggacccgccgcgacctgaggtggctgcctgcatcacacgctgctaccaggcgggcatccgcgtggtcatgatcacgggggataacaaaggcactgccgtggccatctgccgcaggcttggcatctttggggacacggaagacgtggcgggcaaggcctacacgggccgcgagtttgatgacctcagccccgagcagcagcgccaggcctgccgcaccgcccgctgcttcgcccgcgtggagcccgcacacaagtcccgcatcgtggagaacctgcagtcctttaacgagatcactgctatgactggcgatggagtgaacgacgcaccagccctgaagaaagcagagatcggcatcgccatgggctcaggcacggccgtggccaagtcggcggcagagatggtgctgtcagatgacaactttgcctccatcgtggctgcggtggaggagggccgggccatctacagcaacatgaagcaattcatccgctacctcatctcctccaatgttggcgaggtcgtctgcatcttcctcacggcaattctgggcctgcccgaagccctgatccctgtgcagctgctctgggtgaacctggtgacagacggcctacctgccacggctctgggcttcaacccgccagacctggacatcatggagaagctgccccggagcccccgagaagccctcatcagtggctggctcttcttccgatacctggctatcggagtgtacgtaggcctggccacagtggctgccgccacctggtggtttgtgtatgacgccgagggacctcacatcaacttctaccagctggtgagcaagggctggccagggagcctgttgaacttacagctcgagttgttggagttccaggggagatgggtctagagccgcatgggtggcctgcagtgtccttccccactcgctatacacgaataaacatccccacctggggagccgagctcagagcccacgggaaacccagagacaccagcacggacccccaagccaaaggcgcctccccatcccagtcagttagcggggaccaagaggcctcactgccagatgt

SEQ ID NO: 447409 - DNA, 2505 bp, Homo sapiens
  misc_feature (1440)..(1440): n is a, c, g, or t
cgtcgggtaaggtcccagcacggacatggcctcgcgcggcgcccgcccgggcccgagtcccccgcgccccgctttgtagccccccggcggagaggcggcctcgacggtgcggacggcgcagacggccgggcgggcggcatggaggcggcgcatctgctcccggccgccgacgtgctgcgccacttctcggtgacagccgagggcggcctgagcccggcgcaggtgaccggcgcgcgggagcgctacggccccaacgagctcccgagtgaggaagggaagtccctgtgggagctggtgctggaacagtttgaggacctcctggtgcgcatcctgctgctggctgcccttgtctcctttgtcctggcctggttcgaggagggcgaggagaccacgaccgccttcgtggagcccctggtcatcatgctgatcctcgtggccaacgccattgtgggcgtgtggcaggaacgcaacgccgagagtgccatcgaggccctgaaggagtatgagcctgagatgggcaaggtgatccgctcggaccgcaagggcgtgcagaggatccgtgcccgggacatcgtcccaggggacattgtagaagtggcagtgggggacaaagtgcctgctgacctccgcctcatcgagatcaagtccaccacgctgcgagtggaccagtccatcctgacgggtgaatctgtgtccgtgaccaagcacacagaggccatcccagaccccagagctgtgaaccaggacaagaagaacatgctgttttctggcaccaatatcacatcgggcaaagcggtgggtgtggccgtggccaccggcctgcacacggagctgggcaagatccggagccagatggcggcagtcgagcccgagcggacgccgctgcagcgcaagctggacgagtttggacggcagctgtcccacgccatctctgtgatctgcgtggccgtgtgggtcatcaacatcggccacttcgccgacccggcccacggtggctcctggctgcgtggcgctgtctactacttcaagatcgccgtggccctggcggtggcggccatccccgagggcctcccggctgtcatcactacatgcctggcactgggcacgcggcgcatggcacgcaagaacgccatcgtgcgaagcctgccgtccgtggagaccctgggctgcacctcagtcatctgctccgacaagacgggcacgctcaccaccaatcagatgtctgtctgccggatgttcgtggtagccgaggccgatgcgggctcctgccttttgcacgagttcaccatctcgggtaccacgtatacccccgagggcgaagtgcggcagggggatcagcctgtgcgctgcggccagttcgacgggctggtggagctggcgaccatctgcgccctgtgcaacgactcggcgctggactacaacgaggccaagggtgtgtangagaaggtgggagaggccacggagacagctctgacttgcctggtggagaagatgaacgtgttcgacaccgacctgcaggctctgtcccgggtggagcgagctggcgcctgtaacacggtcatcaagcagctgatgcggaaggagttcaccctggagttctcccgagaccggaaatccatgtccgtgtactgcacgcccacccgccctcaccctactggccagggcagcaagatgtttgtgaagggggctcctgagagtgtgatcgagcgctgtagctcagtccgcgtggggagccgcacagcacccctgacccccacctccagggagcagatcctggcaaagatccgggattggggctcaggctcagacacgctgcgctgcctggcactggccacccgggacgcgcccccaaggaaggaggacatggagctggacgactgcagcaagtttgtgcagtacgagacggacctgaccttcgtgggctgcgtaggcatgctggacccgccgcgacctgaggtggctgcctgcatcacacgctgctaccaggcgggcatccgcgtggtcatgatcacgggggataacaaaggcactgccgtggccatctgccgcaggcttggcatctttggggacacggaagacgtggcgggcaaggcctacacgggccgcgagtttgatgacctcagccccgagcagcagcgccaggcctgccgcaccgcccgctgcttcgcccgcgtggagcccgcacacaagtcccgcatcgtggagaacctgcagtcctttaacgagatcactgctatgactggcgatggagtgaacgacgcaccagccctgaagaaagcagagatcggcatcgccatgggctcaggcacggccgtggccaagtcggcggcagagatggtgctgtcagatgacaactttgcctccatcgtggctgcggtggaggagggccgggccatctacagcaacatgaagcaattcatccgctacctcatctcctccaatgttggcgaggtcgtctggtgaggccgggccttccctcctctcagccctctcaatccgctctgt

SEQ ID NO: 447410 - DNA, 2856 bp, Homo sapiens
gttgtgactttccctttcgaattcctcggtatatcttggggactggaggacctgtctggttattatacagacgcataactggaggtgggatccacacagctcagaacagctggatcttgctcagtctctgccaggggaagattccttggaggaggccctgcagcgacatggagggagctgctttgctgagagtctctgtcctctgcatctggatgagtgcacttttccttggtgtgggagtgagggcagaggaagctggagcgagggtgcaacaaaacgttccaagtgggacagatactggagatcctcaaagtaagcccctcggtgactgggctgctggcaccatggacccagagagcagtatctttattgaggatgccattaagtatttcaaggaaaaagtgagcacacagaatctgctactcctgctgactgataatgaggcctggaacggattcgtggctgctgctgaactgcccaggaatgaggcagatgagctccgtaaagctctggacaaccttgcaagacaaatgatcatgaaagacaaaaactggcacgataaaggccagcagtacagaaactggtttctgaaagagtttcctcggttgaaaagtaagcttgaggataacataagaaggctccgtgcccttgcagatggggttcagaaggtccacaaaggcaccaccatcgccaatgtggtgtctggctctctcagcatttcctctggcatcctgaccctcgtcggcatgggtctggcacccttcacagagggaggcagccttgtactcttggaacctgggatggagttgggaatcacagcagctttgaccgggattaccagcagtaccatagactacggaaagaagtggtggacacaagcccaagcccacgacctggtcatcaaaagccttgacaaattgaaggaggtgaaggagtttttgggtgagaacatatccaactttctttccttagctggcaatacttaccaactcacacgaggcattgggaaggacatccgtgccctcagacgagccagagccaatcttcagtcagtaccgcatgcctcagcctcacgcccccgggtcactgagccaatctcagctgaaagcggtgaacaggtggagagggttaatgaacccagcatcctggaaatgagcagaggagtcaagctcacggatgtggcccctgtaagcttctttcttgtgctggatgtagtctacctcgtgtacgaatcaaagcacttacatgagggggcaaagtcagagacagctgaggagctgaagaaggtggctcaggagctggaggagaagctaaacattctcaacaataattataagattctgcaggcggaccaagaactgtgaccacagggcagggcagccaccaggagagatatgcctggcaggggccaggacaaaatgcaaacttttttttttttctgagacagagtcttgctctgtcgccaagttggagtgcaatggtgcgatctcagctcactgcaagctctgcctcccgtgttcaagcgattctcctgccttggcctcccaagtagctgggactacaggcgcctaccaccatgcccggctaatttttgtatttttaatagagatggggtttcaccatgttggccaggatggtctcgatctcctgacctcttgatctgcccaccttggcctcccaaagtgctgggattacaggcgtgagccatcgcttttgacccaaatgcaaacattttattagggggataaagagggtgaggtaaagtttatggaactgagtgttagggactttggcatttccatagctgagcacagcaggggaggggttaatgcagatggcagtgcagcaaggagaaggcaggaacattggagcctgcaataagggaaaaatgggaactggagagtgtggggaatgggaagaagcagtttactttagactaaagaatatattggggggccgggtgtagtggctcatgcctgtaatccgagcactttgggaggccaaggcgggcggatcacgaggtcaggagatcaagaccatcctggctagcacagtgaaaccccgtctctactaaaaatacaaaaaattagccgggcatggtggcgggcgcctgtagttccagctaactgggcggctgaggcaggagaatggcgtgaacctgggaggtggagcttgcagtgagccgagatatcgccactgcactccagcctgggtgacagagcgagactccatctcaaaaaaaaaaaaaaaaagaatatattgacggaagaatagagaggaggcttgaaggaaccagcaatgagaaggccaggaaaagaaagagctgaaaatggagaaagcccaagagttagaacagttggatacaggagaagaaacagcggctccactacagacccagccccaggttcaatgtcctccgaagaatgaagtctttccctggtgatggtcccctgccctgtctttccagcatccactctcccttgtcctcctgggggcatatctcagtcaggcagcggcttcctgatgatggtcgttggggtggttgtcatgtgatgggtcccctccaggttactaaagggtgcatgtcccctgcttgaacactgaagggcaggtggtgggccatggccatggtccccagctgaggagcaggtgtccctgagaacccaaacttcccagagagtatgtgagaaccaaccaatgaaaacagtcccatcgctcttacccggtaagtaaacagtcagaaaattagcatgaaagcagtttagcattgggaggaagctcagatctctagagctgtcttgtcgccgcccaggattgacctgtgtgtaagtcccaataaactcacctactcatcaa

SEQ ID NO: 447411 - DNA, 162 bp, Homo sapiens
gcggccgcctactactactactgctcgaattcaagcttctaacgatgtacggggacatgaaagcagtttagcattgggaggaagctcagatctctagagctgtcttgtcgccgcccaggattgacctgtgtgtaagtcccaataaactcacctactcatcaa

SEQ ID NO: 447412 - DNA, 2858 bp, Homo sapiens
gacatactgtgctaggtgcgaggctgctcggtatatcttggggactggaggacctgtctggttattatacagacgcataactggaggtgggatccacacagctcagaacagctggatcttgctcagtctctgccaggggaagattccttggaggaggccctgcagcgacatggagggagctgctttgctgagagtctctgtcctctgcatctggatgagtgcacttttccttggtgtgggagtgagggcagaggaagctggagcgagggtgcaacaaaacgttccaagtgggacagatactggagatcctcaaagtaagcccctcggtgactgggctgctggcaccatggacccagagagcagtatctttattgaggatgccattaagtatttcaaggaaaaagtgagcacacagaatctgctactcctgctgactgataatgaggcctggaacggattcgtggctgctgctgaactgcccaggaatgaggcagatgagctccgtaaagctctggacaaccttgcaagacaaatgatcatgaaagacaaaaactggcacgataaaggccagcagtacagaaactggtttctgaaagagtttcctcggttgaaaagtaagcttgaggataacataagaaggctccgtgcccttgcagatggggttcagaaggtccacaaaggcaccaccatcgccaatgtggtgtctggctctctcagcatttcctctggcatcctgaccctcgtcggcatgggtctggcacccttcacagagggaggcagccttgtactcttggaacctgggatggagttgggaatcacagcagctttgaccgggattaccagcagtaccatagactacggaaagaagtggtggacacaagcccaagcccacgacctggtcatcaaaagccttgacaaattgaaggaggtgaaggagtttttgggtgagaacatatccaactttctttccttagctggcaatacttaccaactcacacgaggcattgggaaggacatccgtgccctcagacgagccagagccaatcttcagtcagtaccgcatgcctcagcctcacgcccccgggtcactgagccaatctcagctgaaagcggtgaacaggtggagagggttaatgaacccagcatcctggaaatgagcagaggagtcaagctcacggatgtggcccctgtaagcttctttcttgtgctggatgtagtctacctcgtgtacgaatcaaagcacttacatgagggggcaaagtcagagacagctgaggagctgaagaaggtggctcaggagctggaggagaagctaaacattctcaacaataattataagattctgcaggcggaccaagaactgtgaccacagggcagggcagccaccaggagagatatgcctggcaggggccaggacaaaatgcaaacttttttttttttctgagacagagtcttgctctgtcgccaagttggagtgcaatggtgcgatctcagctcactgcaagctctgcctcccgtgttcaagcgattctcctgccttggcctcccaagtagctgggactacaggcgcctaccaccatgcccggctaatttttgtatttttaatagagatggggtttcaccatgttggccaggatggtctcgatctcctgacctcttgatctgcccaccttggcctcccaaagtgctgggattacaggcgtgagccatcgcttttgacccaaatgcaaacattttattagggggataaagagggtgaggtaaagtttatggaactgagtgttagggactttggcatttccatagctgagcacagcaggggaggggttaatgcagatggcagtgcagcaaggagaaggcaggaacattggagcctgcaataagggaaaaatgggaactggagagtgtggggaatgggaagaagcagtttactttagactaaagaatatattggggggccgggtgtagtggctcatgcctgtaatccgagcactttgggaggccaaggcgggcggatcacgaggtcaggagatcaagaccatcctggctagcacagtgaaaccccgtctctactaaaaatacaaaaaattagccgggcatggtggcgggcgcctgtagttccagctaactgggcggctgaggcaggagaatggcgtgaacctgggaggtggagcttgcagtgagccgagatatcgccactgcactccagcctgggtgacagagcgagactccatctcaaaaaaaaaaaaaaaaagaatatattgacggaagaatagagaggaggcttgaaggaaccagcaatgagaaggccaggaaaagaaagagctgaaaatggagaaagcccaagagttagaacagttggatacaggagaagaaacagcggctccactacagacccagccccaggttcaatgtcctccgaagaatgaagtctttccctggtgatggtcccctgccctgtctttccagcatccactctcccttgtcctcctgggggcatatctcagtcaggcagcggcttcctgatgatggtcgttggggtggttgtcatgtgatgggtcccctccaggttactaaagggtgcatgtcccctgcttgaacactgaagggcaggtggtgggccatggccatggtccccagctgaggagcaggtgtccctgagaacccaaacttcccagagagtatgtgagaaccaaccaatgaaaacagtcccatcgctcttacccggtaagtaaacagtcagaaaattagcatgaaagcagtttagcattgggaggaagctcagatctctagagctgtcttgtcgccgcccaggattgacctgtgtgtaagtcccaataaactcacctactcatcaa

SEQ ID NO: 447413 - DNA, 2156 bp, Homo sapiens
gacatactgtgctaggtgcgaggctgctcggtatatcttggggactggaggacctgtctggttattatacagacgcataactggaggtgggatccacacagctcagaacagctggatcttgctcagtctctgccaggggaagattccttggaggaggccctgcagcgacatggagggagctgctttgctgagagtctctgtcctctgcatctggatgagtgcacttttccttggtgtgggagtgagggcagaggaagctggagcgagggtgcaacaaaacgttccaagtgggacagatactggagatcctcaaagtaagcccctcggtgactgggctgctggcaccatggacccagagagcagtatctttattgaggatgccattaagtatttcaaggaaaaagtgagcacacagaatctgctactcctgctgactgataatgaggcctggaacggattcgtggctgctgctgaactgcccaggaatgaggcagatgagctccgtaaagctctggacaaccttgcaagacaaatgatcatgaaagacaaaaactggcacgataaaggccagcagtacagaaactggtttctgaaagagtttcctcggttgaaaagtaagcttgaggataacataagaaggctccgtgcccttgcagatggggttcagaaggtccacaaaggcaccaccatcgccaatgtggtgtctggctctctcagcatttcctctggcatcctgaccctcgtcggcatgggtctggcacccttcacagagggaggcagccttgtactcttggaacctgggatggagttgggaatcacagcagctttgaccgggattaccagcagtaccatagactacggaaagaagtggtggacacaagcccaagcccacgacctggtcatcaaaagccttgacaaattgaaggaggtgaaggagtttttgggtgagaacatatccaactttctttccttagctggcaatacttaccaactcacacgaggcattgggaaggacatccgtgccctcagacgagccagagccaatcttcagtcagtaccgcatgcctcagcctcacgcccccgggtcactgagccaatctcagctgaaagcggtgaacaggtggagagggttaatgaacccagcatcctggaaatgagcagaggagtcaagctcacggatgtggcccctgtaagcttctttcttgtgctggatgtagtctacctcgtgtacgaatcaaagcacttacatgagggggcaaagtcagagacagctgaggagctgaagaaggtggctcaggagctggaggagaagctaaacattctcaacaataattataagattctgcaggcggaccaagaactgtgaccacagggcagggcagccaccaggagagatatgcctggcaggggccaggacaaaatgcaaacttttttttttttctgagacagagtcttgctctgtcgccaagagcttgcagtgagccgagatatcgccactgcactccagcctgggtgacagagcgagactccatctcaaaaaaaaaaaaaaaaagaatatattgacggaagaatagagaggaggcttgaaggaaccagcaatgagaaggccaggaaaagaaagagctgaaaatggagaaagcccaagagttagaacagttggatacaggagaagaaacagcggctccactacagacccagccccaggttcaatgtcctccgaagaatgaagtctttccctggtgatggtcccctgccctgtctttccagcatccactctcccttgtcctcctgggggcatatctcagtcaggcagcggcttcctgatgatggtcgttggggtggttgtcatgtgatgggtcccctccaggttactaaagggtgcatgtcccctgcttgaacactgaagggcaggtggtgggccatggccatggtccccagctgaggagcaggtgtccctgagaacccaaacttcccagagagtatgtgagaaccaaccaatgaaaacagtcccatcgctcttacccggtaagtaaacagtcagaaaattagcatgaaagcagtttagcattgggaggaagctcagatctctagagctgtcttgtcgccgcccaggattgacctgtgtgtaagtcccaataaactcacctactcatcaa

SEQ ID NO: 447414 - DNA, 2898 bp, Homo sapiens
gacatactgtgctaggtgcgaggctgctcggtatatcttggggactggaggacctgtctggttattatacagacgcataactggaggtgggatccacacagctcagaacagctggatcttgctcagtctctgccaggggaagattccttggaggaggccctgcagcgacatggagggagctgctttgctgagagtctctgtcctctgcatctggatgagtgcacttttccttggtgtgggagtgagggcagaggaagctggagcgagggtgcaacaaaacgttccaagtgggacagatactggagatcctcaaagtaagcccctcggtgactgggctgctggcaccatggacccagagagcagtatctttattgaggatgccattaagtatttcaaggaaaaagtgagcacacagaatctgctactcctgctgactgataatgaggcctggaacggattcgtggctgctgctgaactgcccaggaatgaggcagatgagctccgtaaagctctggacaaccttgcaagacaaatgatcatgaaagacaaaaactggcacgataaaggccagcagtacagaaactggtttctgaaagagtttcctcggttgaaaagtaagcttgaggataacataagaaggctccgtgcccttgcagatggggttcagaaggtccacaaaggcaccaccatcgccaatgtggtgtctggctctctcagcatttcctctggcatcctgaccctcgtcggcatgggtctggcacccttcacagagggaggcagccttgtactcttggaacctgggatggagttgggaatcacagcagctttgaccgggattaccagcagtaccatagactacggaaagaagtggtggacacaagcccaagcccacgacctggtcatcaaaagccttgacaaattgaaggaggtgaaggagtttttgggtgagaacatatccaactttctttccttagctggcaatacttaccaactcacacgaggcattgggaaggacatccgtgccctcagacgagccagagccaatcttcagtcagtaccgcatgcctcagcctcacgcccccgggtcactgagccaatctcagctgaaagcggtgaacaggtggagagggttaatgaacccagcatcctggaaatgagcagaggagtcaagctcacggatgtggcccctgtaagcttctttcttgtgctggatgtagtctacctcgtgtacgaatcaaagcacttacatgagggggcaaagtcagagacagctgaggagctgaagaaggtggctcaggagctggaggagaagctaaacattctcaacaataattataagattctgcaggcggaccaagaactgtgaccacagggcagggcagccaccaggagagatatgcctggcaggggccaggacaaaatgcaaacttttttttttttctgagacagagtcttgctctgtcgccaagttggagtgcaatggtgcgatctcagctcactgcaagctctgcctcccgtgttcaagcgattctcctgccttggcctcccaagtagctgggactacaggcgcctaccaccatgcccggctaatttttgtatttttaatagagatggggtttcaccatgttggccaggatggtctcgatctcctgacctcttgatctgcccaccttggcctcccaaagtgctgggattacaggcgtgagccatcgcttttgacccaaatgcaaacattttattagggggataaagagggtgaggtaaagtttatggaactgagtgttagggactttggcatttccatagctgagcacagcaggggaggggttaatgcagatggcagtgcagcaaggagaaggcaggaacattggagcctgcaataagggaaaaatgggaactggagagtgtggggaatgggaagaagcagtttactttagactaaagaatatattggggggccgggtgtagtggctcatgcctgtaatccgagcactttgggaggccaaggcgggcggatcacgaggtcaggagatcaagaccatcctggctagcacagtgaaaccccgtctctactaaaaatacaaaaaattagccgggcatggtggcgggcgcctgtagttccagctaactgggcggctgaggcaggagaatggcgtgaacctgggaggtggagcttgcagtgagccgagatatcgccactgcactccagcctgggtgacagagcgagactccatctcaaaaaaaaaaaaaaaaagaatatattgacggaagaatagagaggaggcttgaaggaaccagcaatgagaaggccaggaaaagaaagagctgaaaatggagaaagcccaagagttagaacagttggatacaggagaagaaacagcggctccactacagacccagccccaggttcaatgtcctccgaagaatgaagtctttccctggtgatggtcccctgccctgtctttccagcatccactctcccttgtcctcctgggggcatatctcagtcaggcagcggcttcctgatgatggtcgttggggtggttgtcatgtgatgggtcccctccaggttactaaagggtgcatgtcccctgcttgaacactgaagggcaggtggtgggccatggccatggtccccagctgaggagcaggtgtccctgagaacccaaacttcccagagagtatgtgagaaccaaccaatgaaaacagtcccatcgctcttacccggtaagtaaacagtcagaaaattagcatgaaagcagtttagcattgggaggaagctcagatctctagagctgtcttgtcgccgcccaggattgacctgtgtgtaagtcccaataaactcacctactcatcaaaaaaaaaaaaaaaaaaaaaaaaaaaaaaaaaaaaaaaaat

SEQ ID NO: 447415 - DNA, 2077 bp, Homo sapiens
gacatactgtgctaggtgcgaggctgctcggtatatcttggggactggaggacctgtctggttattatacagacgcataactggaggtgggatccacacagctcagaacagctggatcttgctcagtctctgccaggggaagattccttggaggaggccctgcagcgacatggagggagctgctttgctgagagtctctgtcctctgcatctggatgagtgcacttttccttggtgtgggagtgagggcagaggaagctggagcgagggtgcaacaaaacgttccaagtgggacagatactggagatcctcaaagtaagcccctcggtgactgggctgctggcaccatggacccagagagcagtatctttattgaggatgccattaagtatttcaaggaaaaagtgagcacacagaatctgctactcctgctgactgataatgaggcctggaacggattcgtggctgctgctgaactgcccaggaatgaggcagatgagctccgtaaagctctggacaaccttgcaagacaaatgatcatgaaagacaaaaactggcacgataaaggccagcagtacagaaactggtttctgaaagagtttcctcggttgaaaagtaagcttgaggataacataagaaggctccgtgcccttgcagatggggttcagaaggtccacaaaggcaccaccatcgccaatgtggtgtctggctctctcagcatttcctctggcatcctgaccctcgtcggcatgggtctggcacccttcacagagggaggcagccttgtactcttggaacctgggatggagttgggaatcacagcagctttgaccgggattaccagcagtaccatagactacggaaagaagtggtggacacaagcccaagcccacgacctggtcatcaaaagccttgacaaattgaaggaggtgaaggagtttttgggtgagaacatatccaactttctttccttagctggcaatacttaccaactcacacgaggcattgggaaggacatccgtgccctcagacgagccagagccaatcttcagtcagtaccgcatgcctcagcctcacgcccccgggtcactgagccaatctcagctgaaagcggtgaacaggtggagagggttaatgaacccagcatcctggaaatgagcagaggagtcaagctcacggatgtggcccctgtaagcttctttcttgtgctggatgtagtctacctcgtgtacgaatcaaagcacttacatgagggggcaaagtcagagacagctgaggagctgaagaaggtggctcaggagctggaggagaagctaaacattctcaacaataattataagattctgcaggcggaccaagaactgtgaccacagggcagggcagccaccaggagagatatgcctggcaggggccaggacaaaatgcaaacttttttttttttagcgagactccatctcaaaaaaaaaaaaaaaaagaatatattgacggaagaatagagaggaggcttgaaggaaccagcaatgagaaggccaggaaaagaaagagctgaaaatggagaaagcccaagagttagaacagttggatacaggagaagaaacagcggctccactacagacccagccccaggttcaatgtcctccgaagaatgaagtctttccctggtgatggtcccctgccctgtctttccagcatccactctcccttgtcctcctgggggcatatctcagtcaggcagcggcttcctgatgatggtcgttggggtggttgtcatgtgatgggtcccctccaggttactaaagggtgcatgtcccctgcttgaacactgaagggcaggtggtgggccatggccatggtccccagctgaggagcaggtgtccctgagaacccaaacttcccagagagtatgtgagaaccaaccaatgaaaacagtcccatcgctcttacccggtaagtaaacagtcagaaaattagcatgaaagcagtttagcattgggaggaagctcagatctctagagctgtcttgtcgccgcccaggattgacctgtgtgtaagtcccaataaactcacctactcatcaa

SEQ ID NO: 447416 - DNA, 2828 bp, Homo sapiens
tgtgctcacacagtcttcttgtgtccctttctgttcttacaataggacactagccctctaatagaattagagccctacccttgtgatctcattcagtcttaattgcttccttaaaggccagatctccaaatgtagtcacctgagtttaaagcttcagcatatgaattttgggggcacacaattccctctatagcactaatgactccataaaacaagtcccacatcacagctgtccaggaaaattaacatgtagtcatctcttatgcaatggctgttatgcactcccacactttcctccaaccttatcctttcttctttccaactagagagcagtatctttattgaggatgccattaagtatttcaaggaaaaagtgagcacacagaatctgctactcctgctgactgataatgaggcctggaacggattcgtggctgctgctgaactgcccaggaatgaggcagatgagctccgtaaagctctggacaaccttgcaagacaaatgatcatgaaagacaaaaactggcacgataaaggccagcagtacagaaactggtttctgaaagagtttcctcggttgaaaagtaagcttgaggataacataagaaggctccgtgcccttgcagatggggttcagaaggtccacaaaggcaccaccatcgccaatgtggtgtctggctctctcagcatttcctctggcatcctgaccctcgtcggcatgggtctggcacccttcacagagggaggcagccttgtactcttggaacctgggatggagttgggaatcacagcagctttgaccgggattaccagcagtaccatagactacggaaagaagtggtggacacaagcccaagcccacgacctggtcatcaaaagccttgacaaattgaaggaggtgaaggagtttttgggtgagaacatatccaactttctttccttagctggcaatacttaccaactcacacgaggcattgggaaggacatccgtgccctcagacgagccagagccaatcttcagtcagtaccgcatgcctcagcctcacgcccccgggtcactgagccaatctcagctgaaagcggtgaacaggtggagagggttaatgaacccagcatcctggaaatgagcagaggagtcaagctcacggatgtggcccctgtaagcttctttcttgtgctggatgtagtctacctcgtgtacgaatcaaagcacttacatgagggggcaaagtcagagacagctgaggagctgaagaaggtggctcaggagctggaggagaagctaaacattctcaacaataattataagattctgcaggcggaccaagaactgtgaccacagggcagggcagccaccaggagagatatgcctggcaggggccaggacaaaatgcaaacttttttttttttctgagacagagtcttgctctgtcgccaagttggagtgcaatggtgcgatctcagctcactgcaagctctgcctcccgtgttcaagcgattctcctgccttggcctcccaagtagctgggactacaggcgcctaccaccatgcccggctaatttttgtatttttaatagagatggggtttcaccatgttggccaggatggtctcgatctcctgacctcttgatctgcccaccttggcctcccaaagtgctgggattacaggcgtgagccatcgcttttgacccaaatgcaaacattttattagggggataaagagggtgaggtaaagtttatggaactgagtgttagggactttggcatttccatagctgagcacagcaggggaggggttaatgcagatggcagtgcagcaaggagaaggcaggaacattggagcctgcaataagggaaaaatgggaactggagagtgtggggaatgggaagaagcagtttactttagactaaagaatatattggggggccgggtgtagtggctcatgcctgtaatccgagcactttgggaggccaaggcgggcggatcacgaggtcaggagatcaagaccatcctggctagcacagtgaaaccccgtctctactaaaaatacaaaaaattagccgggcatggtggcgggcgcctgtagttccagctaactgggcggctgaggcaggagaatggcgtgaacctgggaggtggagcttgcagtgagccgagatatcgccactgcactccagcctgggtgacagagcgagactccatctcaaaaaaaaaaaaaaaaagaatatattgacggaagaatagagaggaggcttgaaggaaccagcaatgagaaggccaggaaaagaaagagctgaaaatggagaaagcccaagagttagaacagttggatacaggagaagaaacagcggctccactacagacccagccccaggttcaatgtcctccgaagaatgaagtctttccctggtgatggtcccctgccctgtctttccagcatccactctcccttgtcctcctgggggcatatctcagtcaggcagcggcttcctgatgatggtcgttggggtggttgtcatgtgatgggtcccctccaggttactaaagggtgcatgtcccctgcttgaacactgaagggcaggtggtgggccatggccatggtccccagctgaggagcaggtgtccctgagaacccaaacttcccagagagtatgtgagaaccaaccaatgaaaacagtcccatcgctcttacccggtaagtaaacagtcagaaaattagcatgaaagcagtttagcattgggaggaagctcagatctctagagctgtcttgtcgccgcccaggattgacctgtgtgtaagtcccaataaactcacctactcatcaa

SEQ ID NO: 447417 - DNA, 2023 bp, Homo sapiens
aaaactcaggcattgtttccaaaggaagagctaatgggcctatttgacttctgagtgaagcaaaaactacccagatccattccctataattcacatccccaaaggtcaaaaacaaactaggaggacctgggaatttcagctggcaatacttaccaactcacacgaggcattgggaaggacatccgtgccctcagacgagccagagccaatcttcagtcagtaccgcatgcctcagcctcacgcccccgggtcactgagccaatctcagctgaaagcggtgaacaggtggagagggttaatgaacccagcatcctggaaatgagcagaggagtcaagctcacggatgtggcccctgtaagcttctttcttgtgctggatgtagtctacctcgtgtacgaatcaaagcacttacatgagggggcaaagtcagagacagctgaggagctgaagaaggtggctcaggagctggaggagaagctaaacattctcaacaataattataagattctgcaggcggaccaagaactgtgaccacagggcagggcagccaccaggagagatatgcctggcaggggccaggacaaaatgcaaacttttttttttttctgagacagagtcttgctctgtcgccaagttggagtgcaatggtgcgatctcagctcactgcaagctctgcctcccgtgttcaagcgattctcctgccttggcctcccaagtagctgggactacaggcgcctaccaccatgcccggctaatttttgtatttttaatagagatggggtttcaccatgttggccaggatggtctcgatctcctgacctcttgatctgcccaccttggcctcccaaagtgctgggattacaggcgtgagccatcgcttttgacccaaatgcaaacattttattagggggataaagagggtgaggtaaagtttatggaactgagtgttagggactttggcatttccatagctgagcacagcaggggaggggttaatgcagatggcagtgcagcaaggagaaggcaggaacattggagcctgcaataagggaaaaatgggaactggagagtgtggggaatgggaagaagcagtttactttagactaaagaatatattggggggccgggtgtagtggctcatgcctgtaatccgagcactttgggaggccaaggcgggcggatcacgaggtcaggagatcaagaccatcctggctagcacagtgaaaccccgtctctactaaaaatacaaaaaattagccgggcatggtggcgggcgcctgtagttccagctaactgggcggctgaggcaggagaatggcgtgaacctgggaggtggagcttgcagtgagccgagatatcgccactgcactccagcctgggtgacagagcgagactccatctcaaaaaaaaaaaaaaaaagaatatattgacggaagaatagagaggaggcttgaaggaaccagcaatgagaaggccaggaaaagaaagagctgaaaatggagaaagcccaagagttagaacagttggatacaggagaagaaacagcggctccactacagacccagccccaggttcaatgtcctccgaagaatgaagtctttccctggtgatggtcccctgccctgtctttccagcatccactctcccttgtcctcctgggggcatatctcagtcaggcagcggcttcctgatgatggtcgttggggtggttgtcatgtgatgggtcccctccaggttactaaagggtgcatgtcccctgcttgaacactgaagggcaggtggtgggccatggccatggtccccagctgaggagcaggtgtccctgagaacccaaacttcccagagagtatgtgagaaccaaccaatgaaaacagtcccatcgctcttacccggtaagtaaacagtcagaaaattagcatgaaagcagtttagcattgggaggaagctcagatctctagagctgtcttgtcgccgcccaggattgacctgtgtgtaagtcccaataaactcacctactcatcaa

SEQ ID NO: 447418 - DNA, 726 bp, Homo sapiens
ttatttgtattgtgtgttgatcaccccccgggttttccccttcccaccgtggtaaaccaccgcccctgccacactttcaagccctcagggtggattttgagggatcccccaaaaaaaaaaaagaatatattgacggaagaatagagaggaggcttgaaggaaccagcaatgagaaggccaggaaaagaaagagctgaaaatggagaaagcccaagagttagaacagttggatacaggagaagaaacagcggctccactacagacccagccccaggttcaatgtcctccgaagaatgaagtctttccctggtgatggtcccctgccctgtctttccagcatccactctcccttgtcctcctgggggcatatctcagtcaggcagcggcttcctgatgatggtcgttggggtggttgtcatgtgatgggtcccctccaggttactaaagggtgcatgtcccctgcttgaacactgaagggcaggtggtgggccatggccatggtccccagctgaggagcaggtgtccctgagaacccaaacttcccagagagtatgtgagaaccaaccaatgaaaacagtcccatcgctcttacccggtaagtaaacagtcagaaaattagcatgaaagcagtttagcattgggaggaagctcagatctctagagctgtcttgtcgccgcccaggattgacctgtgtgtaagtcccaataaactcacctactcatcaa

SEQ ID NO: 447419 - DNA, 530 bp, Homo sapiens
acttacgcacaggtcaatcctgggcggcgacaagacatctctagagatctgagcttcctcccaatgctaaactgctttcatgctaattttctgactgtttacttcccagagagtatgtgagaaccaaccaatgaaaacagtcccatcgctcttacccggtaagtaaacagtcagaaaattagcatgaaagcagtttagcattgggaggaagctcagatctctagagctgtcttgtcgccgcccaccactgctcgtgcaaggacaggttctcgctatattgcccaggccagtcttgaacacctgacttcaagcaatcctcttgcctctgcctccccacgtgctgcagttacaggcgcgagccaccatgccagcctgaatgttcgttgttgttgttgtttgagatggagtctcacccaggctggagtgcagtggcgcgatctcagctcactgcaacctctgcctcccgggttcaagcaattatcctgcccagccccccgagtagctgggattacagcgcccaccagcactcc

SEQ ID NO: 447420 - DNA, 3010 bp, Homo sapiens
  misc_feature (236)..(236): n is a, c, g, or t
gttgtgactttccctttcgaattcctcggtatatcttggggactggaggacctgtctggttattatacagacgcataactggaggtgggatccacacagctcagaacagctggatcttgctcagtctctgccaggggaagattccttgacttctggggtgatggagaagaaacaggctgtgctgtgtccctaatgggaaacgtggctgagacaggggagtgagaagggtgcgttgnagaatggtgcctgtggcatgatgccagctttgcaatcatgagattcaaaagccacactgtggaattgaggaggccctgcagcgacatggagggagctgctttgctgagagtctctgtcctctgcatctggatgagtgcacttttccttggtgtgggagtgagggcagaggaagctggagcgagggtgcaacaaaacgttccaagtgggacagatactggagatcctcaaagtaagcccctcggtgactgggctgctggcaccatggacccagagagcagtatctttattgaggatgccattaagtatttcaaggaaaaagtgagcacacagaatctgctactcctgctgactgataatgaggcctggaacggattcgtggctgctgctgaactgcccaggaatgaggcagatgagctccgtaaagctctggacaaccttgcaagacaaatgatcatgaaagacaaaaactggcacgataaaggccagcagtacagaaactggtttctgaaagagtttcctcggttgaaaagtaagcttgaggataacataagaaggctccgtgcccttgcagatggggttcagaaggtccacaaaggcaccaccatcgccaatgtggtgtctggctctctcagcatttcctctggcatcctgaccctcgtcggcatgggtctggcacccttcacagagggaggcagccttgtactcttggaacctgggatggagttgggaatcacagcagctttgaccgggattaccagcagtaccatagactacggaaagaagtggtggacacaagcccaagcccacgacctggtcatcaaaagccttgacaaattgaaggaggtgaaggagtttttgggtgagaacatatccaactttctttccttagctggcaatacttaccaactcacacgaggcattgggaaggacatccgtgccctcagacgagccagagccaatcttcagtcagtaccgcatgcctcagcctcacgcccccgggtcactgagccaatctcagctgaaagcggtgaacaggtggagagggttaatgaacccagcatcctggaaatgagcagaggagtcaagctcacggatgtggcccctgtaagcttctttcttgtgctggatgtagtctacctcgtgtacgaatcaaagcacttacatgagggggcaaagtcagagacagctgaggagctgaagaaggtggctcaggagctggaggagaagctaaacattctcaacaataattataagattctgcaggcggaccaagaactgtgaccacagggcagggcagccaccaggagagatatgcctggcaggggccaggacaaaatgcaaacttttttttttttctgagacagagtcttgctctgtcgccaagttggagtgcaatggtgcgatctcagctcactgcaagctctgcctcccgtgttcaagcgattctcctgccttggcctcccaagtagctgggactacaggcgcctaccaccatgcccggctaatttttgtatttttaatagagatggggtttcaccatgttggccaggatggtctcgatctcctgacctcttgatctgcccaccttggcctcccaaagtgctgggattacaggcgtgagccatcgcttttgacccaaatgcaaacattttattagggggataaagagggtgaggtaaagtttatggaactgagtgttagggactttggcatttccatagctgagcacagcaggggaggggttaatgcagatggcagtgcagcaaggagaaggcaggaacattggagcctgcaataagggaaaaatgggaactggagagtgtggggaatgggaagaagcagtttactttagactaaagaatatattggggggccgggtgtagtggctcatgcctgtaatccgagcactttgggaggccaaggcgggcggatcacgaggtcaggagatcaagaccatcctggctagcacagtgaaaccccgtctctactaaaaatacaaaaaattagccgggcatggtggcgggcgcctgtagttccagctaactgggcggctgaggcaggagaatggcgtgaacctgggaggtggagcttgcagtgagccgagatatcgccactgcactccagcctgggtgacagagcgagactccatctcaaaaaaaaaaaaaaaaagaatatattgacggaagaatagagaggaggcttgaaggaaccagcaatgagaaggccaggaaaagaaagagctgaaaatggagaaagcccaagagttagaacagttggatacaggagaagaaacagcggctccactacagacccagccccaggttcaatgtcctccgaagaatgaagtctttccctggtgatggtcccctgccctgtctttccagcatccactctcccttgtcctcctgggggcatatctcagtcaggcagcggcttcctgatgatggtcgttggggtggttgtcatgtgatgggtcccctccaggttactaaagggtgcatgtcccctgcttgaacactgaagggcaggtggtgggccatggccatggtccccagctgaggagcaggtgtccctgagaacccaaacttcccagagagtatgtgagaaccaaccaatgaaaacagtcccatcgctcttacccggtaagtaaacagtcagaaaattagcatgaaagcagtttagcattgggaggaagctcagatctctagagctgtcttgtcgccgcccaggattgacctgtgtgtaagtcccaataaactcacctactcatcaa

SEQ ID NO: 447421 - DNA, 2920 bp, Homo sapiens
gacatactgtgctaggtgcgaggctgctcggtatatcttggggactggaggacctgtctggttattatacagacgcataactggaggtgggatccacacagctcagaacagctggatcttgctcagtctctgccaggggaagattccttggaggaggccctgcagcgacatggagggagctgctttgctgagagtctctgtcctctgcatctggatgagtgcacttttccttggtgtgggagtgagggcagaggaagctggagcgagggtgcaacaaaacgttccaagtgggacagatactggagatcctcaaagtaagcccctcggtgactgggctgctggcaccatggacccagagagcagtatctttattgaggatgccattaagtatttcaaggaaaaagtgagcacacagaatctgctactcctgctgactgataatgaggcctggaacggattcgtggctgctgctgaactgcccaggaatgaggcagatgagctccgtaaagctctggacaaccttgcaagacaaatgatcatgaaagacaaaaactggcacgataaaggccagcagtacagaaactggtttctgaaagagtttcctcggttgaaaagtaagcttgaggataacataagaaggctccgtgcccttgcagatggggttcagaaggtccacaaaggcaccaccatcgccaatgtggtgtctggctctctcagcatttcctctggcatcctgaccctcgtcggcatgggtctggcacccttcacagagggaggcagccttgtactcttggaacctgggatggagttgggaatcacagcagctttgaccgggattaccagcagtaccatagactacggaaagaagtggtggacacaagcccaagcccacgacctggtcatcaaaagccttgacaaattgaaggaggtgaaggagtttttgggtgagaacatatccaactttctttccttagctggcaatacttaccaactcacacgaggcattgggaaggacatccgtgccctcagacgagccagagccaatcttcagtcagtaccgcatgcctcagcctcacgcccccgggtcactgagccaatctcagctgaaagcggtgaacaggtggagagggttaatgaacccagcatcctggaaatgagcagaggagtcaagctcacggatgtggcccctgtaagcttctttcttgtgctggatgtagtctacctcgtgtacgaatcaaagcacttacatgagggggcaaagtcagagacagctgaggagctgaagaaggtggctcaggagctggaggagaagctaaacattctcaacaataattataagattctgcaggcggaccaagaactgtgaccacagggcagggcagccaccaggagagatatgcctggcaggggccaggacaaaatgcaaacttttttttttttctgagacagagtcttgctctgtcgccaagttggagtgcaatggtgcgatctcagctcactgcaagctctgcctcccgtgttcaagcgattctcctgccttggcctcccaagtagctgggactacaggcgcctaccaccatgcccggctaatttttgtatttttaatagagatggggtttcaccatgttggccaggatggtctcgatctcctgacctcttgatctgcccaccttggcctcccaaagtgctgggattacaggcgtgagccatcgcttttgacccaaatgcaaacattttattagggggataaagagggtgaggtaaagtttatggaactgagtgttagggactttggcatttccatagctgagcacagcaggggaggggttaatgcagatggcagtgcagcaaggagaaggcaggaacattggagcctgcaataagggaaaaatgggaactggagagtgtggggaatgggaagaagcagtttactttagactaaagaatatattggggggccgggtgtagtggctcatgcctgtaatccgagcactttgggaggccaaggcgggcggatcacgaggtcaggagatcaagaccatcctggctagcacagtgaaaccccgtctctactaaaaatacaaaaaattagccgggcatggtggcgggcgcctgtagttccagctaactgggcggctgaggcaggagaatggcgtgaacctgggaggtggagcttgcagtgagccgagatatcgccactgcactccagcctgggtgacagagcgagactccatctcaaaaaaaaaaaaaaaaagaatatattgacggaagaatagagaggaggcttgaaggaaccagcaatgagaaggccaggaaaagaaagagctgaaaatggagaaagcccaagagttagaacagttggatacaggagaagaaacagcggctccactacagacccagccccaggttcaatgtcctccgaagaatgaagtctttccctggtgatggtcccctgccctgtctttccagcatccactctcccttgtcctcctgggggcatatctcagtcaggcagcggcttcctgatgatggtcgttggggtggttgtcatgtgatgggtcccctccaggttactaaagggtgcatgtcccctgcttgaacactgaagggcaggtggtgggccatggccatggtccccagctgaggagcaggtgtccctgagaacccaaacttcccagagagtatgtgagaaccaaccaatgaaaacagtcccatcgctcttacccggtaagtaaacagtcagaaaattagcatgaaagcagtttagcattgggaggaagctcagatctctagagctgtcttgtcgccgcccaggattgacctgtgtgtaagtcccaataaactcacctactcatcaaaaaaaaaaaggggggggctaaaatacccgaagggccagttacgctacagtttctgtcaaggc

SEQ ID NO: 447422 - DNA, 3099 bp, Homo sapiens
gacatactgtgctaggtgcgaggctgctcggtatatcttggggactggaggacctgtctggttattatacagacgcataactggaggtgggatccacacagctcagaacagctggatcttgctcagtctctgccaggggaagattccttggaggaggccctgcagcgacatggagggagctgctttgctgagagtctctgtcctctgcatctggatgagtgcacttttccttggtgtgggagtgagggcagaggaagctggagcgagggtgcaacaaaacgttccaagtgggacagatactggagatcctcaaagtaagcccctcggtgactgggctgctggcaccatggacccagagagcagtatctttattgaggatgccattaagtatttcaaggaaaaagtgagcacacagaatctgctactcctgctgactgataatgaggcctggaacggattcgtggctgctgctgaactgcccaggaatgaggcagatgagctccgtaaagctctggacaaccttgcaagacaaatgatcatgaaagacaaaaactggcacgataaaggccagcagtacagaaactggtttctgaaagagtttcctcggttgaaaagtaagcttgaggataacataagaaggctccgtgcccttgcagatggggttcagaaggtccacaaaggcaccaccatcgccaatgtggtgtctggctctctcagcatttcctctggcatcctgaccctcgtcggcatgggtctggcacccttcacagagggaggcagccttgtactcttggaacctgggatggagttgggaatcacagcagctttgaccgggattaccagcagtaccatagactacggaaagaagtggtggacacaagcccaagcccacgacctggtcatcaaaagccttgacaaattgaaggaggtgaaggagtttttgggtgagaacatatccaactttctttccttagctggcaatacttaccaactcacacgaggcattgggaaggacatccgtgccctcagacgagccagagccaatcttcagtcagtaccgcatgcctcagcctcacgcccccgggtcactgagccaatctcagctgaaagcggtgaacaggtggagagggttaatgaacccagcatcctggaaatgagcagaggagtcaagctcacggatgtggcccctgtaagcttctttcttgtgctggatgtagtctacctcgtgtacgaatcaaagcacttacatgagggggcaaagtcagagacagctgaggagctgaagaaggtggctcaggagctggaggagaagctaaacattctcaacaataattataagattctgcaggcggaccaagaactgtgaccacagggcagggcagccaccaggagagatatgcctggcaggggccaggacaaaatgcaaacttttttttttttctgagacagagtcttgctctgtcgccaagttggagtgcaatggtgcgatctcagctcactgcaagctctgcctcccgtgttcaagcgattctcctgccttggcctcccaagtagctgggactacaggcgcctaccaccatgcccggctaatttttgtatttttaatagagatggggtttcaccatgttggccaggatggtctcgatctcctgacctcttgatctgcccaccttggcctcccaaagtgctgggattacaggcgtgagccatcgcttttgacccaaatgcaaacattttattagggggataaagagggtgaggtaaagtttatggaactgagtgttagggactttggcatttccatagctgagcacagcaggggaggggttaatgcagatggcagtgcagcaaggagaaggcaggaacattggagcctgcaataagggaaaaatgggaactggagagtgtggggaatgggaagaagcagtttactttagactaaagaatatattggggggccgggtgtagtggctcatgcctgtaatccgagcactttgggaggccaaggcgggcggatcacgaggtcaggagatcaagaccatcctggctagcacagtgaaaccccgtctctactaaaaatacaaaaaattagccgggcatggtggcgggcgcctgtagttccagctaactgggcggctgaggcaggagaatggcgtgaacctgggaggtggagcttgcagtgagccgagatatcgccactgcactccagcctgggtgacagagcgagactccatctcaaaaaaaaaaaaaaaaagaatatattgacggaagaatagagaggaggcttgaaggaaccagcaatgagaaggccaggaaaagaaagagctgaaaatggagaaagcccaagagttagaacagttggatacaggagaagaaacagcggctccactacagacccagccccaggttcaatgtcctccgaagaatgaagtctttccctggtgatggtcccctgccctgtctttccagcatccactctcccttgtcctcctgggggcatatctcagtcaggcagcggcttcctgatgatggtcgttggggtggttgtcatgtgatgggtcccctccaggttactaaagggtgcatgtcccctgcttgaacactgaagggcaggtggtgggccatggccatggtccccagctgaggagcaggtgtccctgagaacccaaacttcccagagagtatgtgagaaccaaccaatgaaaacagtcccatcgctcttacccggtaagtaaacagtcagaaaattagcatgaaagcagtttagcattgggaggaagctcagatctctagagctgtcttgtcgccgcccaccactgctcgtgcaaggacaggttctcgctatattgcccaggccagtcttgaacacctgacttcaagcaatcctcttgcctctgcctccccacgtgctgcagttacaggcgcgagccaccatgccagcctgaatgttcgttgttgttgttgtttgagatggagtctcacccaggctggagtgcagtggcgcgatctcagctcactgcaacctctgcctcccgggttcaagcaattatcctgcccagccccccgagtagctgggattacagcgcccaccagcactcc

SEQ ID NO: 447423 - DNA, 2897 bp, Homo sapiens
gacatactgtgctaggtgcgaggctgctcggtatatcttggggactggaggacctgtctggttattatacagacgcataactggaggtgggatccacacagctcagaacagctggatcttgctcagtctctgccaggggaagattccttggaggagcacactgtctcaacccctcttttcctgctcaaggaggaggccctgcagcgacatggagggagctgctttgctgagagtctctgtcctctgcatctggatgagtgcacttttccttggtgtgggagtgagggcagaggaagctggagcgagggtgcaacaaaacgttccaagtgggacagatactggagatcctcaaagtaagcccctcggtgactgggctgctggcaccatggacccagagagcagtatctttattgaggatgccattaagtatttcaaggaaaaagtgagcacacagaatctgctactcctgctgactgataatgaggcctggaacggattcgtggctgctgctgaactgcccaggaatgaggcagatgagctccgtaaagctctggacaaccttgcaagacaaatgatcatgaaagacaaaaactggcacgataaaggccagcagtacagaaactggtttctgaaagagtttcctcggttgaaaagtaagcttgaggataacataagaaggctccgtgcccttgcagatggggttcagaaggtccacaaaggcaccaccatcgccaatgtggtgtctggctctctcagcatttcctctggcatcctgaccctcgtcggcatgggtctggcacccttcacagagggaggcagccttgtactcttggaacctgggatggagttgggaatcacagcagctttgaccgggattaccagcagtaccatagactacggaaagaagtggtggacacaagcccaagcccacgacctggtcatcaaaagccttgacaaattgaaggaggtgaaggagtttttgggtgagaacatatccaactttctttccttagctggcaatacttaccaactcacacgaggcattgggaaggacatccgtgccctcagacgagccagagccaatcttcagtcagtaccgcatgcctcagcctcacgcccccgggtcactgagccaatctcagctgaaagcggtgaacaggtggagagggttaatgaacccagcatcctggaaatgagcagaggagtcaagctcacggatgtggcccctgtaagcttctttcttgtgctggatgtagtctacctcgtgtacgaatcaaagcacttacatgagggggcaaagtcagagacagctgaggagctgaagaaggtggctcaggagctggaggagaagctaaacattctcaacaataattataagattctgcaggcggaccaagaactgtgaccacagggcagggcagccaccaggagagatatgcctggcaggggccaggacaaaatgcaaacttttttttttttctgagacagagtcttgctctgtcgccaagttggagtgcaatggtgcgatctcagctcactgcaagctctgcctcccgtgttcaagcgattctcctgccttggcctcccaagtagctgggactacaggcgcctaccaccatgcccggctaatttttgtatttttaatagagatggggtttcaccatgttggccaggatggtctcgatctcctgacctcttgatctgcccaccttggcctcccaaagtgctgggattacaggcgtgagccatcgcttttgacccaaatgcaaacattttattagggggataaagagggtgaggtaaagtttatggaactgagtgttagggactttggcatttccatagctgagcacagcaggggaggggttaatgcagatggcagtgcagcaaggagaaggcaggaacattggagcctgcaataagggaaaaatgggaactggagagtgtggggaatgggaagaagcagtttactttagactaaagaatatattggggggccgggtgtagtggctcatgcctgtaatccgagcactttgggaggccaaggcgggcggatcacgaggtcaggagatcaagaccatcctggctagcacagtgaaaccccgtctctactaaaaatacaaaaaattagccgggcatggtggcgggcgcctgtagttccagctaactgggcggctgaggcaggagaatggcgtgaacctgggaggtggagcttgcagtgagccgagatatcgccactgcactccagcctgggtgacagagcgagactccatctcaaaaaaaaaaaaaaaaagaatatattgacggaagaatagagaggaggcttgaaggaaccagcaatgagaaggccaggaaaagaaagagctgaaaatggagaaagcccaagagttagaacagttggatacaggagaagaaacagcggctccactacagacccagccccaggttcaatgtcctccgaagaatgaagtctttccctggtgatggtcccctgccctgtctttccagcatccactctcccttgtcctcctgggggcatatctcagtcaggcagcggcttcctgatgatggtcgttggggtggttgtcatgtgatgggtcccctccaggttactaaagggtgcatgtcccctgcttgaacactgaagggcaggtggtgggccatggccatggtccccagctgaggagcaggtgtccctgagaacccaaacttcccagagagtatgtgagaaccaaccaatgaaaacagtcccatcgctcttacccggtaagtaaacagtcagaaaattagcatgaaagcagtttagcattgggaggaagctcagatctctagagctgtcttgtcgccgcccaggattgacctgtgtgtaagtcccaataaactcacctactcatcaa

SEQ ID NO: 447424 - DNA, 1208 bp, Homo sapiens
gacatactgtgctaggtgcgaggctgctcggtatatcttggggactggaggacctgtctggttattatacagacgcataactggaggtgggatccacacagctcagaacagctggatcttgctcagtctctgccaggggaagattccttggaggaggccctgcagcgacatggagggagctgctttgctgagagtctctgtcctctgcatctggatgagtgcacttttccttggtgtgggagtgagggcagaggaagctggagcgagggtgcaacaaaacgttccaagtgggacagatactggagatcctcaaagtaagcccctcggtgactgggctgctggcaccatggacccagagagcagtatctttattgaggatgccattaagtatttcaaggaaaaagtgagcacacagaatctgctactcctgctgactgataatgaggcctggaacggattcgtggctgctgctgaactgcccaggaatgaggcagatgagctccgtaaagctctggacaacgagcttgcagtgagccgagatatcgccactgcactccagcctgggtgacagagcgagactccatctcaaaaaaaaaaaaaaaaagaatatattgacggaagaatagagaggaggcttgaaggaaccagcaatgagaaggccaggaaaagaaagagctgaaaatggagaaagcccaagagttagaacagttggatacaggagaagaaacagcggctccactacagacccagccccaggttcaatgtcctccgaagaatgaagtctttccctggtgatggtcccctgccctgtctttccagcatccactctcccttgtcctcctgggggcatatctcagtcaggcagcggcttcctgatgatggtcgttggggtggttgtcatgtgatgggtcccctccaggttactaaagggtgcatgtcccctgcttgaacactgaagggcaggtggtgggccatggccatggtccccagctgaggagcaggtgtccctgagaacccaaacttcccagagagtatgtgagaaccaaccaatgaaaacagtcccatcgctcttacccggtaagtaaacagtcagaaaattagcatgaaagcagtttagcattgggaggaagctcagatctctagagctgtcttgtcgccgcccaggattgacctgtgtgtaagtcccaataaactcacctactcatcaa

SEQ ID NO: 447425 - DNA, 3384 bp, Homo sapiens
  misc_feature (264)..(265): n is a, c, g, or t
  misc_feature (862)..(862): n is a, c, g, or t
ctgcaggacagacaaacaagggggtagcttgcttgggtgaatggtggcaggaactaccgactagacatgtttaagatgagggctccatcttcgcttctctgccagccacgtgtacagtaagaaggggttacaataggcatatgggtgattttgtgcttttcgttcatcttttctgtgtttaaaatgttcagaataagaaattggaacaaaggagacatgaatagacaattcctaatcatctttaagagtccgctttgtgttttnnttaccaccaccactttgaaggctttcttgcctataccaggacaaactcagctctttatcccttttccgaattttcctggtactttcactttgaatatagcgcttaattaacattctgccttgtacctaggactaacacactataaattcccagaagacaaagtaggggaatacaataacaggatatagaattttaacagctaaattagatgaatttatgggtgacctttattgggcaaaagaaaatgttaagttagtataagatttagtataagctaccactcaaaactcagggtctcactggaagagaaagtgactccaggtagaattcctcagggagacattcacttccatcattcgctgaaccaggagctttggacagcctcggattgcacccgcatatccaaggacaccacatcagcggacaagtcataaacagccttgggaatacgcggaaaggtcaaatttacctaaacaattaaattctcttttaaattttaaggaaacacaagtatgctttcgctttaggtagggcatttgagagcaaaatgtactaatactttgaatccgccaagcagacacgatctgggtttgaccnttctctccgggtaaaggtgaaggctgaccacggggccgctctccctccagccccagccacgccctctaacccaggttcccgtcctgcaccgcgccgcaagtccccccaccgttcagcgcaaccggccctcccagccccgccgccgtccccctccccgccctggctctctttccgcgctgcggtcagcctcggcgtcccacagagagggccagaggtggaaacgcagaaaaccaaaccaggactatcagagattgcccggagaggggatgcgacccctccccaggtcgcagcgacggcgcacgcaagggtcacggagcatgcgttggctacccggcgccggggaccgctgccaccccgcctagcgcagcgccccgtccttccgcagcccaaccgcctcttcccgccccgccccatcccgcccacgggctccagtgggcgggaccagaggagtcccgcgttcggggagtatgtcaaggccgtgacccgtgtattattgtccgagtggccggaacgggagccaacatggcagcggggttcgggcgatgctgcagggtcctgagaagtatttctcgttttcattggagatcacagcatacaaaagccaatcgacaacgtgaaccaggattaggatttagttttgagttcaccgaacagcagaaagaatttcaagctactgctcgtaaatttgccagagaggaaatcatcccagtggctgcagaatatgataaaactggtgaatatccagtccccctaattagaagagcctgggaacttggtttaatgaacacacacattccagagaactgtggaggtcttggacttggaacttttgatgcttgtttaattagtgaagaattggcttatggatgtacaggggttcagactgctattgaaggaaattctttggggcaaatgcctattattattgctggaaatgatcaacaaaagaagaagtatttggggagaatgactgaggagccattgatgtgtgcttattgtgtaacagaacctggagcaggctctgatgtagctggtataaagaccaaagcagaaaagaaaggagatgagtatattattaatggtcagaagatgtggataaccaacggaggaaaagctaattggtattttttattggcacgttctgatccagatcctaaagctcctgctaataaagcctttactggattcattgtggaagcagataccccaggaattcagattgggagaaaggaattaaacatgggccagcgatgttcagatactagaggaattgtcttcgaagatgtgaaagtgcctaaagaaaatgttttaattggtgacggagctggtttcaaagttgcaatgggagcttttgataaaaccagacctgtagtagctgctggtgctgttggattagcacaaagagctttggatgaagctaccaagtatgccctggaaaggaaaactttcggaaagctacttgtagagcaccaagcaatatcatttatgctggctgaaatggcaatgaaagttgaactagctagaatgagttaccagagagcagcttgggaggttgattctggtcgtcgaaatacctattatgcttctattgcaaaggcatttgctggagatattgcaaatcagttagctactgatgctgtgcagatacttggaggcaatggatttaatacagaatatcctgtagaaaaactaatgagggatgccaaaatctatcagatttatgaaggtacttcacaaattcaaagacttattgtagcccgtgaacacattgacaagtacaaaaattaaaaaaattactgtagaaatattgaataactagaacacaagccactgtttcagctccagaaaaaagaaagggctttaacgttttttccagtgaaaacaaatcctcttatattaaatctaagcaactgcttattatagtagtttatacttttgcttaactctgttatgtctcttaagcaggtttggtttttattaaaatgatgtgttttctttagtaccactttacttgaattacattaacctagaaaactacataggttattttgatctcttaagattaatgtagcagaaatttcttggaattttatttttgtaatgacagaaaagtgggcttagaaagtattcaagatgttacaaaatttacatttagaaaatattgtagtatttgaatactgtcaacttgacagtaactttgtagacttaatggtattattaaagttctttttattgcagtttggaaagcatttgtgaaactttctgtttggcacagaaacagtcaaaattttgacattcatattctcctattttacagctacaagaactttcttgaaaatcttatttaattctgagcccatatttcacttaccttatttaaaataaatcaataaagcttgccttaaattatttttatatgactgttggtctctaggtagcctttggtctattgtacacaatctcatttcatatgtttgcattttggcaaagaacttaataaaattgttcagtgcttattatca

SEQ ID NO: 447426 - DNA, 3562 bp, Homo sapiens
  misc_feature (264)..(265): n is a, c, g, or t
  misc_feature (862)..(862): n is a, c, g, or t
ctgcaggacagacaaacaagggggtagcttgcttgggtgaatggtggcaggaactaccgactagacatgtttaagatgagggctccatcttcgcttctctgccagccacgtgtacagtaagaaggggttacaataggcatatgggtgattttgtgcttttcgttcatcttttctgtgtttaaaatgttcagaataagaaattggaacaaaggagacatgaatagacaattcctaatcatctttaagagtccgctttgtgttttnnttaccaccaccactttgaaggctttcttgcctataccaggacaaactcagctctttatcccttttccgaattttcctggtactttcactttgaatatagcgcttaattaacattctgccttgtacctaggactaacacactataaattcccagaagacaaagtaggggaatacaataacaggatatagaattttaacagctaaattagatgaatttatgggtgacctttattgggcaaaagaaaatgttaagttagtataagatttagtataagctaccactcaaaactcagggtctcactggaagagaaagtgactccaggtagaattcctcagggagacattcacttccatcattcgctgaaccaggagctttggacagcctcggattgcacccgcatatccaaggacaccacatcagcggacaagtcataaacagccttgggaatacgcggaaaggtcaaatttacctaaacaattaaattctcttttaaattttaaggaaacacaagtatgctttcgctttaggtagggcatttgagagcaaaatgtactaatactttgaatccgccaagcagacacgatctgggtttgaccnttctctccgggtaaaggtgaaggctgaccacggggccgctctccctccagccccagccacgccctctaacccaggttcccgtcctgcaccgcgccgcaagtccccccaccgttcagcgcaaccggccctcccagccccgccgccgtccccctccccgccctggctctctttccgcgctgcggtcagcctcggcgtcccacagagagggccagaggtggaaacgcagaaaaccaaaccaggactatcagagattgcccggagaggggatgcgacccctccccaggtcgcagcgacggcgcacgcaagggtcacggagcatgcgttggctacccggcgccggggaccgctgccaccccgcctagcgcagcgccccgtccttccgcagcccaaccgcctcttcccgccccgccccatcccgcccacgggctccagtgggcgggaccagaggagtcccgcgttcggggagtatgtcaaggccgtgacccgtgtattattgtccgagtggccggaacgggagccaacatggcagcggggttcgggcgatgctgcagggtcctgagaagtatttctcgttttcattggagatcacagcatacaaaagccaatcgacaacgtgaaccaggattaggatttagttttgagttcaccgaacagcagaaagaatttcaagctactgctcgtaaatttgccagagaggaaatcatcccagtggctgcagaatatgataaaactggtgaatatccagtccccctaattagaagagcctgggaacttggtttaatgaacacacacattccagagaactgtggaggtcttggacttggaacttttgatgcttgtttaattagtgaagaattggcttatggatgtacaggggttcagactgctattgaaggaaattctttggggcaaatgcctattattattgctggaaatgatcaacaaaagaagaagtatttggggagaatgactgaggagccattgatgtgtgcttattgtgtaacagaacctggagcaggctctgatgtagctggtataaagaccaaagcagaaaagaaaggagatgagtatattattaatggtcagaagatgtggataaccaacggaggaaaagctaattggtattttttattggcacgttctgatccagatcctaaagctcctgctaataaagcctttactggattcattgtggaagcagataccccaggaattcagattgggagaaaggaattaaacatgggccagcgatgttcagatactagaggaattgtcttcgaagatgtgaaagtgcctaaagaaaatgttttaattggtgacggagctggtttcaaagttgcaatgggagcttttgataaaaccagacctgtagtagctgctggtgctgttggattagcacaaagagctttggatgaagctaccaagtatgccctggaaaggaaaactttcggaaagctacttgtagagcaccaagcaatatcatttatgctggctgaaatggcaatgaaagttgaactagctagaatgagttaccagagagcagcttgggaggttgattctggtcgtcgaaatacctattatgcttctattgcaaaggcatttgctggagatattgcaaatcagttagctactgatgctgtgcagatacttggaggcaatggatttaatacagaatatcctgtagaaaaactaatgagggatgccaaaatctatcagatttatgaaggtacttcacaaattcaaagacttattgtagcccgtgaacacattgacaagtacaaaaattaaaaaaattactgtagaaatattgaataactagaacacaagccactgtttcagctccagaaaaaagaaagggctttaacgttttttccagtgaaaacaaatcctcttatattaaatctaagcaactgcttattatagtagtttatacttttgcttaactctgttatgtctcttaagcaggtttggtttttattaaaatgatgtgttttctttagtaccactttacttgaattacattaacctagaaaactacataggttattttgatctcttaagattaatgtagcagaaatttcttggaattttatttttgtaatgacagaaaagtgggcttagaaagtattcaagatgttacaaaatttacatttaatggtattattaaagttctttttattgcagtttggaaagcatttgtgaaactttctgtttggcacagaaacagtcaaaattttgacattcatattctcctattttacagctacaagaactttcttgaaaatcttatttaattctgagcccatatttcacttaccttatttaaaataaatcaataaagcttgccttaaattatttttatatgactgttggtctctaggtagcctttggtctattgtacacaatctcatttcatatgtttgcattttggcaaagaacttaataaaattgttcagtgcttattatcatatctttctgtattttttccaggaaatttcattacttcgtgtaatagtgtatatttcttgtatttactatgatgaaaaaaggtcgttttaattttgaattgaataaagttacctgttcattttttattagatattttaaagaccttcagaaaatataaatatgaaataattaaggaaaaaaaaaaacaataaaattggggggggggcccggtaccccaattcgcccttatag

SEQ ID NO: 447427 - DNA, 3296 bp, Homo sapiens
  misc_feature (264)..(265): n is a, c, g, or t
  misc_feature (862)..(862): n is a, c, g, or t
ctgcaggacagacaaacaagggggtagcttgcttgggtgaatggtggcaggaactaccgactagacatgtttaagatgagggctccatcttcgcttctctgccagccacgtgtacagtaagaaggggttacaataggcatatgggtgattttgtgcttttcgttcatcttttctgtgtttaaaatgttcagaataagaaattggaacaaaggagacatgaatagacaattcctaatcatctttaagagtccgctttgtgttttnnttaccaccaccactttgaaggctttcttgcctataccaggacaaactcagctctttatcccttttccgaattttcctggtactttcactttgaatatagcgcttaattaacattctgccttgtacctaggactaacacactataaattcccagaagacaaagtaggggaatacaataacaggatatagaattttaacagctaaattagatgaatttatgggtgacctttattgggcaaaagaaaatgttaagttagtataagatttagtataagctaccactcaaaactcagggtctcactggaagagaaagtgactccaggtagaattcctcagggagacattcacttccatcattcgctgaaccaggagctttggacagcctcggattgcacccgcatatccaaggacaccacatcagcggacaagtcataaacagccttgggaatacgcggaaaggtcaaatttacctaaacaattaaattctcttttaaattttaaggaaacacaagtatgctttcgctttaggtagggcatttgagagcaaaatgtactaatactttgaatccgccaagcagacacgatctgggtttgaccnttctctccgggtaaaggtgaaggctgaccacggggccgctctccctccagccccagccacgccctctaacccaggttcccgtcctgcaccgcgccgcaagtccccccaccgttcagcgcaaccggccctcccagccccgccgccgtccccctccccgccctggctctctttccgcgctgcggtcagcctcggcgtcccacagagagggccagaggtggaaacgcagaaaaccaaaccaggactatcagagattgcccggagaggggatgcgacccctccccaggtcgcagcgacggcgcacgcaagggtcacggagcatgcgttggctacccggcgccggggaccgctgccaccccgcctagcgcagcgccccgtccttccgcagcccaaccgcctcttcccgccccgccccatcccgcccacgggctccagtgggcgggaccagaggagtcccgcgttcggggagtatgtcaaggccgtgacccgtgtattattgtccgagtggccggaacgggagccaacatggcagcggggttcgggcgatgctgcaggagttcaccgaacagcagaaagaatttcaagctactgctcgtaaatttgccagagaggaaatcatcccagtggctgcagaatatgataaaactggtgaatatccagtccccctaattagaagagcctgggaacttggtttaatgaacacacacattccagagaactgtggaggtcttggacttggaacttttgatgcttgtttaattagtgaagaattggcttatggatgtacaggggttcagactgctattgaaggaaattctttggggcaaatgcctattattattgctggaaatgatcaacaaaagaagaagtatttggggagaatgactgaggagccattgatgtgtgcttattgtgtaacagaacctggagcaggctctgatgtagctggtataaagaccaaagcagaaaagaaaggagatgagtatattattaatggtcagaagatgtggataaccaacggaggaaaagctaattggtattttttattggcacgttctgatccagatcctaaagctcctgctaataaagcctttactggattcattgtggaagcagataccccaggaattcagattgggagaaaggaattaaacatgggccagcgatgttcagatactagaggaattgtcttcgaagatgtgaaagtgcctaaagaaaatgttttaattggtgacggagctggtttcaaagttgcaatgggagcttttgataaaaccagacctgtagtagctgctggtgctgttggattagcacaaagagctttggatgaagctaccaagtatgccctggaaaggaaaactttcggaaagctacttgtagagcaccaagcaatatcatttatgctggctgaaatggcaatgaaagttgaactagctagaatgagttaccagagagcagcttgggaggttgattctggtcgtcgaaatacctattatgcttctattgcaaaggcatttgctggagatattgcaaatcagttagctactgatgctgtgcagatacttggaggcaatggatttaatacagaatatcctgtagaaaaactaatgagggatgccaaaatctatcagatttatgaaggtacttcacaaattcaaagacttattgtagcccgtgaacacattgacaagtacaaaaattaaaaaaattactgtagaaatattgaataactagaacacaagccactgtttcagctccagaaaaaagaaagggctttaacgttttttccagtgaaaacaaatcctcttatattaaatctaagcaactgcttattatagtagtttatacttttgcttaactctgttatgtctcttaagcaggtttggtttttattaaaatgatgtgttttctttagtaccactttacttgaattacattaacctagaaaactacataggttattttgatctcttaagattaatgtagcagaaatttcttggaattttatttttgtaatgacagaaaagtgggcttagaaagtattcaagatgttacaaaatttacatttagaaaatattgtagtatttgaatactgtcaacttgacagtaactttgtagacttaatggtattattaaagttctttttattgcagtttggaaagcatttgtgaaactttctgtttggcacagaaacagtcaaaattttgacattcatattctcctattttacagctacaagaactttcttgaaaatcttatttaattctgagcccatatttcacttaccttatttaaaataaatcaataaagcttgccttaaattatttttatatgactgttggtctctaggtagcctttggtctattgtacacaatctcatttcatatgtttgcattttggcaaagaacttaataaaattgttcagtgcttattatca

SEQ ID NO: 447428 - DNA, 3342 bp, Homo sapiens
  misc_feature (264)..(265): n is a, c, g, or t
  misc_feature (862)..(862): n is a, c, g, or t
ctgcaggacagacaaacaagggggtagcttgcttgggtgaatggtggcaggaactaccgactagacatgtttaagatgagggctccatcttcgcttctctgccagccacgtgtacagtaagaaggggttacaataggcatatgggtgattttgtgcttttcgttcatcttttctgtgtttaaaatgttcagaataagaaattggaacaaaggagacatgaatagacaattcctaatcatctttaagagtccgctttgtgttttnnttaccaccaccactttgaaggctttcttgcctataccaggacaaactcagctctttatcccttttccgaattttcctggtactttcactttgaatatagcgcttaattaacattctgccttgtacctaggactaacacactataaattcccagaagacaaagtaggggaatacaataacaggatatagaattttaacagctaaattagatgaatttatgggtgacctttattgggcaaaagaaaatgttaagttagtataagatttagtataagctaccactcaaaactcagggtctcactggaagagaaagtgactccaggtagaattcctcagggagacattcacttccatcattcgctgaaccaggagctttggacagcctcggattgcacccgcatatccaaggacaccacatcagcggacaagtcataaacagccttgggaatacgcggaaaggtcaaatttacctaaacaattaaattctcttttaaattttaaggaaacacaagtatgctttcgctttaggtagggcatttgagagcaaaatgtactaatactttgaatccgccaagcagacacgatctgggtttgaccnttctctccgggtaaaggtgaaggctgaccacggggccgctctccctccagccccagccacgccctctaacccaggttcccgtcctgcaccgcgccgcaagtccccccaccgttcagcgcaaccggccctcccagccccgccgccgtccccctccccgccctggctctctttccgcgctgcggtcagcctcggcgtcccacagagagggccagaggtggaaacgcagaaaaccaaaccaggactatcagagattgcccggagaggggatgcgacccctccccaggtcgcagcgacggcgcacgcaagggtcacggagcatgcgttggctacccggcgccggggaccgctgccaccccgcctagcgcagcgccccgtccttccgcagcccaaccgcctcttcccgccccgccccatcccgcccacgggctccagtgggcgggaccagaggagtcccgcgttcggggagtatgtcaaggccgtgacccgtgtattattgtccgagtggccggaacgggagccaacatggcagcggggttcgggcgatgctgcagggtcctgagaagtatttctcgttttcattggagatcacagcatacaaaagccaatcgacaacgtgaaccaggattaggatttagttttgagttcaccgaacagcagaaagaatttcaagctactgctcgtaaatttgccagagaggaaatcatcccagtggctgcagaatatgataaaactggtgaaatgaacacacacattccagagaactgtggaggtcttggacttggaacttttgatgcttgtttaattagtgaagaattggcttatggatgtacaggggttcagactgctattgaaggaaattctttggggcaaatgcctattattattgctggaaatgatcaacaaaagaagaagtatttggggagaatgactgaggagccattgatgtgtgcttattgtgtaacagaacctggagcaggctctgatgtagctggtataaagaccaaagcagaaaagaaaggagatgagtatattattaatggtcagaagatgtggataaccaacggaggaaaagctaattggtattttttattggcacgttctgatccagatcctaaagctcctgctaataaagcctttactggattcattgtggaagcagataccccaggaattcagattgggagaaaggaattaaacatgggccagcgatgttcagatactagaggaattgtcttcgaagatgtgaaagtgcctaaagaaaatgttttaattggtgacggagctggtttcaaagttgcaatgggagcttttgataaaaccagacctgtagtagctgctggtgctgttggattagcacaaagagctttggatgaagctaccaagtatgccctggaaaggaaaactttcggaaagctacttgtagagcaccaagcaatatcatttatgctggctgaaatggcaatgaaagttgaactagctagaatgagttaccagagagcagcttgggaggttgattctggtcgtcgaaatacctattatgcttctattgcaaaggcatttgctggagatattgcaaatcagttagctactgatgctgtgcagatacttggaggcaatggatttaatacagaatatcctgtagaaaaactaatgagggatgccaaaatctatcagatttatgaaggtacttcacaaattcaaagacttattgtagcccgtgaacacattgacaagtacaaaaattaaaaaaattactgtagaaatattgaataactagaacacaagccactgtttcagctccagaaaaaagaaagggctttaacgttttttccagtgaaaacaaatcctcttatattaaatctaagcaactgcttattatagtagtttatacttttgcttaactctgttatgtctcttaagcaggtttggtttttattaaaatgatgtgttttctttagtaccactttacttgaattacattaacctagaaaactacataggttattttgatctcttaagattaatgtagcagaaatttcttggaattttatttttgtaatgacagaaaagtgggcttagaaagtattcaagatgttacaaaatttacatttagaaaatattgtagtatttgaatactgtcaacttgacagtaactttgtagacttaatggtattattaaagttctttttattgcagtttggaaagcatttgtgaaactttctgtttggcacagaaacagtcaaaattttgacattcatattctcctattttacagctacaagaactttcttgaaaatcttatttaattctgagcccatatttcacttaccttatttaaaataaatcaataaagcttgccttaaattatttttatatgactgttggtctctaggtagcctttggtctattgtacacaatctcatttcatatgtttgcattttggcaaagaacttaataaaattgttcagtgcttattatca

SEQ ID NO: 447429 - DNA, 3283 bp, Homo sapiens
  misc_feature (264)..(265): n is a, c, g, or t
  misc_feature (862)..(862): n is a, c, g, or t
ctgcaggacagacaaacaagggggtagcttgcttgggtgaatggtggcaggaactaccgactagacatgtttaagatgagggctccatcttcgcttctctgccagccacgtgtacagtaagaaggggttacaataggcatatgggtgattttgtgcttttcgttcatcttttctgtgtttaaaatgttcagaataagaaattggaacaaaggagacatgaatagacaattcctaatcatctttaagagtccgctttgtgttttnnttaccaccaccactttgaaggctttcttgcctataccaggacaaactcagctctttatcccttttccgaattttcctggtactttcactttgaatatagcgcttaattaacattctgccttgtacctaggactaacacactataaattcccagaagacaaagtaggggaatacaataacaggatatagaattttaacagctaaattagatgaatttatgggtgacctttattgggcaaaagaaaatgttaagttagtataagatttagtataagctaccactcaaaactcagggtctcactggaagagaaagtgactccaggtagaattcctcagggagacattcacttccatcattcgctgaaccaggagctttggacagcctcggattgcacccgcatatccaaggacaccacatcagcggacaagtcataaacagccttgggaatacgcggaaaggtcaaatttacctaaacaattaaattctcttttaaattttaaggaaacacaagtatgctttcgctttaggtagggcatttgagagcaaaatgtactaatactttgaatccgccaagcagacacgatctgggtttgaccnttctctccgggtaaaggtgaaggctgaccacggggccgctctccctccagccccagccacgccctctaacccaggttcccgtcctgcaccgcgccgcaagtccccccaccgttcagcgcaaccggccctcccagccccgccgccgtccccctccccgccctggctctctttccgcgctgcggtcagcctcggcgtcccacagagagggccagaggtggaaacgcagaaaaccaaaccaggactatcagagattgcccggagaggggatgcgacccctccccaggtcgcagcgacggcgcacgcaagggtcacggagcatgcgttggctacccggcgccggggaccgctgccaccccgcctagcgcagcgccccgtccttccgcagcccaaccgcctcttcccgccccgccccatcccgcccacgggctccagtgggcgggaccagaggagtcccgcgttcggggagtatgtcaaggccgtgacccgtgtattattgtccgagtggccggaacgggagccaacatggcagcggggttcgggcgatgctgcagggtcctgagaagtatttctcgttttcattggagatcacagcatacaaaagccaatcgacaacgtgaaccaggattaggatttagttttgagttcaccgaacagcagaaagaatttcaagctactgctcgtaaatttgccagagaggaaatcatcccagtggctgcagaatatgataaaactggtgaatatccagtccccctaattagaagagcctgggaacttggtttaatgaacacacacattccagagaactgtgcaaatgcctattattattgctggaaatgatcaacaaaagaagaagtatttggggagaatgactgaggagccattgatgtgtgcttattgtgtaacagaacctggagcaggctctgatgtagctggtataaagaccaaagcagaaaagaaaggagatgagtatattattaatggtcagaagatgtggataaccaacggaggaaaagctaattggtattttttattggcacgttctgatccagatcctaaagctcctgctaataaagcctttactggattcattgtggaagcagataccccaggaattcagattgggagaaaggaattaaacatgggccagcgatgttcagatactagaggaattgtcttcgaagatgtgaaagtgcctaaagaaaatgttttaattggtgacggagctggtttcaaagttgcaatgggagcttttgataaaaccagacctgtagtagctgctggtgctgttggattagcacaaagagctttggatgaagctaccaagtatgccctggaaaggaaaactttcggaaagctacttgtagagcaccaagcaatatcatttatgctggctgaaatggcaatgaaagttgaactagctagaatgagttaccagagagcagcttgggaggttgattctggtcgtcgaaatacctattatgcttctattgcaaaggcatttgctggagatattgcaaatcagttagctactgatgctgtgcagatacttggaggcaatggatttaatacagaatatcctgtagaaaaactaatgagggatgccaaaatctatcagatttatgaaggtacttcacaaattcaaagacttattgtagcccgtgaacacattgacaagtacaaaaattaaaaaaattactgtagaaatattgaataactagaacacaagccactgtttcagctccagaaaaaagaaagggctttaacgttttttccagtgaaaacaaatcctcttatattaaatctaagcaactgcttattatagtagtttatacttttgcttaactctgttatgtctcttaagcaggtttggtttttattaaaatgatgtgttttctttagtaccactttacttgaattacattaacctagaaaactacataggttattttgatctcttaagattaatgtagcagaaatttcttggaattttatttttgtaatgacagaaaagtgggcttagaaagtattcaagatgttacaaaatttacatttagaaaatattgtagtatttgaatactgtcaacttgacagtaactttgtagacttaatggtattattaaagttctttttattgcagtttggaaagcatttgtgaaactttctgtttggcacagaaacagtcaaaattttgacattcatattctcctattttacagctacaagaactttcttgaaaatcttatttaattctgagcccatatttcacttaccttatttaaaataaatcaataaagcttgccttaaattatttttatatgactgttggtctctaggtagcctttggtctattgtacacaatctcatttcatatgtttgcattttggcaaagaacttaataaaattgttcagtgcttattatca

SEQ ID NO: 447430 - DNA, 3222 bp, Homo sapiens
  misc_feature (264)..(265): n is a, c, g, or t
  misc_feature (862)..(862): n is a, c, g, or t
ctgcaggacagacaaacaagggggtagcttgcttgggtgaatggtggcaggaactaccgactagacatgtttaagatgagggctccatcttcgcttctctgccagccacgtgtacagtaagaaggggttacaataggcatatgggtgattttgtgcttttcgttcatcttttctgtgtttaaaatgttcagaataagaaattggaacaaaggagacatgaatagacaattcctaatcatctttaagagtccgctttgtgttttnnttaccaccaccactttgaaggctttcttgcctataccaggacaaactcagctctttatcccttttccgaattttcctggtactttcactttgaatatagcgcttaattaacattctgccttgtacctaggactaacacactataaattcccagaagacaaagtaggggaatacaataacaggatatagaattttaacagctaaattagatgaatttatgggtgacctttattgggcaaaagaaaatgttaagttagtataagatttagtataagctaccactcaaaactcagggtctcactggaagagaaagtgactccaggtagaattcctcagggagacattcacttccatcattcgctgaaccaggagctttggacagcctcggattgcacccgcatatccaaggacaccacatcagcggacaagtcataaacagccttgggaatacgcggaaaggtcaaatttacctaaacaattaaattctcttttaaattttaaggaaacacaagtatgctttcgctttaggtagggcatttgagagcaaaatgtactaatactttgaatccgccaagcagacacgatctgggtttgaccnttctctccgggtaaaggtgaaggctgaccacggggccgctctccctccagccccagccacgccctctaacccaggttcccgtcctgcaccgcgccgcaagtccccccaccgttcagcgcaaccggccctcccagccccgccgccgtccccctccccgccctggctctctttccgcgctgcggtcagcctcggcgtcccacagagagggccagaggtggaaacgcagaaaaccaaaccaggactatcagagattgcccggagaggggatgcgacccctccccaggtcgcagcgacggcgcacgcaagggtcacggagcatgcgttggctacccggcgccggggaccgctgccaccccgcctagcgcagcgccccgtccttccgcagcccaaccgcctcttcccgccccgccccatcccgcccacgggctccagtgggcgggaccagaggagtcccgcgttcggggagtatgtcaaggccgtgacccgtgtattattgtccgagtggccggaacgggagccaacatggcagcggggttcgggcgatgctgcagggtcctgagaagtatttctcgttttcattggagatcacagcatacaaaagccaatcgacaacgtgaaccaggattaggatttagttttgagttcaccgaacagcagaaagaatttcaagctactgctcgtaaatttgccagagaggaaatcatcccagtggctgcagaatatgataaaactggtgaatatccagtccccctaattagaagagcctgggaacttggtttaatgaacacacacattccagagaactgtggaggtcttggacttggaacttttgatgcttgtttaattagtgaagaattggcttatggatgtacaggggttcagactgctattgaaggaaattctttggggcaaatgcctattattattgctggaaatgatcaacaaaagaagaagtatttggggagaatgactgaggagccattgatgtgtgcttattgtgtaacagaacctggagcaggctctgatgtagctggtataaagaccaaagcagaaaagaaaggagatgagtatattattaatggtcagaagatgtggataaccaacggaggaaaagctaattggtattttttattggcacgttctgatccagatcctaaagctcctgctaataaagcctttactggattcattgtggaagcagataccccaggaattcagattgggagaaaggaattaaacatgggccagcgatgttcagatactagaggaattgtcttcgaagatgtgaaagtgcctaaagaaaatgttttaattggtgacggagctggtttcaaagttgcaatgggagcttttgataaaaccagacctgtagtagctgctggtgctgttggattagcacaaagagctttggatgaagctaccaagtatgccctggaaaggaaaactttcggaaagctacttgtagagcaccaagcaatatcatttatgctggctgaaatggcaatgaaagttgaactagctagaatgagttaccagagagcagcttgggaggttgattctggtcgtcgaaatacctattatgcttctattgcaaaggcatttgctggagatattgcaaatcagttagctactgatgctgtgcagatacttggaggcaatggatttaatacagaatatcctgtagaaaaactaatgagggatgccaaaatctatcaggtaaggttaaagatgatttttttggtttgcaaggagagagaatattcataaatgacaacgtggatttctgattatttagaaattttatgtccctagtagcaataaatgactgtcatatatggctgtgagccagtttttggaattaattaatagaaagaagaatgttatttgtgattaagtataagtctgaagagagaataggctaaaaaaaatggtacagacatgtgtattacgtttggattagatttctttgagttttaacagattggctaattgtaacccaaacttttctctccaaaaagtatgcatgtcatttaaaattaattattttgatttgaatcttgcctgacaactatttaatttattgtaactatacttggagtcaaaaaccaacatcaggagacagtgatgtagattaattccaaattaaattggtagtcaaaaaaacttaggaggaattcagtaaaaggaaatataaatgtgcatgttctctacatgtggcttaagtaattacttaataattaccacattcttgctcctcagtatctcttcccttgttccccctacacctagcaaattatttgactcatccagtcattggaaatactgagttcgaatcaaaatgctggagtgagaaggaatgt

SEQ ID NO: 447431 - DNA, 1349 bp, Homo sapiens
atcatcaacagtttagcttttctctgccatctgagaagatgaactaacgaatggctaaagttagaagtttagaatggaaataaggtctgactcttgaaatccttccagcatctttttctttagcaactctgttccacaggcagtgggagaaaaaaaaaaaattaagggtaagaataaaagactgaaggagacagctagctaagaacagttcagaaaattagacaaatattttggccacattaaactttagttttcccaaactttctgaaatgtaaatatcttttctttttttatattttgaagactcttctccaaaattttgataaatggctttttataataacttaaccaatctttagagaattccatattttcagactttcacaaaatcaggttttggaatctgtagaggctacagaccctatatatggtttgattcggttttatattacaacacagcttatgctactgtctaaaatgttgaataaatcaaagtatttatgtactaaagatatttaacctacacttatatttttcttgcagatttatgaaggtacttcacaaattcaaagacttattgtagcccgtgaacacattgacaagtacaaaaattaaaaaaattactgtagaaatattgaataactagaacacaagccactgtttcagctccagaaaaaagaaagggctttaacgttttttccagtgaaaacaaatcctcttatattaaatctaagcaactgcttattatagtagtttatacttttgcttaactctgttatgtctcttaagcaggtttggtttttattaaaatgatgtgttttctttagtaccactttacttgaattacattaacctagaaaactacataggttattttgatctcttaagattaatgtagcagaaatttcttggaattttatttttgtaatgacagaaaagtgggcttagaaagtattcaagatgttacaaaatttacatttagaaaatattgtagtatttgaatactgtcaacttgacagtaactttgtagacttaatggtattattaaagttctttttattgcagtttggaaagcatttgtgaaactttctgtttggcacagaaacagtcaaaattttgacattcatattctcctattttacagctacaagaactttcttgaaaatcttatttaattctgagcccatatttcacttaccttatttaaaataaatcaataaagcttgccttaaattatttttatatgactgttggtctctaggtagcctttggtctattgtacacaatctcatttcatatgtttgcattttggcaaagaacttaataaaattgttcagtgcttattatca

SEQ ID NO: 447432 - DNA, 1425 bp, Homo sapiens
atcatcaacagtttagcttttctctgccatctgagaagatgaactaacgaatggctaaagttagaagtttagaatggaaataaggtctgactcttgaaatccttccagcatctttttctttagcaactctgttccacaggcagtgggagaaaaaaaaaaaattaagggtaagaataaaagactgaaggagacagctagctaagaacagttcagaaaattagacaaatattttggccacattaaactttagttttcccaaactttctgaaatgtaaatatcttttctttttttatattttgaagactcttctccaaaattttgataaatggctttttataataacttaaccaatctttagagaattccatattttcagactttcacaaaatcaggttttggaatctgtagaggctacagaccctatatatggtttgattcggttttatattacaacacagcttatgctactgtctaaaatgttgaataaatcaaagtatttatgtactaaagatatttaacctacacttatatttttcttgcagatttatgaaggtacttcacaaattcaaagacttattgtagcccgtgaacacattgacaagtacaaaaattaaaaaaattactgtaggaaatattgaataactagaacacaagccactgtttcagctccagaaaaaagaaagggctttaacgttttttccagtaaatattgaataactagaacacaagccactgtttcagctccagaaaaaagaaagggctttaacgttttttccagtgaaaacaaatcctcttatattaaatctaagcaactgcttattatagtagtttatacttttgcttaactctgttatgtctcttaagcaggtttggtttttattaaaatgatgtgttttctttagtaccactttacttgaattacattaacctagaaaactacataggttattttgatctcttaagattaatgtagcagaaatttcttggaattttatttttgtaatgacagaaaagtgggcttagaaagtattcaagatgttacaaaatttacatttagaaaatattgtagtatttgaatactgtcaacttgacagtaactttgtagacttaatggtattattaaagttctttttattgcagtttggaaagcatttgtgaaactttctgtttggcacagaaacagtcaaaattttgacattcatattctcctattttacagctacaagaactttcttgaaaatcttatttaattctgagcccatatttcacttaccttatttaaaataaatcaataaagcttgccttaaattatttttatatgactgttggtctctaggtagcctttggtctattgtacacaatctcatttcatatgtttgcattttggcaaagaacttaataaaattgttcagtgcttattatca

SEQ ID NO: 447433 - DNA, 3616 bp, Homo sapiens
  misc_feature (264)..(265): n is a, c, g, or t
  misc_feature (862)..(862): n is a, c, g, or t
ctgcaggacagacaaacaagggggtagcttgcttgggtgaatggtggcaggaactaccgactagacatgtttaagatgagggctccatcttcgcttctctgccagccacgtgtacagtaagaaggggttacaataggcatatgggtgattttgtgcttttcgttcatcttttctgtgtttaaaatgttcagaataagaaattggaacaaaggagacatgaatagacaattcctaatcatctttaagagtccgctttgtgttttnnttaccaccaccactttgaaggctttcttgcctataccaggacaaactcagctctttatcccttttccgaattttcctggtactttcactttgaatatagcgcttaattaacattctgccttgtacctaggactaacacactataaattcccagaagacaaagtaggggaatacaataacaggatatagaattttaacagctaaattagatgaatttatgggtgacctttattgggcaaaagaaaatgttaagttagtataagatttagtataagctaccactcaaaactcagggtctcactggaagagaaagtgactccaggtagaattcctcagggagacattcacttccatcattcgctgaaccaggagctttggacagcctcggattgcacccgcatatccaaggacaccacatcagcggacaagtcataaacagccttgggaatacgcggaaaggtcaaatttacctaaacaattaaattctcttttaaattttaaggaaacacaagtatgctttcgctttaggtagggcatttgagagcaaaatgtactaatactttgaatccgccaagcagacacgatctgggtttgaccnttctctccgggtaaaggtgaaggctgaccacggggccgctctccctccagccccagccacgccctctaacccaggttcccgtcctgcaccgcgccgcaagtccccccaccgttcagcgcaaccggccctcccagccccgccgccgtccccctccccgccctggctctctttccgcgctgcggtcagcctcggcgtcccacagagagggccagaggtggaaacgcagaaaaccaaaccaggactatcagagattgcccggagaggggatgcgacccctccccaggtcgcagcgacggcgcacgcaagggtcacggagcatgcgttggctacccggcgccggggaccgctgccaccccgcctagcgcagcgccccgtccttccgcagcccaaccgcctcttcccgccccgccccatcccgcccacgggctccagtgggcgggaccagaggagtcccgcgttcggggagtatgtcaaggccgtgacccgtgtattattgtccgagtggccggaacgggagccaacatggcagcggggttcgggcgatgctgcagggtcctgagaagtatttctcgttttcattggagatcacagcatacaaaagccaatcgacaacgtgaaccaggattaggatttagttttgagttcaccgaacagcagaaagaatttcaagctactgctcgtaaatttgccagagaggaaatcatcccagtggctgcagaatatgataaaactggtgaatatccagtccccctaattagaagagcctgggaacttggtttaatgaacacacacattccagagaactgtggaggtcttggacttggaacttttgatgcttgtttaattagtgaagaattggcttatggatgtacaggggttcagactgctattgaaggaaattctttggggcaaatgcctattattattgctggaaatgatcaacaaaagaagaagtatttggggagaatgactgaggagccattgatgtgtgcttattgtgtaacagaacctggagcaggctctgatgtagctggtataaagaccaaagcagaaaagaaaggagatgagtatattattaatggtcagaagatgtggataaccaacggaggaaaagctaattggtattttttattggcacgttctgatccagatcctaaagctcctgctaataaagcctttactggattcattgtggaagcagataccccaggaattcagattgggagaaaggaattaaacatgggccagcgatgttcagatactagaggaattgtcttcgaagatgtgaaagtgcctaaagaaaatgttttaattggtgacggagctggtttcaaagttgcaatgggagcttttgataaaaccagacctgtagtagctgctggtgctgttggattagcacaaagagctttggatgaagctaccaagtatgccctggaaaggaaaactttcggaaagctacttgtagagcaccaagcaatatcatttatgctggctgaaatggcaatgaaagttgaactagctagaatgagttaccagagagcagcttgggaggttgattctggtcgtcgaaatacctattatgcttctattgcaaaggcatttgctggagatattgcaaatcagttagctactgatgctgtgcagatacttggaggcaatggatttaatacagaatatcctgtagaaaaactaatgagggatgccaaaatctatcagatttatgaaggtacttcacaaattcaaagacttattgtagcccgtgaacacattgacaagtacaaaaattaaaaaaattactgtagaaatattgaataactagaacacaagccactgtttcagctccagaaaaaagaaagggctttaacgttttttccagtgaaaacaaatcctcttatattaaatctaagcaactgcttattatagtagtttatacttttgcttaactctgttatgtctcttaagcaggtttggtttttattaaaatgatgtgttttctttagtaccactttacttgaattacattaacctagaaaactacataggttattttgatctcttaagattaatgtagcagaaatttcttggaattttatttttgtaatgacagaaaagtgggcttagaaagtattcaagatgttacaaaatttacatttagaaaatattgtagtatttgaatactgtcaacttgacagtaactttgtagacttaatggtattattaaagttctttttattgcagtttggaaagcatttgtgaaactttctgtttggcacagaaacagtcaaaattttgacattcatattctcctattttacagctacaagaactttcttgaaaatcttatttaattctgagcccatatttcacttaccttatttaaaataaatcaataaagcttgccttaaattatttttatatgactgttggtctctaggtagcctttggtctattgtacacaatctcatttcatatgtttgcattttggcaaagaacttaataaaattgttcagtgcttattatcatatctttctgtattttttccaggaaatttcattacttcgtgtaatagtgtatatttcttgtatttactatgatgaaaaaaggtcgttttaattttgaattgaataaagttacctgttcattttttattagatattttaaagaccttcagaaaatataaatatgaaataattaaggaaaaaaaaaaacaataaaattggggggggggcccggtaccccaattcgcccttatag

SEQ ID NO: 447434 - DNA, 3342 bp, Homo sapiens
  misc_feature (264)..(265): n is a, c, g, or t
  misc_feature (862)..(862): n is a, c, g, or t
ctgcaggacagacaaacaagggggtagcttgcttgggtgaatggtggcaggaactaccgactagacatgtttaagatgagggctccatcttcgcttctctgccagccacgtgtacagtaagaaggggttacaataggcatatgggtgattttgtgcttttcgttcatcttttctgtgtttaaaatgttcagaataagaaattggaacaaaggagacatgaatagacaattcctaatcatctttaagagtccgctttgtgttttnnttaccaccaccactttgaaggctttcttgcctataccaggacaaactcagctctttatcccttttccgaattttcctggtactttcactttgaatatagcgcttaattaacattctgccttgtacctaggactaacacactataaattcccagaagacaaagtaggggaatacaataacaggatatagaattttaacagctaaattagatgaatttatgggtgacctttattgggcaaaagaaaatgttaagttagtataagatttagtataagctaccactcaaaactcagggtctcactggaagagaaagtgactccaggtagaattcctcagggagacattcacttccatcattcgctgaaccaggagctttggacagcctcggattgcacccgcatatccaaggacaccacatcagcggacaagtcataaacagccttgggaatacgcggaaaggtcaaatttacctaaacaattaaattctcttttaaattttaaggaaacacaagtatgctttcgctttaggtagggcatttgagagcaaaatgtactaatactttgaatccgccaagcagacacgatctgggtttgaccnttctctccgggtaaaggtgaaggctgaccacggggccgctctccctccagccccagccacgccctctaacccaggttcccgtcctgcaccgcgccgcaagtccccccaccgttcagcgcaaccggccctcccagccccgccgccgtccccctccccgccctggctctctttccgcgctgcggtcagcctcggcgtcccacagagagggccagaggtggaaacgcagaaaaccaaaccaggactatcagagattgcccggagaggggatgcgacccctccccaggtcgcagcgacggcgcacgcaagggtcacggagcatgcgttggctacccggcgccggggaccgctgccaccccgcctagcgcagcgccccgtccttccgcagcccaaccgcctcttcccgccccgccccatcccgcccacgggctccagtgggcgggaccagaggagtcccgcgttcggggagtatgtcaaggccgtgacccgtgtattattgtccgagtggccggaacgggagccaacatggcagcggggttcgggcgatgctgcagggtcctgagaagtatttctcgttttcattggagatcacagcatacaaaagccaatcgacaacgtgaaccaggattaggatttagttttgagttcaccgaacagcagaaagaatttcaagctactgctcgtaaatttgccagagaggaaatcatcccagtggctgcagaatatgataaaactggtgaatatccagtccccctaattagaagagcctgggaacttggtttaatgaacacacacattccagagaactgtggaggtcttggacttggaacttttgatgcttgtttaattagtgaagaattggcttatggatgtacaggggttcagactgctattgaaggaaattctttggggcaaatgcctattattattgctggaaatgatcaacaaaagaagaagtatttggggagaatgactgaggagccattgatgtgtgcttattgtgtaacagaacctggagcaggctctgatgtagctggtataaagaccaaagcagaaaagaaaggagatgagtatattattaatggtcagaagatgtggataaccaacggaggaaaagctaattgtgctaataaagcctttactggattcattgtggaagcagataccccaggaattcagattgggagaaaggaattaaacatgggccagcgatgttcagatactagaggaattgtcttcgaagatgtgaaagtgcctaaagaaaatgttttaattggtgacggagctggtttcaaagttgcaatgggagcttttgataaaaccagacctgtagtagctgctggtgctgttggattagcacaaagagctttggatgaagctaccaagtatgccctggaaaggaaaactttcggaaagctacttgtagagcaccaagcaatatcatttatgctggctgaaatggcaatgaaagttgaactagctagaatgagttaccagagagcagcttgggaggttgattctggtcgtcgaaatacctattatgcttctattgcaaaggcatttgctggagatattgcaaatcagttagctactgatgctgtgcagatacttggaggcaatggatttaatacagaatatcctgtagaaaaactaatgagggatgccaaaatctatcagatttatgaaggtacttcacaaattcaaagacttattgtagcccgtgaacacattgacaagtacaaaaattaaaaaaattactgtagaaatattgaataactagaacacaagccactgtttcagctccagaaaaaagaaagggctttaacgttttttccagtgaaaacaaatcctcttatattaaatctaagcaactgcttattatagtagtttatacttttgcttaactctgttatgtctcttaagcaggtttggtttttattaaaatgatgtgttttctttagtaccactttacttgaattacattaacctagaaaactacataggttattttgatctcttaagattaatgtagcagaaatttcttggaattttatttttgtaatgacagaaaagtgggcttagaaagtattcaagatgttacaaaatttacatttagaaaatattgtagtatttgaatactgtcaacttgacagtaactttgtagacttaatggtattattaaagttctttttattgcagtttggaaagcatttgtgaaactttctgtttggcacagaaacagtcaaaattttgacattcatattctcctattttacagctacaagaactttcttgaaaatcttatttaattctgagcccatatttcacttaccttatttaaaataaatcaataaagcttgccttaaattatttttatatgactgttggtctctaggtagcctttggtctattgtacacaatctcatttcatatgtttgcattttggcaaagaacttaataaaattgttcagtgcttattatca

SEQ ID NO: 447435 - DNA, 3275 bp, Homo sapiens
  misc_feature (264)..(265): n is a, c, g, or t
  misc_feature (862)..(862): n is a, c, g, or t
ctgcaggacagacaaacaagggggtagcttgcttgggtgaatggtggcaggaactaccgactagacatgtttaagatgagggctccatcttcgcttctctgccagccacgtgtacagtaagaaggggttacaataggcatatgggtgattttgtgcttttcgttcatcttttctgtgtttaaaatgttcagaataagaaattggaacaaaggagacatgaatagacaattcctaatcatctttaagagtccgctttgtgttttnnttaccaccaccactttgaaggctttcttgcctataccaggacaaactcagctctttatcccttttccgaattttcctggtactttcactttgaatatagcgcttaattaacattctgccttgtacctaggactaacacactataaattcccagaagacaaagtaggggaatacaataacaggatatagaattttaacagctaaattagatgaatttatgggtgacctttattgggcaaaagaaaatgttaagttagtataagatttagtataagctaccactcaaaactcagggtctcactggaagagaaagtgactccaggtagaattcctcagggagacattcacttccatcattcgctgaaccaggagctttggacagcctcggattgcacccgcatatccaaggacaccacatcagcggacaagtcataaacagccttgggaatacgcggaaaggtcaaatttacctaaacaattaaattctcttttaaattttaaggaaacacaagtatgctttcgctttaggtagggcatttgagagcaaaatgtactaatactttgaatccgccaagcagacacgatctgggtttgaccnttctctccgggtaaaggtgaaggctgaccacggggccgctctccctccagccccagccacgccctctaacccaggttcccgtcctgcaccgcgccgcaagtccccccaccgttcagcgcaaccggccctcccagccccgccgccgtccccctccccgccctggctctctttccgcgctgcggtcagcctcggcgtcccacagagagggccagaggtggaaacgcagaaaaccaaaccaggactatcagagattgcccggagaggggatgcgacccctccccaggtcgcagcgacggcgcacgcaagggtcacggagcatgcgttggctacccggcgccggggaccgctgccaccccgcctagcgcagcgccccgtccttccgcagcccaaccgcctcttcccgccccgccccatcccgcccacgggctccagtgggcgggaccagaggagtcccgcgttcggggagtatgtcaaggccgtgacccgtgtattattgtccgagtggccggaacgggagccaacatggcagcggggttcgggcgatgctgcagggtcctgagaagtatttctcgttttcattggagatcacagcatacaaaagccaatcgacaacgtgaaccaggattaggatttagttttgagttcaccgaacagcagaaagaatttcaagctactgctcgtaaatttgccagagaggaaatcatcccagtggctgcagaatatgataaaactggtgaatatccagtccccctaattagaagagcctgggaacttggtttaatgaacacacacattccagagaactgtggaggtcttggacttggaacttttgatgcttgtttaattagtgaagaattggcttatggatgtacaggggttcagactgctattgaaggaaattctttggggcaaatgcctattattattgctggaaatgatcaacaaaagaagaagtatttggggagaatgactgaggagccattgatgtgtgcttattgtgtaacagaacctggagcaggctctgatgtagctggtataaagaccaaagcagaaaagaaaggagatgagtatattattaatggtcagaagatgtggataaccaacggaggaaaagctaattggaattaaacatgggccagcgatgttcagatactagaggaattgtcttcgaagatgtgaaagtgcctaaagaaaatgttttaattggtgacggagctggtttcaaagttgcaatgggagcttttgataaaaccagacctgtagtagctgctggtgctgttggattagcacaaagagctttggatgaagctaccaagtatgccctggaaaggaaaactttcggaaagctacttgtagagcaccaagcaatatcatttatgctggctgaaatggcaatgaaagttgaactagctagaatgagttaccagagagcagcttgggaggttgattctggtcgtcgaaatacctattatgcttctattgcaaaggcatttgctggagatattgcaaatcagttagctactgatgctgtgcagatacttggaggcaatggatttaatacagaatatcctgtagaaaaactaatgagggatgccaaaatctatcagatttatgaaggtacttcacaaattcaaagacttattgtagcccgtgaacacattgacaagtacaaaaattaaaaaaattactgtagaaatattgaataactagaacacaagccactgtttcagctccagaaaaaagaaagggctttaacgttttttccagtgaaaacaaatcctcttatattaaatctaagcaactgcttattatagtagtttatacttttgcttaactctgttatgtctcttaagcaggtttggtttttattaaaatgatgtgttttctttagtaccactttacttgaattacattaacctagaaaactacataggttattttgatctcttaagattaatgtagcagaaatttcttggaattttatttttgtaatgacagaaaagtgggcttagaaagtattcaagatgttacaaaatttacatttagaaaatattgtagtatttgaatactgtcaacttgacagtaactttgtagacttaatggtattattaaagttctttttattgcagtttggaaagcatttgtgaaactttctgtttggcacagaaacagtcaaaattttgacattcatattctcctattttacagctacaagaactttcttgaaaatcttatttaattctgagcccatatttcacttaccttatttaaaataaatcaataaagcttgccttaaattatttttatatgactgttggtctctaggtagcctttggtctattgtacacaatctcatttcatatgtttgcattttggcaaagaacttaataaaattgttcagtgcttattatca

SEQ ID NO: 447436 - DNA, 3245 bp, Homo sapiens
  misc_feature (264)..(265): n is a, c, g, or t
  misc_feature (862)..(862): n is a, c, g, or t
ctgcaggacagacaaacaagggggtagcttgcttgggtgaatggtggcaggaactaccgactagacatgtttaagatgagggctccatcttcgcttctctgccagccacgtgtacagtaagaaggggttacaataggcatatgggtgattttgtgcttttcgttcatcttttctgtgtttaaaatgttcagaataagaaattggaacaaaggagacatgaatagacaattcctaatcatctttaagagtccgctttgtgttttnnttaccaccaccactttgaaggctttcttgcctataccaggacaaactcagctctttatcccttttccgaattttcctggtactttcactttgaatatagcgcttaattaacattctgccttgtacctaggactaacacactataaattcccagaagacaaagtaggggaatacaataacaggatatagaattttaacagctaaattagatgaatttatgggtgacctttattgggcaaaagaaaatgttaagttagtataagatttagtataagctaccactcaaaactcagggtctcactggaagagaaagtgactccaggtagaattcctcagggagacattcacttccatcattcgctgaaccaggagctttggacagcctcggattgcacccgcatatccaaggacaccacatcagcggacaagtcataaacagccttgggaatacgcggaaaggtcaaatttacctaaacaattaaattctcttttaaattttaaggaaacacaagtatgctttcgctttaggtagggcatttgagagcaaaatgtactaatactttgaatccgccaagcagacacgatctgggtttgaccnttctctccgggtaaaggtgaaggctgaccacggggccgctctccctccagccccagccacgccctctaacccaggttcccgtcctgcaccgcgccgcaagtccccccaccgttcagcgcaaccggccctcccagccccgccgccgtccccctccccgccctggctctctttccgcgctgcggtcagcctcggcgtcccacagagagggccagaggtggaaacgcagaaaaccaaaccaggactatcagagattgcccggagaggggatgcgacccctccccaggtcgcagcgacggcgcacgcaagggtcacggagcatgcgttggctacccggcgccggggaccgctgccaccccgcctagcgcagcgccccgtccttccgcagcccaaccgcctcttcccgccccgccccatcccgcccacgggctccagtgggcgggaccagaggagtcccgcgttcggggagtatgtcaaggccgtgacccgtgtattattgtccgagtggccggaacgggagccaacatggcagcggggttcgggcgatgctgcaggagttcaccgaacagcagaaagaatttcaagctactgctcgtaaatttgccagagaggaaatcatcccagtggctgcagaatatgataaaactggtgaaaaacattttgatactgtaggaggtcttggacttggaacttttgatgcttgtttaattagtgaagaattggcttatggatgtacaggggttcagactgctattgaaggaaattctttggggcaaatgcctattattattgctggaaatgatcaacaaaagaagaagtatttggggagaatgactgaggagccattgatgtgtgcttattgtgtaacagaacctggagcaggctctgatgtagctggtataaagaccaaagcagaaaagaaaggagatgagtatattattaatggtcagaagatgtggataaccaacggaggaaaagctaattggtattttttattggcacgttctgatccagatcctaaagctcctgctaataaagcctttactggattcattgtggaagcagataccccaggaattcagattgggagaaaggaattaaacatgggccagcgatgttcagatactagaggaattgtcttcgaagatgtgaaagtgcctaaagaaaatgttttaattggtgacggagctggtttcaaagttgcaatgggagcttttgataaaaccagacctgtagtagctgctggtgctgttggattagcacaaagagctttggatgaagctaccaagtatgccctggaaaggaaaactttcggaaagctacttgtagagcaccaagcaatatcatttatgctggctgaaatggcaatgaaagttgaactagctagaatgagttaccagagagcagcttgggaggttgattctggtcgtcgaaatacctattatgcttctattgcaaaggcatttgctggagatattgcaaatcagttagctactgatgctgtgcagatacttggaggcaatggatttaatacagaatatcctgtagaaaaactaatgagggatgccaaaatctatcagatttatgaaggtacttcacaaattcaaagacttattgtagcccgtgaacacattgacaagtacaaaaattaaaaaaattactgtagaaatattgaataactagaacacaagccactgtttcagctccagaaaaaagaaagggctttaacgttttttccagtgaaaacaaatcctcttatattaaatctaagcaactgcttattatagtagtttatacttttgcttaactctgttatgtctcttaagcaggtttggtttttattaaaatgatgtgttttctttagtaccactttacttgaattacattaacctagaaaactacataggttattttgatctcttaagattaatgtagcagaaatttcttggaattttatttttgtaatgacagaaaagtgggcttagaaagtattcaagatgttacaaaatttacatttagaaaatattgtagtatttgaatactgtcaacttgacagtaactttgtagacttaatggtattattaaagttctttttattgcagtttggaaagcatttgtgaaactttctgtttggcacagaaacagtcaaaattttgacattcatattctcctattttacagctacaagaactttcttgaaaatcttatttaattctgagcccatatttcacttaccttatttaaaataaatcaataaagcttgccttaaattatttttatatgactgttggtctctaggtagcctttggtctattgtacacaatctcatttcatatgtttgcattttggcaaagaacttaataaaattgttcagtgcttattatca

SEQ ID NO: 447437 - DNA, 2003 bp, Homo sapiens
  misc_feature (264)..(265): n is a, c, g, or t
  misc_feature (862)..(862): n is a, c, g, or t
ctgcaggacagacaaacaagggggtagcttgcttgggtgaatggtggcaggaactaccgactagacatgtttaagatgagggctccatcttcgcttctctgccagccacgtgtacagtaagaaggggttacaataggcatatgggtgattttgtgcttttcgttcatcttttctgtgtttaaaatgttcagaataagaaattggaacaaaggagacatgaatagacaattcctaatcatctttaagagtccgctttgtgttttnnttaccaccaccactttgaaggctttcttgcctataccaggacaaactcagctctttatcccttttccgaattttcctggtactttcactttgaatatagcgcttaattaacattctgccttgtacctaggactaacacactataaattcccagaagacaaagtaggggaatacaataacaggatatagaattttaacagctaaattagatgaatttatgggtgacctttattgggcaaaagaaaatgttaagttagtataagatttagtataagctaccactcaaaactcagggtctcactggaagagaaagtgactccaggtagaattcctcagggagacattcacttccatcattcgctgaaccaggagctttggacagcctcggattgcacccgcatatccaaggacaccacatcagcggacaagtcataaacagccttgggaatacgcggaaaggtcaaatttacctaaacaattaaattctcttttaaattttaaggaaacacaagtatgctttcgctttaggtagggcatttgagagcaaaatgtactaatactttgaatccgccaagcagacacgatctgggtttgaccnttctctccgggtaaaggtgaaggctgaccacggggccgctctccctccagccccagccacgccctctaacccaggttcccgtcctgcaccgcgccgcaagtccccccaccgttcagcgcaaccggccctcccagccccgccgccgtccccctccccgccctggctctctttccgcgctgcggtcagcctcggcgtcccacagagagggccagaggtggaaacgcagaaaaccaaaccaggactatcagagattgcccggagaggggatgcgacccctccccaggtcgcagcgacggcgcacgcaagggtcacggagcatgcgttggctacccggcgccggggaccgctgccaccccgcctagcgcagcgccccgtccttccgcagcccaaccgcctcttcccgccccgccccatcccgcccacgggctccagtgggcgggaccagaggagtcccgcgttcggggagtatgtcaaggccgtgacccgtgtattattgtccgagtggccggaacgggagccaacatggcagcggggttcgggcgatgctgcagggtcctgagaagtatttctcgttttcattggagatcacagcatacaaaagccaatcgacaacgtgaaccaggattaggatttagttttgagttcaccgaacagcagaaagaatttcaagctactgctcgtaaatttgccagagaggaaatcatcccagtggctgcagaatatgataaaactggtgaatatccagtccccctaattagaagagcctgggaacttggtttaatgaacacacacattccagagaactgtggtaagctttctttatatttttaatactggaatgcatatgagtaagaaaaattgtggaactctactcagtcatttttttcaaatatttcttgccattaaatgactttctacctttgtcttcctgctcagactacagtgtttgcccacttttggaagcttgcactctatacctagatgcgtttttccttcttctaactggttccaaccttaacttgcacctaaaccttggtaacttccgtttctagagttggtcaatttgttgtgttttattcctatcttctatattacattttattgagtcttttttgtgaactcatgattcttttcctcagac

SEQ ID NO: 447438 - DNA, 1087 bp, Homo sapiens
ccttgttcaaacagcacttacaggtggggacctgtttttgctaagtcatcctggggatgctcaaagctccattgttagatcctttctgtcctccttcctggctcctccttcctccccacccctctaataggctcataagtgggctcaggcctctctgcggggctcactctgcgcttcaccatggctttcattgccaagtccttctatgacctcagtgccatcagcctggatggggagaaggtagatttcaatacgttccggggcagggccgtgctgattgagaatgtggcttcgctctgaggcacaaccacccgggacttcacccagctcaacgagctgcaatgccgctttcccaggcgcctggtggtccttggcttcccttgcaaccaatttggacatcaggagaactgtcagaatgaggagatcctgaacagtctcaagtatgtccgtcctgggggtggataccagcccaccttcacccttgtccaaaaatgtgaggtgaatgggcagaacgagcatcctgtcttcgcctacctgaaggacaagctcccctacccttatgatgacccattttccctcatgaccgatcccaagctcatcatttggagccctgtgcgccgctcagatgtggcctggaactttgagaagttcctcatagggccggagggagagcccttccgacgctacagccgcaccttcccaaccatcaacattgagcctgacatcaagcgcctccttaaagttgccatatagatgtgaactgctcaacacacagatctcctactccatccagtcctgaggagccttaggatgcagcatgccttcaggagacactgctggacctcagcattcccttgatatcagtccccttcactgcagagccttgcctttcccctctgcctgtttccttttcctctcccaaccctctggttggtgattcaacttgggctccaagacttgggtaagctctgggccttcacagaatgatggcaccttcctaaaccctcatgggtggtgtctgagaggcgtgaagggcctggagccactctgctagaagagaccaataaagggcaggtgtggaaacggc

SEQ ID NO: 447439 - DNA, 1146 bp, Homo sapiens
  misc_feature (1099)..(1099): n is a, c, g, or t
ccttgttcaaacagcacttacaggtggggacctgtttttgctaagtcatcctggggatgctcaaagctccattgttagatcctttctgtcctccttcctggctcctccttcctccccacccctctaataggctcataagtgggctcaggcctctctgcggggctcactctgcgcttcaccatggctttcattgccaagtccttctatgacctcagtgccatcagcctggatggggagaaggtagatttcaatacgttccggggcagggccgtgctgattgagaatgtggcttcgctctgaggcacaaccacccgggacttcacccagctcaacgagctgcaatgccgctttcccaggcgcctggtggtccttggcttcccttgcaaccaatttggacatcaggagaactgtcagaatgaggagatcctgaacagtctcaagtatgtccgtcctgggggtggataccagcccaccttcacccttgtccaaaaatgtgaggtgaatgggcagaacgagcatcctgtcttcgcctacctgaaggacaagctcccctacccttatgatgacccattttccctcatgaccgatcccaagctcatcatttggagccctgtgcgccgctcagatgtggcctggaactttgagaagttcctcatagggccggagggagagcccttccgacgctacagccgcaccttcccaaccatcaacattgagcctgacatcaagcgcctccttaaagttgccatatagatgtgaactgctcaacacacagatctcctactccatccagtcctgaggagccttaggatgcagcatgccttcaggagacactgctggacctcagcattcccttgatatcagtccccttcactgcagagccttgcctttcccctctgcctgtttccttttcctctcccaaccctctggttggtgattcaacttgggctccaagacttgggtaagctctgggccttcacagaatgatggcaccttcctaaaccctcatgggtggtgtctgagaggcgtgaagggcctggagccactctgctagaagagaccaataaagggcaggtgtggaaacggcacaaaaaacacnaccaaacaaaaaaacacagggacacactataagagaggaggaaaagg

SEQ ID NO: 447440 - DNA, 510 bp, Homo sapiens
ccttgttcaaacagcacttacaggtggggacctgtttttgctaagtcatcctggggatgctcaaagctccattgttagatcctttctgtcctccttcctggctcctccttcctccccacccctctaataggctcataagtgggctcaggcctctctgcggggctcactctgcgcttcaccatggctttcattgccaagtccttctatgacctcagtgccatcagcctggatggggagaaggtagatttcaatacgttccggggcagggccgtgctgattgagaatgtggcttcgctctgaggcacaaccacccgggacttcacccagctcaacgagctgcaatgccgctttcccaggcgcctggtggtccttggcttcccttgcaaccaatttggacatcagaactgctcagggtagactggagacaaaagcaacagctcagaagtgctaaatcttgaagagcagccaaagcatgggcaacaaagtgagaccccatctctacaaaaaaaa

SEQ ID NO: 447441 - DNA, 481 bp, Homo sapiens
tgaacttgctctgctgttatggcacctgaaaactagatgttcttggatgggggtcttccttcatcaaagcttcttcccatttgtacttcagttctaggacaaggcaagaagaaagcaagaagctgtaaatcccattcctctgggtctcaatttcaccctcagttcaaggagctgagtaggcagaggcaaaggctatactcaacacacgtgcaattgaaagcaggcgaggcaaaaccagggcagaggaaaggaaaggggtgtgtgtgtaggtatggatttatgggtaggtgggtcggtaggttagttgaagaggaggttctaagcagtataacctaagcctcttttctctttcttctgcttcaaacaccttaagaactgctcagggtagactggagacaaaagcaacagctcagaagtgctaaatcttgaagagcagccaaagcatgggcaacaaagtgagaccccatctctacaaaaaaaa

SEQ ID NO: 447442 - DNA, 801 bp, Homo sapiens
  misc_feature (52)..(52): n is a, c, g, or t
  misc_feature (60)..(60): n is a, c, g, or t
  misc_feature (66)..(66): n is a, c, g, or t
  misc_feature (69)..(69): n is a, c, g, or t
  misc_feature (72)..(72): n is a, c, g, or t
  misc_feature (75)..(75): n is a, c, g, or t
aaggagagtttgtatcataagtaggtgttggattatgtcatatgcgtatgtnctgcatcnggtgantgntcnccnatccccggattggcgaccatttcaaccaatttggacatcaggagaactgtcagaatgaggagatcctgaacagtctcaagtatgtccgtcctgggggtggataccagcccaccttcacccttgtccaaaaatgtgaggtgaatgggcagaacgagcatcctgtcttcgcctacctgaaggacaagctcccctacccttatgatgacccattttccctcatgaccgatcccaagctcatcatttggagccctgtgcgccgctcagatgtggcctggaactttgagaagttcctcatagggccggagggagagcccttccgacgctacagccgcaccttcccaaccatcaacattgagcctgacatcaagcgcctccttaaagttgccatatagatgtgaactgctcaacacacagatctcctactccatccagtcctgaggagccttaggatgcagcatgccttcaggagacactgctggacctcagcattcccttgatatcagtccccttcactgcagagccttgcctttcccctctgcctgtttccttttcctctcccaaccctctggttggtgattcaacttgggctccaagacttgggtaagctctgggccttcacagaatgatggcaccttcctaaaccctcatgggtggtgtctgagaggcgtgaagggcctggagccactctgctagaagagaccaataaagggcaggtgtggaaacggc

SEQ ID NO: 447443 - DNA, 920 bp, Homo sapiens
ccttgttcaaacagcacttacaggtggggacctgtttttgctaagtcatcctggggatgctcaaagctccattgttagatcctttctgtcctccttcctggctcctccttcctccccacccctctaataggctcataagtgggctcaggcctctctgcggggctcactctgcgcttcaccatggctttcattgccaagtccttctatgacctcagtgccatcagcctggatgggggagaactgtcagaatgaggagatcctgaacagtctcaagtatgtccgtcctgggggtggataccagcccaccttcacccttgtccaaaaatgtgaggtgaatgggcagaacgagcatcctgtcttcgcctacctgaaggacaagctcccctacccttatgatgacccattttccctcatgaccgatcccaagctcatcatttggagccctgtgcgccgctcagatgtggcctggaactttgagaagttcctcatagggccggagggagagcccttccgacgctacagccgcaccttcccaaccatcaacattgagcctgacatcaagcgcctccttaaagttgccatatagatgtgaactgctcaacacacagatctcctactccatccagtcctgaggagccttaggatgcagcatgccttcaggagacactgctggacctcagcattcccttgatatcagtccccttcactgcagagccttgcctttcccctctgcctgtttccttttcctctcccaaccctctggttggtgattcaacttgggctccaagacttgggtaagctctgggccttcacagaatgatggcaccttcctaaaccctcatgggtggtgtctgagaggcgtgaagggcctggagccactctgctagaagagaccaataaagggcaggtgtggaaacggc

SEQ ID NO: 447444 - DNA, 755 bp, Homo sapiens
ctgcgattgctgttttcctgagggggctggtggtccttggctatacgttgatcatctatagtagatctaggagaactgtcagaatgaggagatcctgaacagtctcaagtatgtccgtcctgggggtggataccagcccaccttcacccttgtccaaaaatgtgaggtgaatgggcagaacgagcatcctgtcttcgcctacctgaaggacaagctcccctacccttatgatgacccattttccctcatgaccgatcccaagctcatcatttggagccctgtgcgccgctcagatgtggcctggaactttgagaagttcctcatagggccggagggagagcccttccgacgctacagccgcaccttcccaaccatcaacattgagcctgacatcaagcgcctccttaaagttgccatatagatgtgaactgctcaacacacagatctcctactccatccagtcctgaggagccttaggatgcagcatgccttcaggagacactgctggacctcagcattcccttgatatcagtccccttcactgcagagccttgcctttcccctctgcctgtttccttttcctctcccaaccctctggttggtgattcaacttgggctccaagacttgggtaagctctgggccttcacagaatgatggcaccttcctaaaccctcatgggtggtgtctgagaggcgtgaagggcctggagccactctgctagaagagaccaataaagggcaggtgtggaaacggc

SEQ ID NO: 447445 - DNA, 839 bp, Homo sapiens
ccttgttcaaacagcacttacaggtggggacctgtttttgctaagtcatcctggggatgctcaaagctccattgttagatcctttctgtcctccttcctggctcctccttcctccccacccctctaataggctcataagtgggctcaggcctctctgcggggctcactctgcgcttcaccatggctttcattgccaagtccttctatgacctcagtgccatcagcctggatggggagaaggtagatttcaatacgttccggggcagggccgtgctgattgagaatgtggcttcgctctgaggcacaaccacccgggacttcacccagctcaacgagctgcaatgccgctttcccaggcgcctggtggtccttggcttcccttgcaaccaatttggacatcaggagaactgtcagaatgaggagatcctgaacagtctcaagtatgtccgtcctgggggtggataccagcccaccttcacccttgtccaaaaatgtgaggtgaatgggcagaacgagcatcctgtcttcgcctacctgaaggacaagctcccctacccttatgatgacccattttccctcatgaccgatcccaagctcatcatttggagccctgtgcgccgctcagatgtggcctggaactttgagaagttcctcatagggccggagggagagcccttccgacgctacagccgcaccttcccaaccatcaacattgagcctgacatcaagcgcctccgaagcagttgccgcatccgaagcagttgccgcatccgaagcagttgccgtatccgaagcagttgccgcatccgaagcagttgccgcatccgaagcagttgccg

SEQ ID NO: 447446 - DNA, 361 bp, Homo sapiens
aaggctgaagcatcactggctgtgacaaacctgagcccaaactgttcactgctctcactgttcttccctaagttttctgtctggccttttctagagcaggagagacagaagtagcaaaccctctttcgagatgtccctccagccccagaagtacctccagcctcacaccatctcttcagcctagcaagttgctggagggagtctataacctaccaggagccagccagccatttgtatcaagaaatagaaatctgccagggtacagtggctcacacctataatcccagcgctttgggaggctaaggtaggcagattgcttgagctcaggagttcaagattagcctgagcaacatggtgaaac

SEQ ID NO: 447447 - DNA, 1297 bp, Homo sapiens
ccttgttcaaacagcacttacaggtggggacctgtttttgctaagtcatcctggggatgctcaaagctccattgttagatcctttctgtcctccttcctggctcctccttcctccccacccctctaataggctcataagtgggctcaggcctctctgcggggctcactctgcgcttcaccatggctttcattgccaagtccttctatgacctcagtgccatcagcctggatggggagaaggtagatttcaatacgttccggggcagggccgtgctgattgagaatgtggcttcgctctgaggcacaaccacccgggacttcacccagctcaacgagctgcaatgccgctttcccaggcgcctggtggtccttggcttcccttgcaaccaatttggacatcagagcaggagagacagaagtagcaaaccctctttcgagatgtccctccagccccagaagtacctccagcctcacaccatctcttcagcctagcaagttgctggagggagtctataacctaccaggagccagccagccatttgtatcaagaaatagaaatctgccagggtacagtggctcacacctataatcccagcgctttgggaggctaaggagaactgtcagaatgaggagatcctgaacagtctcaagtatgtccgtcctgggggtggataccagcccaccttcacccttgtccaaaaatgtgaggtgaatgggcagaacgagcatcctgtcttcgcctacctgaaggacaagctcccctacccttatgatgacccattttccctcatgaccgatcccaagctcatcatttggagccctgtgcgccgctcagatgtggcctggaactttgagaagttcctcatagggccggagggagagcccttccgacgctacagccgcaccttcccaaccatcaacattgagcctgacatcaagcgcctccttaaagttgccatatagatgtgaactgctcaacacacagatctcctactccatccagtcctgaggagccttaggatgcagcatgccttcaggagacactgctggacctcagcattcccttgatatcagtccccttcactgcagagccttgcctttcccctctgcctgtttccttttcctctcccaaccctctggttggtgattcaacttgggctccaagacttgggtaagctctgggccttcacagaatgatggcaccttcctaaaccctcatgggtggtgtctgagaggcgtgaagggcctggagccactctgctagaagagaccaataaagggcaggtgtggaaacggc

SEQ ID NO: 447448 - DNA, 922 bp, Homo sapiens
gcatggtggcctgtgtctgtagtctcagctactaaagaggctgaagcaggaggaatgcttgagcccagaagttcaaggctgcagtgagcaacacctcgtctgtcttgtctctctctctttcacagtgaaaaagaatgaccctggggagggagtgtaggagggtgaaagagtttcatgttgtggatctttctcttcccccacccactgtccacgcactttgtctttttcctcccctaggagaactgtcagaatgaggagatcctgaacagtctcaagtatgtccgtcctgggggtggataccagcccaccttcacccttgtccaaaaatgtgaggtgaatgggcagaacgagcatcctgtcttcgcctacctgaaggacaagctcccctacccttatgatgacccattttccctcatgaccgatcccaagctcatcatttggagccctgtgcgccgctcagatgtggcctggaactttgagaagttcctcatagggccggagggagagcccttccgacgctacagccgcaccttcccaaccatcaacattgagcctgacatcaagcgcctccttaaagttgccatatagatgtgaactgctcaacacacagatctcctactccatccagtcctgaggagccttaggatgcagcatgccttcaggagacactgctggacctcagcattcccttgatatcagtccccttcactgcagagccttgcctttcccctctgcctgtttccttttcctctcccaaccctctggttggtgattcaacttgggctccaagacttgggtaagctctgggccttcacagaatgatggcaccttcctaaaccctcatgggtggtgtctgagaggcgtgaagggcctggagccactctgctagaagagaccaataaagggcaggtgtggaaacggc

SEQ ID NO: 447449 - DNA, 787 bp, Homo sapiens
  misc_feature (23)..(23): n is a, c, g, or t
  misc_feature (690)..(690): n is a, c, g, or t
  misc_feature (703)..(704): n is a, c, g, or t
  misc_feature (712)..(712): n is a, c, g, or t
  misc_feature (719)..(719): n is a, c, g, or t
gggtagtagcgaggctgggtgtnaatcggccgaggggcaagatcctcagcgtggatggcaacaagatcaccatcatgcccaagcatgaggacctcaaggacatgttggagttcccagcccaggaacttagaaaatacttcaagatgggggaccacgtgaaggtgattgctggccgattcgagggcgacacaggcctcattgtgcgggtggaggagaatttcgttatcctgttctctgacctcaccatgcatgagctgaaggtgctcccccgggacctgcagctctgctcagagacagcatcaggtgtggatgttgggggccagcatgaatggggcgagctggtgcagctggatccccagactgtgggtgtcatcgtgcgactagaacgggagaccttccaggtgctgaacatgtacgggaaggtggtgactgtcagacatcaggctgtgacccggaagaaggacaaccgctttgctgtggccttggactcagagcagaacaacatccatgtgaaagacatcgttaaggtcattgatggcccccactcaggccgagaaggggagattcgccatctcttccgaagcttcgccttcctacattgcaagaaactggtggagaacgggggcatgtttgtctgcaagacccgccacctggtgctggctgggggctcaaagcccgtgatgtgaccanttcacgggtggtnnggctatgntcccggntagagccctgcccgtgtgggtccgtgggtttggcccgtggggggtggttcggcgggggggggactggg

SEQ ID NO: 447450 - DNA, 4491 bp, Homo sapiens
cgtcagccccagtcaggcgtcgtgcgaacagcagctggtaccgaaggcggaggtggagcccgagagcagcggaagatgtcggacagcgaggacagcaacttttccgaggaggaggacagcgagcgcagcagtgacggcgaggaggccgaggtagacgaagagcggcggagtgcagcgggcagtgagaaagaagaagagcctgaggacgaagaggaggaggaagaggaggaggaatatgatgaggaagaggaggaagaagatgatgaccgaccccccaagaaaccccgccatggaggcttcattctggacgaggctgatgttgacgatgagtatgaggacgaggaccagtgggaggatggagcagaggacattctagagaaagaagagattgaagcctccaatatcgataatgttgtcctggatgaagatcgttctggggctcgccgcctgcaaaacctctggagggaccagcgagaagaagaactgggcgagtattacatgaagaaatacgccaagtcatctgtgggagagacggtgtatggaggatctgatgagctctcagacgacatcacccagcagcagctgctcccaggagtcaaggatcccaatctgtggactgtcaaatgtaagattggggaggaacgggccacggccatttccttgatgcgcaagttcattgcctaccagttcacagacacgcccctgcagatcaagtcagtagtggcaccagagcatgtgaagggctacatctacgtggaggcctacaagcagacccacgtgaagcaggccattgagggggtgggcaacctgcggcttggctactggaaccagcagatggtgcccatcaaggagatgacagacgtgctcaaagtggtgaaggaggtggccaacctgaaaccaaagtcctgggtccgcctcaagcggggcatctacaaggatgacattgctcaggtggactacgtggagcccagccagaacaccatctccctgaagatgatcccacgcatcgactacgatcgcatcaaggcccgcatgagcttgaaagactggtttgccaaaaggaagaagtttaagcggcctccacagaggctgtttgatgctgagaagatcaggtccctggggggtgatgttgcctctgatggtgacttcctcatctttgaggggaaccgttacagccggaagggctttctgttcaagagcttcgccatgtctgctgtgatcacggagggtgtgaagccaacactctctgagctggaaaagtttgaggaccagccagagggcattgacctggaggtggtgactgagagcacagggaaggagcgggagcacaacttccaacctggggacaacgtggaggtctgtgagggtgagctcatcaacctgcagggcaagatcctcagcgtggatggcaacaagatcaccatcatgcccaagcatgaggacctcaaggacatgttggagttcccagcccaggaacttagaaaatacttcaagatgggggaccacgtgaaggtgattgctggccgattcgagggcgacacaggcctcattgtgcgggtggaggagaatttcgttatcctgttctctgacctcaccatgcatgagctgaaggtgctcccccgggacctgcagctctgctcagagacagcatcaggtgtggatgttgggggccagcatgaatggggcgagctggtgcagctggatccccagactgtgggtgtcatcgtgcgactagaacgggagaccttccaggtgctgaacatgtacgggaaggtggtgactgtcagacatcaggctgtgacccggaagaaggacaaccgctttgctgtggccttggactcagagcagaacaacatccatgtgaaagacatcgttaaggtcattgatggcccccactcaggccgagaaggggagattcgccatctcttccgaagcttcgccttcctacattgcaagaaactggtggagaacgggggcatgtttgtctgcaagacccgccacctggtgctggctgggggctcaaagccccgtgatgtgaccaacttcaccgtgggtggctttgcgcctatgagtccccggatcagcagccccatgcaccccagtgctggaggtcagcgtggcggctttggtagcccaggtggcggcagtggtggcatgagcaggggccggggccggagggacaacgaactcatcggccagaccgtgcgcatctcccaggggccctacaaaggctacatcggtgtggtgaaagatgccacagagtccacggcccgtgtggagctgcactccacctgccagaccatctctgtggaccgtcagcggctcaccacggtgggctcacggcgcccgggcggcatgacctcgacctatgggaggacgcccatgtatggctcccagacgcccatgtatggctctggctcccgaacacccatgtacggctcacagacacccctccaggatggtagccgcaccccacactacggctcacagacgcccctgcatgatggcagccgcactcctgcccagagtggggcctgggaccccaacaaccccaacacgccgtcacgggctgaggaagaatatgagtatgctttcgatgatgagcccaccccgtccccgcaggcctatgggggaacccccaatccccaaacacctggctacccagacccctcgtccccacaggtcaacccacaatacaacccgcagacgccagggacgccggccatgtacaacacagaccagttctctccctatgctgccccctccccacaaggttcctaccagcccagccccagcccccagagctaccaccaggtggcgccaagcccagcaggctaccagaatacccactccccagccagctaccaccctacaccgtcgcccatggcctatcaggctagccccagcccgagccccgttggctacagtcctatgacacctggagctccctcccctggtggctacaacccacacacgccaggctcaggcatcgagcagaactccagcgactgggtaaccactgacattcaggtgaaggtgcgggacacctacctggatacacaggtggtgggacagacaggtgtcatccgcagtgtcacggggggcatgtgctctgtgtacctgaaggacagtgagaaggttgtcagcatttccagtgagcacctggagcctatcacccccaccaagaacaacaaggtgaaagtgatcctgggcgaggatcgggaagccacgggcgtcctactgagcattgatggtgaggatggcattgtccgtatggaccttgatgagcagctcaagatcctcaacctccgcttcctggggaagctcctggaagcctgaagcaggcagggccggtggacttcgtcggatgaagagtgatcctccttccttccctggcccttggctgtgacacaagatcctcctgcagggctaggcggattgttctggatttccttttgtttttccttttagttttccatcttttccctccctggtgctcattggaatctgagtagagtctgggggagggtccccaccttcctgtacctcctccccacagcttgcttttgttgtaccgtctttcaataaaaagaagctgtttggtctaaaaaaaaaaaaaaaaaaaaaaaaacagaaaaaaaaaaaaagaagggggggctcaccagaactatatcctccttggggggcccctcacgcgagcaggaactactatgtgagtcgtcagggcccgccccctgcgaagggggggagaccacataggcaacgaggcagcggaggaacgaggggacactcacattgccgactgggaacgaccggagttgaatgcccgcatcggcgttggagagacacttccacagccagtgtgagtcgggccaatagaatgggagaggaggcgggacctaccaatgagctggcatgacctgacgacgggtgggatagtgacaatgaaacaaagggcgattgagaggatagcatggaggaaagcgctaacacacatgaacgtgggcggaacaatcccaaaaagggaacactactgagggacgccaccgcggggggggcaccccaaagtcgcaaggaacaaccaatcggcaacagagctggcaaaccacgaccacctcacaggccttggcaacaagaacaggtggggggggcagggacaacccctatctaggaagcgcgggagaaattaccgaaacaggggggggaacgtcgggggggtcgagggaccacggggggacccagcagagagggcgatgccggccacgggagacactagtatgaccactgcgggagcgctgaccaaacaaccggcgtcggaccaccccgacacgcggctgaaccagttactcggccacacgggagtagcccccaccaagccgtgagcaacgaaaccacgggcactgagagctccgccgcggaacggaaaaacccaagcgaccagcagagcaaaaacacgcccgctgaagaggcgcagtccgccacaagagagag

SEQ ID NO: 447451 - DNA, 4589 bp, Homo sapiens
cgtcagccccagtcaggcgtcgtgcgaacagcagctggtaccgaaggcggaggtggagcccgagagggaaccagcggggaaactgaggctcggggtggagcgcaggattgtgggacgcgccaaggctgctgtctttcccagcagcagcggaagatgtcggacagcgaggacagcaacttttccgaggaggaggacagcgagcgcagcagtgacggcgaggaggccgaggtagacgaagagcggcggagtgcagcgggcagtgagaaagaagaagagcctgaggacgaagaggaggaggaagaggaggaggaatatgatgaggaagaggaggaagaagatgatgaccgaccccccaagaaaccccgccatggaggcttcattctggacgaggctgatgttgacgatgagtatgaggacgaggaccagtgggaggatggagcagaggacattctagagaaagaagagattgaagcctccaatatcgataatgttgtcctggatgaagatcgttctggggctcgccgcctgcaaaacctctggagggaccagcgagaagaagaactgggcgagtattacatgaagaaatacgccaagtcatctgtgggagagacggtgtatggaggatctgatgagctctcagacgacatcacccagcagcagctgctcccaggagtcaaggatcccaatctgtggactgtcaaatgtaagattggggaggaacgggccacggccatttccttgatgcgcaagttcattgcctaccagttcacagacacgcccctgcagatcaagtcagtagtggcaccagagcatgtgaagggctacatctacgtggaggcctacaagcagacccacgtgaagcaggccattgagggggtgggcaacctgcggcttggctactggaaccagcagatggtgcccatcaaggagatgacagacgtgctcaaagtggtgaaggaggtggccaacctgaaaccaaagtcctgggtccgcctcaagcggggcatctacaaggatgacattgctcaggtggactacgtggagcccagccagaacaccatctccctgaagatgatcccacgcatcgactacgatcgcatcaaggcccgcatgagcttgaaagactggtttgccaaaaggaagaagtttaagcggcctccacagaggctgtttgatgctgagaagatcaggtccctggggggtgatgttgcctctgatggtgacttcctcatctttgaggggaaccgttacagccggaagggctttctgttcaagagcttcgccatgtctgctgtgatcacggagggtgtgaagccaacactctctgagctggaaaagtttgaggaccagccagagggcattgacctggaggtggtgactgagagcacagccctacgactgcccctgcagggaaggagcgggagcacaacttccaacctggggacaacgtggaggtctgtgagggtgagctcatcaacctgcagggcaagatcctcagcgtggatggcaacaagatcaccatcatgcccaagcatgaggacctcaaggacatgttggagttcccagcccaggaacttagaaaatacttcaagatgggggaccacgtgaaggtgattgctggccgattcgagggcgacacaggcctcattgtgcgggtggaggagaatttcgttatcctgttctctgacctcaccatgcatgagctgaaggtgctcccccgggacctgcagctctgctcagagacagcatcaggtgtggatgttgggggccagcatgaatggggcgagctggtgcagctggatccccagactgtgggtgtcatcgtgcgactagaacgggagaccttccaggtgctgaacatgtacgggaaggtggtgactgtcagacatcaggctgtgacccggaagaaggacaaccgctttgctgtggccttggactcagagcagaacaacatccatgtgaaagacatcgttaaggtcattgatggcccccactcaggccgagaaggggagattcgccatctcttccgaagcttcgccttcctacattgcaagaaactggtggagaacgggggcatgtttgtctgcaagacccgccacctggtgctggctgggggctcaaagccccgtgatgtgaccaacttcaccgtgggtggctttgcgcctatgagtccccggatcagcagccccatgcaccccagtgctggaggtcagcgtggcggctttggtagcccaggtggcggcagtggtggcatgagcaggggccggggccggagggacaacgaactcatcggccagaccgtgcgcatctcccaggggccctacaaaggctacatcggtgtggtgaaagatgccacagagtccacggcccgtgtggagctgcactccacctgccagaccatctctgtggaccgtcagcggctcaccacggtgggctcacggcgcccgggcggcatgacctcgacctatgggaggacgcccatgtatggctcccagacgcccatgtatggctctggctcccgaacacccatgtacggctcacagacacccctccaggatggtagccgcaccccacactacggctcacagacgcccctgcatgatggcagccgcactcctgcccagagtggggcctgggaccccaacaaccccaacacgccgtcacgggctgaggaagaatatgagtatgctttcgatgatgagcccaccccgtccccgcaggcctatgggggaacccccaatccccaaacacctggctacccagacccctcgtccccacaggtcaacccacaatacaacccgcagacgccagggacgccggccatgtacaacacagaccagttctctccctatgctgccccctccccacaaggttcctaccagcccagccccagcccccagagctaccaccaggtggcgccaagcccagcaggctaccagaatacccactccccagccagctaccaccctacaccgtcgcccatggcctatcaggctagccccagcccgagccccgttggctacagtcctatgacacctggagctccctcccctggtggctacaacccacacacgccaggctcaggcatcgagcagaactccagcgactgggtaaccactgacattcaggtgaaggtgcgggacacctacctggatacacaggtggtgggacagacaggtgtcatccgcagtgtcacggggggcatgtgctctgtgtacctgaaggacagtgagaaggttgtcagcatttccagtgagcacctggagcctatcacccccaccaagaacaacaaggtgaaagtgatcctgggcgaggatcgggaagccacgggcgtcctactgagcattgatggtgaggatggcattgtccgtatggaccttgatgagcagctcaagatcctcaacctccgcttcctggggaagctcctggaagcctgaagcaggcagggccggtggacttcgtcggatgaagagtgatcctccttccttccctggcccttggctgtgacacaagatcctcctgcagggctaggcggattgttctggatttccttttgtttttccttttagttttccatcttttccctccctggtgctcattggaatctgagtagagtctgggggagggtccccaccttcctgtacctcctccccacagcttgcttttgttgtaccgtctttcaataaaaagaagctgtttggtctaaaaaaaaaaaaaaaaaaaaaaaaacagaaaaaaaaaaaaagaagggggggctcaccagaactatatcctccttggggggcccctcacgcgagcaggaactactatgtgagtcgtcagggcccgccccctgcgaagggggggagaccacataggcaacgaggcagcggaggaacgaggggacactcacattgccgactgggaacgaccggagttgaatgcccgcatcggcgttggagagacacttccacagccagtgtgagtcgggccaatagaatgggagaggaggcgggacctaccaatgagctggcatgacctgacgacgggtgggatagtgacaatgaaacaaagggcgattgagaggatagcatggaggaaagcgctaacacacatgaacgtgggcggaacaatcccaaaaagggaacactactgagggacgccaccgcggggggggcaccccaaagtcgcaaggaacaaccaatcggcaacagagctggcaaaccacgaccacctcacaggccttggcaacaagaacaggtggggggggcagggacaacccctatctaggaagcgcgggagaaattaccgaaacaggggggggaacgtcgggggggtcgagggaccacggggggacccagcagagagggcgatgccggccacgggagacactagtatgaccactgcgggagcgctgaccaaacaaccggcgtcggaccaccccgacacgcggctgaaccagttactcggccacacgggagtagcccccaccaagccgtgagcaacgaaaccacgggcactgagagctccgccgcggaacggaaaaacccaagcgaccagcagagcaaaaacacgcccgctgaagaggcgcagtccgccacaagagagag

SEQ ID NO: 447452 - DNA, 4566 bp, Homo sapiens
tgactctagtaggatccccagtcactgatgagcctccttggaggcggaggtggagcccgagagggaaccagcggggaaactgaggctcggggtggagcgcaggattgtgggacgcgccaaggctgctgtctttcccagcagcagcggaagatgtcggacagcgaggacagcaacttttccgaggaggaggacagcgagcgcagcagtgacggcgaggaggccgaggtagacgaagagcggcggagtgcagcgggcagtgagaaagaagaagagcctgaggacgaagaggaggaggaagaggaggaggaatatgatgaggaagaggaggaagaagatgatgaccgaccccccaagaaaccccgccatggaggcttcattctggacgaggctgatgttgacgatgagtatgaggacgaggaccagtgggaggatggagcagaggacattctagagaaagaagagattgaagcctccaatatcgataatgttgtcctggatgaagatcgttctggggctcgccgcctgcaaaacctctggagggaccagcgagaagaagaactgggcgagtattacatgaagaaatacgccaagtcatctgtgggagagacggtgtatggaggatctgatgagctctcagacgacatcacccagcagcagctgctcccaggagtcaaggatcccaatctgtggactgtcaaatgtaagattggggaggaacgggccacggccatttccttgatgcgcaagttcattgcctaccagttcacagacacgcccctgcagatcaagtcagtagtggcaccagagcatgtgaagggctacatctacgtggaggcctacaagcagacccacgtgaagcaggccattgagggggtgggcaacctgcggcttggctactggaaccagcagatggtgcccatcaaggagatgacagacgtgctcaaagtggtgaaggaggtggccaacctgaaaccaaagtcctgggtccgcctcaagcggggcatctacaaggatgacattgctcaggtggactacgtggagcccagccagaacaccatctccctgaagatgatcccacgcatcgactacgatcgcatcaaggcccgcatgagcttgaaagactggtttgccaaaaggaagaagtttaagcggcctccacagaggctgtttgatgctgagaagatcaggtccctggggggtgatgttgcctctgatggtgacttcctcatctttgaggggaaccgttacagccggaagggctttctgttcaagagcttcgccatgtctgctgtgatcacggagggtgtgaagccaacactctctgagctggaaaagtttgaggaccagccagagggcattgacctggaggtggtgactgagagcacagggaaggagcgggagcacaacttccaacctggggacaacgtggaggtctgtgagggtgagctcatcaacctgcagggcaagatcctcagcgtggatggcaacaagatcaccatcatgcccaagcatgaggacctcaaggacatgttggagttcccagcccaggaacttagaaaatacttcaagatgggggaccacgtgaaggtgattgctggccgattcgagggcgacacaggcctcattgtgcgggtggaggagaatttcgttatcctgttctctgacctcaccatgcatgagctgaaggtgctcccccgggacctgcagctctgctcagagacagcatcaggtgtggatgttgggggccagcatgaatggggcgagctggtgcagctggatccccagactgtgggtgtcatcgtgcgactagaacgggagaccttccaggtgctgaacatgtacgggaaggtggtgactgtcagacatcaggctgtgacccggaagaaggacaaccgctttgctgtggccttggactcagagcagaacaacatccatgtgaaagacatcgttaaggtcattgatggcccccactcaggccgagaaggggagattcgccatctcttccgaagcttcgccttcctacattgcaagaaactggtggagaacgggggcatgtttgtctgcaagacccgccacctggtgctggctgggggctcaaagccccgtgatgtgaccaacttcaccgtgggtggctttgcgcctatgagtccccggatcagcagccccatgcaccccagtgctggaggtcagcgtggcggctttggtagcccaggtggcggcagtggtggcatgagcaggggccggggccggagggacaacgaactcatcggccagaccgtgcgcatctcccaggggccctacaaaggctacatcggtgtggtgaaagatgccacagagtccacggcccgtgtggagctgcactccacctgccagaccatctctgtggaccgtcagcggctcaccacggtgggctcacggcgcccgggcggcatgacctcgacctatgggaggacgcccatgtatggctcccagacgcccatgtatggctctggctcccgaacacccatgtacggctcacagacacccctccaggatggtagccgcaccccacactacggctcacagacgcccctgcatgatggcagccgcactcctgcccagagtggggcctgggaccccaacaaccccaacacgccgtcacgggctgaggaagaatatgagtatgctttcgatgatgagcccaccccgtccccgcaggcctatgggggaacccccaatccccaaacacctggctacccagacccctcgtccccacaggtcaacccacaatacaacccgcagacgccagggacgccggccatgtacaacacagaccagttctctccctatgctgccccctccccacaaggttcctaccagcccagccccagcccccagagctaccaccaggtggcgccaagcccagcaggctaccagaatacccactccccagccagctaccaccctacaccgtcgcccatggcctatcaggctagccccagcccgagccccgttggctacagtcctatgacacctggagctccctcccctggtggctacaacccacacacgccaggctcaggcatcgagcagaactccagcgactgggtaaccactgacattcaggtgaaggtgcgggacacctacctggatacacaggtggtgggacagacaggtgtcatccgcagtgtcacggggggcatgtgctctgtgtacctgaaggacagtgagaaggttgtcagcatttccagtgagcacctggagcctatcacccccaccaagaacaacaaggtgaaagtgatcctgggcgaggatcgggaagccacgggcgtcctactgagcattgatggtgaggatggcattgtccgtatggaccttgatgagcagctcaagatcctcaacctccgcttcctggggaagctcctggaagcctgaagcaggcagggccggtggacttcgtcggatgaagagtgatcctccttccttccctggcccttggctgtgacacaagatcctcctgcagggctaggcggattgttctggatttccttttgtttttccttttagttttccatcttttccctccctggtgctcattggaatctgagtagagtctgggggagggtccccaccttcctgtacctcctccccacagcttgcttttgttgtaccgtctttcaataaaaagaagctgtttggtctaaaaaaaaaaaaaaaaaaaaaaaaacagaaaaaaaaaaaaagaagggggggctcaccagaactatatcctccttggggggcccctcacgcgagcaggaactactatgtgagtcgtcagggcccgccccctgcgaagggggggagaccacataggcaacgaggcagcggaggaacgaggggacactcacattgccgactgggaacgaccggagttgaatgcccgcatcggcgttggagagacacttccacagccagtgtgagtcgggccaatagaatgggagaggaggcgggacctaccaatgagctggcatgacctgacgacgggtgggatagtgacaatgaaacaaagggcgattgagaggatagcatggaggaaagcgctaacacacatgaacgtgggcggaacaatcccaaaaagggaacactactgagggacgccaccgcggggggggcaccccaaagtcgcaaggaacaaccaatcggcaacagagctggcaaaccacgaccacctcacaggccttggcaacaagaacaggtggggggggcagggacaacccctatctaggaagcgcgggagaaattaccgaaacaggggggggaacgtcgggggggtcgagggaccacggggggacccagcagagagggcgatgccggccacgggagacactagtatgaccactgcgggagcgctgaccaaacaaccggcgtcggaccaccccgacacgcggctgaaccagttactcggccacacgggagtagcccccaccaagccgtgagcaacgaaaccacgggcactgagagctccgccgcggaacggaaaaacccaagcgaccagcagagcaaaaacacgcccgctgaagaggcgcagtccgccacaagagagag

SEQ ID NO: 447453 - DNA, 4251 bp, Homo sapiens
agagtaggggatgaggggttgggatttcctctgtgagatgtcatcttcctgccccagggccaaaccctggccctcttagctgcacgctcctattttctccaggcccctgccctccacctgcccttgctcacgccctctgcccattatttttcagcctccaatatcgataatgttgtcctggatgaagatcgttctggggctcgccgcctgcaaaacctctggagggaccagcgagaagaagaactgggcgagtattacatgaagaaatacgccaagtcatctgtgggagagacggtgtatggaggatctgatgagctctcagacgacatcacccagcagcagctgctcccaggagtcaaggatcccaatctgtggactgtcaaatgtaagattggggaggaacgggccacggccatttccttgatgcgcaagttcattgcctaccagttcacagacacgcccctgcagatcaagtcagtagtggcaccagagcatgtgaagggctacatctacgtggaggcctacaagcagacccacgtgaagcaggccattgagggggtgggcaacctgcggcttggctactggaaccagcagatggtgcccatcaaggagatgacagacgtgctcaaagtggtgaaggaggtggccaacctgaaaccaaagtcctgggtccgcctcaagcggggcatctacaaggatgacattgctcaggtggactacgtggagcccagccagaacaccatctccctgaagatgatcccacgcatcgactacgatcgcatcaaggcccgcatgagcttgaaagactggtttgccaaaaggaagaagtttaagcggcctccacagaggctgtttgatgctgagaagatcaggtccctggggggtgatgttgcctctgatggtgacttcctcatctttgaggggaaccgttacagccggaagggctttctgttcaagagcttcgccatgtctgctgtgatcacggagggtgtgaagccaacactctctgagctggaaaagtttgaggaccagccagagggcattgacctggaggtggtgactgagagcacagggaaggagcgggagcacaacttccaacctggggacaacgtggaggtctgtgagggtgagctcatcaacctgcagggcaagatcctcagcgtggatggcaacaagatcaccatcatgcccaagcatgaggacctcaaggacatgttggagttcccagcccaggaacttagaaaatacttcaagatgggggaccacgtgaaggtgattgctggccgattcgagggcgacacaggcctcattgtgcgggtggaggagaatttcgttatcctgttctctgacctcaccatgcatgagctgaaggtgctcccccgggacctgcagctctgctcagagacagcatcaggtgtggatgttgggggccagcatgaatggggcgagctggtgcagctggatccccagactgtgggtgtcatcgtgcgactagaacgggagaccttccaggtgctgaacatgtacgggaaggtggtgactgtcagacatcaggctgtgacccggaagaaggacaaccgctttgctgtggccttggactcagagcagaacaacatccatgtgaaagacatcgttaaggtcattgatggcccccactcaggccgagaaggggagattcgccatctcttccgaagcttcgccttcctacattgcaagaaactggtggagaacgggggcatgtttgtctgcaagacccgccacctggtgctggctgggggctcaaagccccgtgatgtgaccaacttcaccgtgggtggctttgcgcctatgagtccccggatcagcagccccatgcaccccagtgctggaggtcagcgtggcggctttggtagcccaggtggcggcagtggtggcatgagcaggggccggggccggagggacaacgaactcatcggccagaccgtgcgcatctcccaggggccctacaaaggctacatcggtgtggtgaaagatgccacagagtccacggcccgtgtggagctgcactccacctgccagaccatctctgtggaccgtcagcggctcaccacggtgggctcacggcgcccgggcggcatgacctcgacctatgggaggacgcccatgtatggctcccagacgcccatgtatggctctggctcccgaacacccatgtacggctcacagacacccctccaggatggtagccgcaccccacactacggctcacagacgcccctgcatgatggcagccgcactcctgcccagagtggggcctgggaccccaacaaccccaacacgccgtcacgggctgaggaagaatatgagtatgctttcgatgatgagcccaccccgtccccgcaggcctatgggggaacccccaatccccaaacacctggctacccagacccctcgtccccacaggtcaacccacaatacaacccgcagacgccagggacgccggccatgtacaacacagaccagttctctccctatgctgccccctccccacaaggttcctaccagcccagccccagcccccagagctaccaccaggtggcgccaagcccagcaggctaccagaatacccactccccagccagctaccaccctacaccgtcgcccatggcctatcaggctagccccagcccgagccccgttggctacagtcctatgacacctggagctccctcccctggtggctacaacccacacacgccaggctcaggcatcgagcagaactccagcgactgggtaaccactgacattcaggtgaaggtgcgggacacctacctggatacacaggtggtgggacagacaggtgtcatccgcagtgtcacggggggcatgtgctctgtgtacctgaaggacagtgagaaggttgtcagcatttccagtgagcacctggagcctatcacccccaccaagaacaacaaggtgaaagtgatcctgggcgaggatcgggaagccacgggcgtcctactgagcattgatggtgaggatggcattgtccgtatggaccttgatgagcagctcaagatcctcaacctccgcttcctggggaagctcctggaagcctgaagcaggcagggccggtggacttcgtcggatgaagagtgatcctccttccttccctggcccttggctgtgacacaagatcctcctgcagggctaggcggattgttctggatttccttttgtttttccttttagttttccatcttttccctccctggtgctcattggaatctgagtagagtctgggggagggtccccaccttcctgtacctcctccccacagcttgcttttgttgtaccgtctttcaataaaaagaagctgtttggtctaaaaaaaaaaaaaaaaaaaaaaaaacagaaaaaaaaaaaaagaagggggggctcaccagaactatatcctccttggggggcccctcacgcgagcaggaactactatgtgagtcgtcagggcccgccccctgcgaagggggggagaccacataggcaacgaggcagcggaggaacgaggggacactcacattgccgactgggaacgaccggagttgaatgcccgcatcggcgttggagagacacttccacagccagtgtgagtcgggccaatagaatgggagaggaggcgggacctaccaatgagctggcatgacctgacgacgggtgggatagtgacaatgaaacaaagggcgattgagaggatagcatggaggaaagcgctaacacacatgaacgtgggcggaacaatcccaaaaagggaacactactgagggacgccaccgcggggggggcaccccaaagtcgcaaggaacaaccaatcggcaacagagctggcaaaccacgaccacctcacaggccttggcaacaagaacaggtggggggggcagggacaacccctatctaggaagcgcgggagaaattaccgaaacaggggggggaacgtcgggggggtcgagggaccacggggggacccagcagagagggcgatgccggccacgggagacactagtatgaccactgcgggagcgctgaccaaacaaccggcgtcggaccaccccgacacgcggctgaaccagttactcggccacacgggagtagcccccaccaagccgtgagcaacgaaaccacgggcactgagagctccgccgcggaacggaaaaacccaagcgaccagcagagcaaaaacacgcccgctgaagaggcgcagtccgccacaagagagag

SEQ ID NO: 447454 - DNA, 3419 bp, Homo sapiens
gactctcccttctaatcttctctcccccatcaaattccaggtccctggggggtgatgttgcctctgatggtgacttcctcatctttgaggggaaccgttacagccggaagggctttctgttcaagagcttcgccatgtctgctgtgatcacggagggtgtgaagccaacactctctgagctggaaaagtttgaggaccagccagagggcattgacctggaggtggtgactgagagcacagggaaggagcgggagcacaacttccaacctggggacaacgtggaggtctgtgagggtgagctcatcaacctgcagggcaagatcctcagcgtggatggcaacaagatcaccatcatgcccaagcatgaggacctcaaggacatgttggagttcccagcccaggaacttagaaaatacttcaagatgggggaccacgtgaaggtgattgctggccgattcgagggcgacacaggcctcattgtgcgggtggaggagaatttcgttatcctgttctctgacctcaccatgcatgagctgaaggtgctcccccgggacctgcagctctgctcagagacagcatcaggtgtggatgttgggggccagcatgaatggggcgagctggtgcagctggatccccagactgtgggtgtcatcgtgcgactagaacgggagaccttccaggtgctgaacatgtacgggaaggtggtgactgtcagacatcaggctgtgacccggaagaaggacaaccgctttgctgtggccttggactcagagcagaacaacatccatgtgaaagacatcgttaaggtcattgatggcccccactcaggccgagaaggggagattcgccatctcttccgaagcttcgccttcctacattgcaagaaactggtggagaacgggggcatgtttgtctgcaagacccgccacctggtgctggctgggggctcaaagccccgtgatgtgaccaacttcaccgtgggtggctttgcgcctatgagtccccggatcagcagccccatgcaccccagtgctggaggtcagcgtggcggctttggtagcccaggtggcggcagtggtggcatgagcaggggccggggccggagggacaacgaactcatcggccagaccgtgcgcatctcccaggggccctacaaaggctacatcggtgtggtgaaagatgccacagagtccacggcccgtgtggagctgcactccacctgccagaccatctctgtggaccgtcagcggctcaccacggtgggctcacggcgcccgggcggcatgacctcgacctatgggaggacgcccatgtatggctcccagacgcccatgtatggctctggctcccgaacacccatgtacggctcacagacacccctccaggatggtagccgcaccccacactacggctcacagacgcccctgcatgatggcagccgcactcctgcccagagtggggcctgggaccccaacaaccccaacacgccgtcacgggctgaggaagaatatgagtatgctttcgatgatgagcccaccccgtccccgcaggcctatgggggaacccccaatccccaaacacctggctacccagacccctcgtccccacaggtcaacccacaatacaacccgcagacgccagggacgccggccatgtacaacacagaccagttctctccctatgctgccccctccccacaaggttcctaccagcccagccccagcccccagagctaccaccaggtggcgccaagcccagcaggctaccagaatacccactccccagccagctaccaccctacaccgtcgcccatggcctatcaggctagccccagcccgagccccgttggctacagtcctatgacacctggagctccctcccctggtggctacaacccacacacgccaggctcaggcatcgagcagaactccagcgactgggtaaccactgacattcaggtgaaggtgcgggacacctacctggatacacaggtggtgggacagacaggtgtcatccgcagtgtcacggggggcatgtgctctgtgtacctgaaggacagtgagaaggttgtcagcatttccagtgagcacctggagcctatcacccccaccaagaacaacaaggtgaaagtgatcctgggcgaggatcgggaagccacgggcgtcctactgagcattgatggtgaggatggcattgtccgtatggaccttgatgagcagctcaagatcctcaacctccgcttcctggggaagctcctggaagcctgaagcaggcagggccggtggacttcgtcggatgaagagtgatcctccttccttccctggcccttggctgtgacacaagatcctcctgcagggctaggcggattgttctggatttccttttgtttttccttttagttttccatcttttccctccctggtgctcattggaatctgagtagagtctgggggagggtccccaccttcctgtacctcctccccacagcttgcttttgttgtaccgtctttcaataaaaagaagctgtttggtctaaaaaaaaaaaaaaaaaaaaaaaaacagaaaaaaaaaaaaagaagggggggctcaccagaactatatcctccttggggggcccctcacgcgagcaggaactactatgtgagtcgtcagggcccgccccctgcgaagggggggagaccacataggcaacgaggcagcggaggaacgaggggacactcacattgccgactgggaacgaccggagttgaatgcccgcatcggcgttggagagacacttccacagccagtgtgagtcgggccaatagaatgggagaggaggcgggacctaccaatgagctggcatgacctgacgacgggtgggatagtgacaatgaaacaaagggcgattgagaggatagcatggaggaaagcgctaacacacatgaacgtgggcggaacaatcccaaaaagggaacactactgagggacgccaccgcggggggggcaccccaaagtcgcaaggaacaaccaatcggcaacagagctggcaaaccacgaccacctcacaggccttggcaacaagaacaggtggggggggcagggacaacccctatctaggaagcgcgggagaaattaccgaaacaggggggggaacgtcgggggggtcgagggaccacggggggacccagcagagagggcgatgccggccacgggagacactagtatgaccactgcgggagcgctgaccaaacaaccggcgtcggaccaccccgacacgcggctgaaccagttactcggccacacgggagtagcccccaccaagccgtgagcaacgaaaccacgggcactgagagctccgccgcggaacggaaaaacccaagcgaccagcagagcaaaaacacgcccgctgaagaggcgcagtccgccacaagagagag

SEQ ID NO: 447455 - DNA, 2804 bp, Homo sapiens
aaaggctaggtacgaggctgggtgttgaattcgccgaggtgcgactagaacgggagaccttccaggtgctgaacatgtacgggaaggtggtgactgtcagacatcaggctgtgacccggaagaaggacaaccgctttgctgtggccttggactcagagcagaacaacatccatgtgaaagacatcgttaaggtcattgatggcccccactcaggccgagaaggggagattcgccatctcttccgaagcttcgccttcctacattgcaagaaactggtggagaacgggggcatgtttgtctgcaagacccgccacctggtgctggctgggggctcaaagccccgtgatgtgaccaacttcaccgtgggtggctttgcgcctatgagtccccggatcagcagccccatgcaccccagtgctggaggtcagcgtggcggctttggtagcccaggtggcggcagtggtggcatgagcaggggccggggccggagggacaacgaactcatcggccagaccgtgcgcatctcccaggggccctacaaaggctacatcggtgtggtgaaagatgccacagagtccacggcccgtgtggagctgcactccacctgccagaccatctctgtggaccgtcagcggctcaccacggtgggctcacggcgcccgggcggcatgacctcgacctatgggaggacgcccatgtatggctcccagacgcccatgtatggctctggctcccgaacacccatgtacggctcacagacacccctccaggatggtagccgcaccccacactacggctcacagacgcccctgcatgatggcagccgcactcctgcccagagtggggcctgggaccccaacaaccccaacacgccgtcacgggctgaggaagaatatgagtatgctttcgatgatgagcccaccccgtccccgcaggcctatgggggaacccccaatccccaaacacctggctacccagacccctcgtccccacaggtcaacccacaatacaacccgcagacgccagggacgccggccatgtacaacacagaccagttctctccctatgctgccccctccccacaaggttcctaccagcccagccccagcccccagagctaccaccaggtggcgccaagcccagcaggctaccagaatacccactccccagccagctaccaccctacaccgtcgcccatggcctatcaggctagccccagcccgagccccgttggctacagtcctatgacacctggagctccctcccctggtggctacaacccacacacgccaggctcaggcatcgagcagaactccagcgactgggtaaccactgacattcaggtgaaggtgcgggacacctacctggatacacaggtggtgggacagacaggtgtcatccgcagtgtcacggggggcatgtgctctgtgtacctgaaggacagtgagaaggttgtcagcatttccagtgagcacctggagcctatcacccccaccaagaacaacaaggtgaaagtgatcctgggcgaggatcgggaagccacgggcgtcctactgagcattgatggtgaggatggcattgtccgtatggaccttgatgagcagctcaagatcctcaacctccgcttcctggggaagctcctggaagcctgaagcaggcagggccggtggacttcgtcggatgaagagtgatcctccttccttccctggcccttggctgtgacacaagatcctcctgcagggctaggcggattgttctggatttccttttgtttttccttttagttttccatcttttccctccctggtgctcattggaatctgagtagagtctgggggagggtccccaccttcctgtacctcctccccacagcttgcttttgttgtaccgtctttcaataaaaagaagctgtttggtctaaaaaaaaaaaaaaaaaaaaaaaaacagaaaaaaaaaaaaagaagggggggctcaccagaactatatcctccttggggggcccctcacgcgagcaggaactactatgtgagtcgtcagggcccgccccctgcgaagggggggagaccacataggcaacgaggcagcggaggaacgaggggacactcacattgccgactgggaacgaccggagttgaatgcccgcatcggcgttggagagacacttccacagccagtgtgagtcgggccaatagaatgggagaggaggcgggacctaccaatgagctggcatgacctgacgacgggtgggatagtgacaatgaaacaaagggcgattgagaggatagcatggaggaaagcgctaacacacatgaacgtgggcggaacaatcccaaaaagggaacactactgagggacgccaccgcggggggggcaccccaaagtcgcaaggaacaaccaatcggcaacagagctggcaaaccacgaccacctcacaggccttggcaacaagaacaggtggggggggcagggacaacccctatctaggaagcgcgggagaaattaccgaaacaggggggggaacgtcgggggggtcgagggaccacggggggacccagcagagagggcgatgccggccacgggagacactagtatgaccactgcgggagcgctgaccaaacaaccggcgtcggaccaccccgacacgcggctgaaccagttactcggccacacgggagtagcccccaccaagccgtgagcaacgaaaccacgggcactgagagctccgccgcggaacggaaaaacccaagcgaccagcagagcaaaaacacgcccgctgaagaggcgcagtccgccacaagagagag

SEQ ID NO: 447456 - DNA, 2417 bp, Homo sapiens
ccgtgggggaccagtgacattctccccaatccccaggtcagcgtggcggctttggtagcccaggtggcggcagtggtggcatgagcaggggccggggccggagggacaacgaactcatcggccagaccgtgcgcatctcccaggggccctacaaaggctacatcggtgtggtgaaagatgccacagagtccacggcccgtgtggagctgcactccacctgccagaccatctctgtggaccgtcagcggctcaccacggtgggctcacggcgcccgggcggcatgacctcgacctatgggaggacgcccatgtatggctcccagacgcccatgtatggctctggctcccgaacacccatgtacggctcacagacacccctccaggatggtagccgcaccccacactacggctcacagacgcccctgcatgatggcagccgcactcctgcccagagtggggcctgggaccccaacaaccccaacacgccgtcacgggctgaggaagaatatgagtatgctttcgatgatgagcccaccccgtccccgcaggcctatgggggaacccccaatccccaaacacctggctacccagacccctcgtccccacaggtcaacccacaatacaacccgcagacgccagggacgccggccatgtacaacacagaccagttctctccctatgctgccccctccccacaaggttcctaccagcccagccccagcccccagagctaccaccaggtggcgccaagcccagcaggctaccagaatacccactccccagccagctaccaccctacaccgtcgcccatggcctatcaggctagccccagcccgagccccgttggctacagtcctatgacacctggagctccctcccctggtggctacaacccacacacgccaggctcaggcatcgagcagaactccagcgactgggtaaccactgacattcaggtgaaggtgcgggacacctacctggatacacaggtggtgggacagacaggtgtcatccgcagtgtcacggggggcatgtgctctgtgtacctgaaggacagtgagaaggttgtcagcatttccagtgagcacctggagcctatcacccccaccaagaacaacaaggtgaaagtgatcctgggcgaggatcgggaagccacgggcgtcctactgagcattgatggtgaggatggcattgtccgtatggaccttgatgagcagctcaagatcctcaacctccgcttcctggggaagctcctggaagcctgaagcaggcagggccggtggacttcgtcggatgaagagtgatcctccttccttccctggcccttggctgtgacacaagatcctcctgcagggctaggcggattgttctggatttccttttgtttttccttttagttttccatcttttccctccctggtgctcattggaatctgagtagagtctgggggagggtccccaccttcctgtacctcctccccacagcttgcttttgttgtaccgtctttcaataaaaagaagctgtttggtctaaaaaaaaaaaaaaaaaaaaaaaaacagaaaaaaaaaaaaagaagggggggctcaccagaactatatcctccttggggggcccctcacgcgagcaggaactactatgtgagtcgtcagggcccgccccctgcgaagggggggagaccacataggcaacgaggcagcggaggaacgaggggacactcacattgccgactgggaacgaccggagttgaatgcccgcatcggcgttggagagacacttccacagccagtgtgagtcgggccaatagaatgggagaggaggcgggacctaccaatgagctggcatgacctgacgacgggtgggatagtgacaatgaaacaaagggcgattgagaggatagcatggaggaaagcgctaacacacatgaacgtgggcggaacaatcccaaaaagggaacactactgagggacgccaccgcggggggggcaccccaaagtcgcaaggaacaaccaatcggcaacagagctggcaaaccacgaccacctcacaggccttggcaacaagaacaggtggggggggcagggacaacccctatctaggaagcgcgggagaaattaccgaaacaggggggggaacgtcgggggggtcgagggaccacggggggacccagcagagagggcgatgccggccacgggagacactagtatgaccactgcgggagcgctgaccaaacaaccggcgtcggaccaccccgacacgcggctgaaccagttactcggccacacgggagtagcccccaccaagccgtgagcaacgaaaccacgggcactgagagctccgccgcggaacggaaaaacccaagcgaccagcagagcaaaaacacgcccgctgaagaggcgcagtccgccacaagagagag

SEQ ID NO: 447457 - DNA, 2558 bp, Homo sapiens
cgtcagccccagtcaggcgtcgtgcgaacagcagctggtaccgaaggcggaggtggagcccgagagggaaccagcggggaaactgaggctcggggtggagcgcaggattgtgggacgcgccaaggctgctgtctttcccagcagcagcggaagatgtcggacagcgaggacagcaacttttccgaggaggaggacagcgagcgcagcagtgacggcgaggaggccgaggtagacgaagagcggcggagtgcagcgggcagtgagaaagaagaagagcctgaggacgaagaggaggaggaagaggaggaggaatatgatgaggaagaggaggaagaagatgatgaccgaccccccaagaaaccccgccatggaggcttcattctggacgaggctgatgttgacgatgagtatgaggacgaggaccagtgggaggatggagcagaggacattctagagaaagaagagattgaagcctccaatatcgataatgttgtcctggatgaagatcgttctggggctcgccgcctgcaaaacctctggagggaccagcgagaagaagaactgggcgagtattacatgaagaaatacgccaagtcatctgtgggagagacggtgtatggaggatctgatgagctctcagacgacatcacccagcagcagctgctcccaggagtcaaggatcccaatctgtggactgtcaaatgtaagattggggaggaacgggccacggccatttccttgatgcgcaagttcattgcctaccagttcacagacacgcccctgcagatcaagtcagtagtggcaccagagcatgtgaagggctacatctacgtggaggcctacaagcagacccacgtgaagcaggccattgagggggtgggcaacctgcggcttggctactggaaccagcagatggtgcccatcaaggagatgacagacgtgctcaaagtggtgaaggaggtggccaacctgaaaccaaagtcctgggtccgcctcaagcggggcatctacaaggatgacattgctcaggtggactacgtggagcccagccagaacaccatctccctgaagatgatcccacgcatcgactacgatcgcatcaaggcccgcatgagcttgaaagactggtttgccaaaaggaagaagtttaagcggcctccacagaggctgtttgatgctgagaagatcaggtccctggggggtgatgttgcctctgatggtgacttcctcatctttgaggggaaccgttacagccggaagggctttctgttcaagagcttcgccatgtctgctgtgatcacggagggtgtgaagccaacactctctgagctggaaaagtttgaggaccagccagagggcattgacctggaggtggtgactgagagcacagggaaggagcgggagcacaacttccaacctggggacaacgtggaggtctgtgagggtgagctcatcaacctgcagggcaagatcctcagcgtggatggcaacaagatcaccatcatgcccaagcatgaggacctcaaggacatgttggagttcccagcccaggaacttagaaaatacttcaagatgggggaccacgtgaaggtgattgctggccgattcgagggcgacacaggcctcattgtgcgggtggaggagaatttcgttatcctgttctctgacctcaccatgcatgagctgaaggtgctcccccgggacctgcagctctgctcagagacagcatcaggtgtggatgttgggggccagcatgaatggggcgagctggtgcagctggatccccagactgtgggtgtcatcgtgcgactagaacgggagaccttccaggtgctgaacatgtacgggaaggtggtgactgtcagacatcaggctgtgacccggaagaaggacaaccgctttgctgtggccttggactcagagcagaacaacatccatgtgaaagacatcgttaaggtcattgatggcccccactcaggccgagaaggggagattcgccatctcttccgaagcttcgccttcctacattgcaagaaactggtggagaacgggggcatgtttgtctgcaagacccgccacctggtgctggctgggggctcaaagccccgtgatgtgaccaacttcaccgtgggtggctttgcgcctatgagtccccggatcagcagccccatgcaccccagtgctggaggtcagcgtggcggctttggtagcccaggtggcggcagtggtggcatgagcaggggccggggccggagggacaacgaactcatcggccagaccgtgcgcatctcccaggggccctacaaaggctacatcggtgtggtgaaagatgccacagagtccacggcccgtgtggagctgcactccacctgccagaccatctctgtggaccgtcagcggctcaccacggtgggctcacggcgcccgggcggcatgacctcgacctatgggaggacgcccatgtatggctcccagacgcccatgtatggctctggctcccgaacacccatgtacggctcacagacacccctccaggatggtgagtgcccgcaggggac

SEQ ID NO: 447458 - DNA, 3110 bp, Homo sapiens
cgtcagccccagtcaggcgtcgtgcgaacagcagctggtaccgaaggcggaggtggagcccgagagggaaccagcggggaaactgaggctcggggtggagcgcaggattgtgggacgcgccaaggctgctgtctttcccagcagcagcggaagatgtcggacagcgaggacagcaacttttccgaggaggaggacagcgagcgcagcagtgacggcgaggaggccgaggtagacgaagagcggcggagtgcagcgggcagtgagaaagaagaagagcctgaggacgaagaggaggaggaagaggaggaggaatatgatgaggaagaggaggaagaagatgatgaccgaccccccaagaaaccccgccatggaggcttcattctggacgaggctgatgttgacgatgagtatgaggacgaggaccagtgggaggatggagcagaggacattctagagaaagaagagattgaagcctccaatatcgataatgttgtcctggatgaagatcgttctggggctcgccgcctgcaaaacctctggagggaccagcgagaagaagaactgggcgagtattacatgaagaaatacgccaagtcatctgtgggagagacggtgtatggaggatctgatgagctctcagacgacatcacccagcagcagctgctcccaggagtcaaggatcccaatctgtggactgtcaaatgtaagattggggaggaacgggccacggccatttccttgatgcgcaagttcattgcctaccagttcacagacacgcccctgcagatcaagtcagtagtggcaccagagcatgtgaagggctacatctacgtggaggcctacaagcagacccacgtgaagcaggccattgagggggtgggcaacctgcggcttggctactggaaccagcagatggtgcccatcaaggagatgacagacgtgctcaaagtggtgaaggaggtggccaacctgaaaccaaagtcctgggtccgcctcaagcggggcatctacaaggatgacattgctcaggtggactacgtggagcccagccagaacaccatctccctgaagatgatcccacgcatcgactacgatcgcatcaaggcccgcatgagcttgaaagactggtttgccaaaaggaagaagtttaagcggcctccacagaggctgtttgatgctgagaagatcaggtccctggggggtgatgttgcctctgatggtgacttcctcatctttgaggggaaccgttacagccggaagggctttctgttcaagagcttcgccatgtctgctgtgatcacggagggtgtgaagccaacactctctgagctggaaaagtttgaggaccagccagagggcattgacctggaggtggtgactgagagcacagggaaggagcgggagcacaacttccaacctggggacaacgtggaggtctgtgagggtgagctcatcaacctgcagggcaagatcctcagcgtggatggcaacaagatcaccatcatgcccaagcatgaggacctcaaggacatgttggagttcccagcccaggaacttagaaaatacttcaagatgggggaccacgtgaaggtgattgctggccgattcgagggcgacacaggcctcattgtgcgggtggaggagaatttcgttatcctgttctctgacctcaccatgcatgagctgaaggtgctcccccgggacctgcagctctgctcagagacagcatcaggtgtggatgttgggggccagcatgaatggggcgagctggtgcagctggatccccagactgtgggtgtcatcgtgcgactagaacgggagaccttccaggtgctgaacatgtacgggaaggtggtgactgtcagacatcaggctgtgacccggaagaaggacaaccgctttgctgtggccttggactcagagcagaacaacatccatgtgaaagacatcgttaaggtcattgatggcccccactcaggccgagaaggggagattcgccatctcttccgaagcttcgccttcctacattgcaagatcctcctgcagggctaggcggattgttctggatttccttttgtttttccttttagttttccatcttttccctccctggtgctcattggaatctgagtagagtctgggggagggtccccaccttcctgtacctcctccccacagcttgcttttgttgtaccgtctttcaataaaaagaagctgtttggtctaaaaaaaaaaaaaaaaaaaaaaaaacagaaaaaaaaaaaaagaagggggggctcaccagaactatatcctccttggggggcccctcacgcgagcaggaactactatgtgagtcgtcagggcccgccccctgcgaagggggggagaccacataggcaacgaggcagcggaggaacgaggggacactcacattgccgactgggaacgaccggagttgaatgcccgcatcggcgttggagagacacttccacagccagtgtgagtcgggccaatagaatgggagaggaggcgggacctaccaatgagctggcatgacctgacgacgggtgggatagtgacaatgaaacaaagggcgattgagaggatagcatggaggaaagcgctaacacacatgaacgtgggcggaacaatcccaaaaagggaacactactgagggacgccaccgcggggggggcaccccaaagtcgcaaggaacaaccaatcggcaacagagctggcaaaccacgaccacctcacaggccttggcaacaagaacaggtggggggggcagggacaacccctatctaggaagcgcgggagaaattaccgaaacaggggggggaacgtcgggggggtcgagggaccacggggggacccagcagagagggcgatgccggccacgggagacactagtatgaccactgcgggagcgctgaccaaacaaccggcgtcggaccaccccgacacgcggctgaaccagttactcggccacacgggagtagcccccaccaagccgtgagcaacgaaaccacgggcactgagagctccgccgcggaacggaaaaacccaagcgaccagcagagcaaaaacacgcccgctgaagaggcgcagtccgccacaagagagag

SEQ ID NO: 447459 - DNA, 1505 bp, Homo sapiens
cgtcagccccagtcaggcgtcgtgcgaacagcagctggtaccgaaggcggaggtggagcccgagagggaaccagcggggaaactgaggctcggggtggagcgcaggattgtgggacgcgccaaggctgctgtctttcccagcagcagcggaagatgtcggacagcgaggacagcaacttttccgaggaggaggacagcgagcgcagcagtgacggcgaggaggccgaggtagacgaagagcggcggagtgcagcgggcagtgagaaagaagaagagcctgaggacgaagaggaggaggaagaggaggaggaatatgatgaggaagaggaggaagaagatgatgaccgaccccccaagaaaccccgccatggaggcttcattctggacgaggctgatgttgacgatgagtatgaggacgaggaccagtgggaggatggagcagaggacattctagagaaagaagagattgaagcctccaatatcgataatgttgtcctggatgaagatcgttctggggctcgccgcctgcaaaacctctggagggaccagcgagaagaagaactgggcgagtattacatgaagaaatacgccaagtcatctgtgggagagacggtgtatggaggatctgatgagctctcagacgacatcacccagcagcagctgctcccaggagtcaaggatcccaatctgtggactgtcaaatgtaagattggggaggaacgggccacggccatttccttgatgcgcaagttcattgcctaccagttcacagacacgcccctgcagatcaagtcagtagtggcaccagagcatgtgaagggctacatctacgtggaggcctacaagcagacccacgtgaagcaggccattgagggggtgggcaacctgcggcttggctactggaaccagcagatggtgcccatcaaggagatgacagacgtgctcaaagtggtgaaggaggtggccaacctgaaaccaaagtcctgggtccgcctcaagcggggcatctacaaggatgacattgctcaggtggactacgtggagcccagccagaacaccatctccctgaagatgatcccacgcatcgactacgatcgcatcaaggcccgcatgagcttgaaagactggtttgccaaaaggaagaagtttaagcggcctccacagaggctgtttgatgctgagaagatcaggtgcgtgtccttggggactggctgggctgggtccccagggccggtgtgtagaatgtgccttttgcaggttcctccccaggggtggccccgccacaggtttagcctgtgaattggttagcttggcagtatagcctcaggcaagtcacttcacatccctgtgcctcagtttcttctgctataaagattgatgaggctgggcgcagcgggagggagcactttggaaggctaaggcaggaggcttgcttgaggcaaggagttcgagaccagcctgggcaacataatgagatcccatcttttaaaataataataataata

SEQ ID NO: 447460 - DNA, 1324 bp, Homo sapiens
cgtcagccccagtcaggcgtcgtgcgaacagcagctggtaccgaaggcggaggtggagcccgagagggaaccagcggggaaactgaggctcggggtggagcgcaggattgtgggacgcgccaaggctgctgtctttcccagcagcagcggaagatgtcggacagcgaggacagcaacttttccgaggaggaggacagcgagcgcagcagtgacggcgaggaggccgaggtagacgaagagcggcggagtgcagcgggcagtgagaaagaagaagagcctgaggacgaagaggaggaggaagaggaggaggaatatgatgaggaagaggaggaagaagatgatgaccgaccccccaagaaaccccgccatggaggcttcattctggacgaggctgatgttgacgatgagtatgaggacgaggaccagtgggaggatggagcagaggacattctagagaaagaagagattgaagcctccaatatcgataatgttgtcctggatgaagatcgttctggggctcgccgcctgcaaaacctctggagggaccagcgagaagaagaactgggcgagtattacatgaagaaatacgccaagtcatctgtgggagagacggtgtatggaggatctgatgagctctcagacgacatcacccagcagcagctgctcccaggagtcaaggatcccaatctgtggactgtcaaatgtaagattggggaggaacgggccacggccatttccttgatgcgcaagttcattgcctaccagttcacagacacgcccctgcagatcaagtcagtagtggcaccagagcatgtgaagggctacatctacgtggaggcctacaagcagacccacgtgaagcaggccattgagggggtgggcaacctgcggcttggctactggaaccagcagatggtgcccatcaaggagatgacagacgtgctcaaagtggtgaaggaggtggccaacctgaaaccaaagtcctgggtccgcctcaagcggggcatctacaaggatgacattgctcaggtggactacgtggagcccagccagaacaccatctccctgaagatgatcccacgcatcgactacgatcgcatcaaggcccgcatgagcttgaaagactggtttgccaaaaggaagaagtttaagcggcctccacagaggctgtttgatgctgagaagatcagccctggaagcgcctttctcgaaagcgggtaaaaccttcctggccaaagtctaggcccctgggcaccagtcgcacattcctctgttttagagcatagtctaccacccagctcagttactccatctcacgtttgat

SEQ ID NO: 447461 - DNA, 1828 bp, Homo sapiens
aggtgggagagaccctcacgggctgaatggccaggcctcagagctaggggcttgttggtgagggaggtgaccaagatgaggtccagagctctggtggggcctgcagaccatggggcggtccctgagaccaggtccaggaagaggagcaggtgtggggaagacgctgaggccagtttgggacatgaagagtcaagaagcagtctcctttttgcctgttagcttcattctgatgcttcccttgctgattgggtcaccctgtccaccctgacatgcaccacaggccccaggccttggaaccaggcccagccttggcctttcctgcccccatttcaccttgagttctcagaatgagccctgagcctgtgtcccctggagtatgggcctcagtcccatgttgggagcaggacaggctgaccaggctgtccccatcctccaggggggcatgtgctctgtgtacctgaaggacagtgagaaggttgtcagcatttccagtgagcacctggagcctatcacccccaccaagaacaacaaggtgaaagtgatcctgggcgaggatcgggaagccacgggcgtcctactgagcattgatggtgaggatggcattgtccgtatggaccttgatgagcagctcaagatcctcaacctccgcttcctggggaagctcctggaagcctgaagcaggcagggccggtggacttcgtcggatgaagagtgatcctccttccttccctggcccttggctgtgacacaagatcctcctgcagggctaggcggattgttctggatttccttttgtttttccttttagttttccatcttttccctccctggtgctcattggaatctgagtagagtctgggggagggtccccaccttcctgtacctcctccccacagcttgcttttgttgtaccgtctttcaataaaaagaagctgtttggtctaaaaaaaaaaaaaaaaaaaaaaaaacagaaaaaaaaaaaaagaagggggggctcaccagaactatatcctccttggggggcccctcacgcgagcaggaactactatgtgagtcgtcagggcccgccccctgcgaagggggggagaccacataggcaacgaggcagcggaggaacgaggggacactcacattgccgactgggaacgaccggagttgaatgcccgcatcggcgttggagagacacttccacagccagtgtgagtcgggccaatagaatgggagaggaggcgggacctaccaatgagctggcatgacctgacgacgggtgggatagtgacaatgaaacaaagggcgattgagaggatagcatggaggaaagcgctaacacacatgaacgtgggcggaacaatcccaaaaagggaacactactgagggacgccaccgcggggggggcaccccaaagtcgcaaggaacaaccaatcggcaacagagctggcaaaccacgaccacctcacaggccttggcaacaagaacaggtggggggggcagggacaacccctatctaggaagcgcgggagaaattaccgaaacaggggggggaacgtcgggggggtcgagggaccacggggggacccagcagagagggcgatgccggccacgggagacactagtatgaccactgcgggagcgctgaccaaacaaccggcgtcggaccaccccgacacgcggctgaaccagttactcggccacacgggagtagcccccaccaagccgtgagcaacgaaaccacgggcactgagagctccgccgcggaacggaaaaacccaagcgaccagcagagcaaaaacacgcccgctgaagaggcgcagtccgccacaagagagag

SEQ ID NO: 447462 - DNA, 942 bp, Homo sapiens
cgtcagccccagtcaggcgtcgtgcgaacagcagctggtaccgaaggcggaggtggagcccgagagggaaccagcggggaaactgaggctcggggtggagcgcaggattgtgggacgcgccaaggctgctgtctttcccagcagcagcggaagatgtcggacagcgaggacagcaacttttccgaggaggaggacagcgagcgcagcagtgacggcgaggaggccgaggtagacgaagagcggcggagtgcagcgggcagtgagaaagaagaagagcctgaggacgaagaggaggaggaagaggaggaggaatatgatgaggaagaggaggaagaagatgatgaccgaccccccaagaaaccccgccatggaggcttcattctggacgaggctgatgttgacgatgagtatgaggacgaggaccagtgggaggatggagcagaggacattctagagaaagaagagattgaagcctccaatatcgataatgttgtcctggatgaagatcgttctggggctcgccgcctgcaaaacctctggagggaccagcgagaagaagaactgggcgagtattacatgaagaaatacgccaagtcatctgtgggagagacggtgtatggaggatctgatgagctctcagacgacatcacccagcagcagctgctcccaggagtcaaggatcccaatctgtggactgtcaaatgtaagattggggaggaacgggccacggccatttccttgatgcgcaagttcattgcctaccagttcacagacacggtaagtcgggtagacaggcggcttggtggggagacatggcaacacccagagggaagaacattgtcaacttcaggggtaccaggtgcctctgttgtgagcagagctgcctgctgagtgagctgcttgagctggaataagaccactgcctagatggaagggctcttc

SEQ ID NO: 447463 - DNA, 502 bp, Homo sapiens
ccggaaatctcgtgttaaggcgaaggtcaacgggtatggttctcgcgagaggacccgtcagccccagtcaggcgtcgtgcgaacagcagctggtaccgaaggcggaggtggagcccgagaggtaagtgcgtgtgcagaggtggcagttccgggcgccggggaggtgtagagaacagattcggaaactggggaggtctagcatgtggcgtaggagggggtcctcactccgcttcgcgattgccaaaacgagcctgccggaagcgccctaaggggttttcttctcccagggaaccagcggggaaactgaggctcggggtggagcgcaggattgtgggacgcgccaaggctgctgtctttcccagcagcagcggaagatgtcggacagcgaggacagcaacttttccgaggaggaggacagcgagcgcagcagtgacggcgaggaggccgaggtctgtggctggggcgctgggggagacattgcgtctggggacaggactccggg

SEQ ID NO: 447464 - DNA, 356 bp, Homo sapiens
attcccctaggacccactcagcccactcagctgggctgttgcactgacctcggtccatttccttctcttcccctcaccgctgggggcttagatcacggagggtgtgaagccaacactctctgagctggaaaagtttgaggaccagccagagggcattgacctggaggtggtgactgagagcacaggtatttgatccccctctataacctgggccaaggagcaggggcggcccatggtggcaacccccgagtcagccctacgactgcccctgcagggaaggagcgggagcacaacttccaacctggggacaacgtggaggtctgtgagggtgagctcatcaacctgcagggcaagat

SEQ ID NO: 447465 - DNA, 437 bp, Homo sapiens
tgtgacccggaagaaggacaaccgctttgctgtggccttggactcagagcagaacaacatccatgtgaaagacatcgttaaggtcattgatggcccccactcagtgagtacaagttcctgcttttgagctgcatctgaaagaatttggttggttgggggtgagggggacatggtcaagagagtgacccttctctccccggctagggccgagaaggggagattcgccatctcttccgaagcttcgccttcctacattgcaagaaactggtggagaacgggggcatgtttgtctgcaagacccgccacctggtgctggctgggggctcaaaggtgaggtgggcatggcaggaccctgtgcgttgggtacctggctcagctctccaagcctcctctggccccagaagtgataagattgggcttgtgagggattaggagag

SEQ ID NO: 447466 - DNA, 788 bp, Homo sapiens
  misc_feature (758)..(758): n is a, c, g, or t
  misc_feature (784)..(784): n is a, c, g, or t
  misc_feature (786)..(786): n is a, c, g, or t
tgactctagtaggatccccagtcactgatgagcctccttggaggcggaggtggagcccgagagggaaccagcggggaaactgaggctcggggtggagcgcaggattgtgggacgcgccaaggctgctgtctttcccagcagcagcggaagatgtcggacagcgaggacagcaacttttccgaggaggaggacagcgagcgcagcagtgacggcgaggaggccgaggtagacgaagagcggcggagtgcagcgggcagtgagaaagaagaagagcctgaggacgaagaggaggaggaagaggaggaggaatatgatgaggaagaggaggaagaagatgatgaccgaccccccaagaaaccccgccatggaggcttcattctggacgaggctgatgttgacgatgagtatgaggacgaggaccagtgggaggatggagcagaggacattctagagaaagaagagattgaagcctccaatatcgataatgttgtcctggatgaagatcgttctggggctcgccgcctgcaaaacctctggagggaccagcgagaagaagaactgggcgagtattacatgaagaaatacgccaagtcatctgtgggagagacggtgtatggaggatctgatgagctctcagacgacatcacccagcagcagctgctcccaggagtcaagggatcccaatctgtggactggtcaaattgttaagaattgggggaaggaaccgggcccacgggccattttcccttggaatgccnccaaggtttcaattggccttacccangntt

SEQ ID NO: 447467 - DNA, 4569 bp, Homo sapiens
cgtcagccccagtcaggcgtcgtgcgaacagcagctggtaccgaaggcggaggtggagcccgagagggaaccagcggggaaactgaggctcggggtggagcgcaggattgtgggacgcgccaaggctgctgtctttcccagcagcagcggaagatgtcggacagcgaggacagcaacttttccgaggaggaggacagcgagcgcagcagtgacggcgaggaggccgaggtagacgaagagcggcggagtgcagcgggcagtgagaaagaagaagagcctgaggacgaagaggaggaggaagaggaggaggaatatgatgaggaagaggaggaagaagatgatgaccgaccccccaagaaaccccgccatggaggcttcattctggacgaggctgatgttgacgatgagtatgaggacgaggaccagtgggaggatggagcagaggacattctagagaaagaagagattgaagcctccaatatcgataatgttgtcctggatgaagatcgttctggggctcgccgcctgcaaaacctctggagggaccagcgagaagaagaactgggcgagtattacatgaagaaatacgccaagtcatctgtgggagagacggtgtatggaggatctgatgagctctcagacgacatcacccagcagcagctgctcccaggagtcaaggatcccaatctgtggactgtcaaatgtaagattggggaggaacgggccacggccatttccttgatgcgcaagttcattgcctaccagttcacagacacgcccctgcagatcaagtcagtagtggcaccagagcatgtgaagggctacatctacgtggaggcctacaagcagacccacgtgaagcaggccattgagggggtgggcaacctgcggcttggctactggaaccagcagatggtgcccatcaaggagatgacagacgtgctcaaagtggtgaaggaggtggccaacctgaaaccaaagtcctgggtccgcctcaagcggggcatctacaaggatgacattgctcaggtggactacgtggagcccagccagaacaccatctccctgaagatgatcccacgcatcgactacgatcgcatcaaggcccgcatgagcttgaaagactggtttgccaaaaggaagaagtttaagcggcctccacagaggctgtttgatgctgagaagatcaggtccctggggggtgatgttgcctctgatggtgacttcctcatctttgaggggaaccgttacagccggaagggctttctgttcaagagcttcgccatgtctgctgtgatcacggagggtgtgaagccaacactctctgagctggaaaagtttgaggaccagccagagggcattgacctggaggtggtgactgagagcacagggaaggagcgggagcacaacttccaacctggggacaacgtggaggtctgtgagggtgagctcatcaacctgcagggcaagatcctcagcgtggatggcaacaagatcaccatcatgcccaagcatgaggacctcaaggacatgttggagttcccagcccaggaacttagaaaatacttcaagatgggggaccacgtgaaggtgattgctggccgattcgagggcgacacaggcctcattgtgcgggtggaggagaatttcgttatcctgttctctgacctcaccatgcatgagctgaaggtgctcccccgggacctgcagctctgctcagagacagcatcaggtgtggatgttgggggccagcatgaatggggcgagctggtgcagctggatccccagactgtgggtgtcatcgtgcgactagaacgggagaccttccaggtgctgaacatgtacgggaaggtggtgactgtcagacatcaggctgtgacccggaagaaggacaaccgctttgctgtggccttggactcagagcagaacaacatccatgtgaaagacatcgttaaggtcattgatggcccccactcaggccgagaaggggagattcgccatctcttccgaagcttcgccttcctacattgcaagaaactggtggagaacgggggcatgtttgtctgcaagacccgccacctggtgctggctgggggctcaaagccccgtgatgtgaccaacttcaccgtgggtggctttgcgcctatgagtccccggatcagcagccccatgcaccccagtgctggaggtcagcgtggcggctttggtagcccaggtggcggcagtggtggcatgagcaggggccggggccggagggacaacgaactcatcggccagaccgtgcgcatctcccaggggccctacaaaggctacatcggtgtggtgaaagatgccacagagtccacggcccgtgtggagctgcactccacctgccagaccatctctgtggaccgtcagcggctcaccacggtgggctcacggcgcccgggcggcatgacctcgacctatgggaggacgcccatgtatggctcccagacgcccatgtatggctctggctcccgaacacccatgtacggctcacagacacccctccaggatggtagccgcaccccacactacggctcacagacgcccctgcatgatggcagccgcactcctgcccagagtggggcctgggaccccaacaaccccaacacgccgtcacgggctgaggaagaatatgagtatgctttcgatgatgagcccaccccgtccccgcaggcctatgggggaacccccaatccccaaacacctggctacccagacccctcgtccccacaggtcaacccacaatacaacccgcagacgccagggacgccggccatgtacaacacagaccagttctctccctatgctgccccctccccacaaggttcctaccagcccagccccagcccccagagctaccaccaggtggcgccaagcccagcaggctaccagaatacccactccccagccagctaccaccctacaccgtcgcccatggcctatcaggctagccccagcccgagccccgttggctacagtcctatgacacctggagctccctcccctggtggctacaacccacacacgccaggctcaggcatcgagcagaactccagcgactgggtaaccactgacattcaggtgaaggtgcgggacacctacctggatacacaggtggtgggacagacaggtgtcatccgcagtgtcacggggggcatgtgctctgtgtacctgaaggacagtgagaaggttgtcagcatttccagtgagcacctggagcctatcacccccaccaagaacaacaaggtgaaagtgatcctgggcgaggatcgggaagccacgggcgtcctactgagcattgatggtgaggatggcattgtccgtatggaccttgatgagcagctcaagatcctcaacctccgcttcctggggaagctcctggaagcctgaagcaggcagggccggtggacttcgtcggatgaagagtgatcctccttccttccctggcccttggctgtgacacaagatcctcctgcagggctaggcggattgttctggatttccttttgtttttccttttagttttccatcttttccctccctggtgctcattggaatctgagtagagtctgggggagggtccccaccttcctgtacctcctccccacagcttgcttttgttgtaccgtctttcaataaaaagaagctgtttggtctaaaaaaaaaaaaaaaaaaaaaaaaacagaaaaaaaaaaaaagaagggggggctcaccagaactatatcctccttggggggcccctcacgcgagcaggaactactatgtgagtcgtcagggcccgccccctgcgaagggggggagaccacataggcaacgaggcagcggaggaacgaggggacactcacattgccgactgggaacgaccggagttgaatgcccgcatcggcgttggagagacacttccacagccagtgtgagtcgggccaatagaatgggagaggaggcgggacctaccaatgagctggcatgacctgacgacgggtgggatagtgacaatgaaacaaagggcgattgagaggatagcatggaggaaagcgctaacacacatgaacgtgggcggaacaatcccaaaaagggaacactactgagggacgccaccgcggggggggcaccccaaagtcgcaaggaacaaccaatcggcaacagagctggcaaaccacgaccacctcacaggccttggcaacaagaacaggtggggggggcagggacaacccctatctaggaagcgcgggagaaattaccgaaacaggggggggaacgtcgggggggtcgagggaccacggggggacccagcagagagggcgatgccggccacgggagacactagtatgaccactgcgggagcgctgaccaaacaaccggcgtcggaccaccccgacacgcggctgaaccagttactcggccacacgggagtagcccccaccaagccgtgagcaacgaaaccacgggcactgagagctccgccgcggaacggaaaaacccaagcgaccagcagagcaaaaacacgcccgctgaagaggcgcagtccgccacaagagagag

SEQ ID NO: 447468 - DNA, 4623 bp, Homo sapiens
agagaacagattcggaaactggggaggtctagcatgtggcgtaggagggggtcctcactccgcttcgcgattgccaaaacgagcctgccggaagcgccctaaggggttttcttctcccagggaaccagcggggaaactgaggctcggggtggagcgcaggattgtgggacgcgccaaggctgctgtctttcccagcagcagcggaagatgtcggacagcgaggacagcaacttttccgaggaggaggacagcgagcgcagcagtgacggcgaggaggccgaggtagacgaagagcggcggagtgcagcgggcagtgagaaagaagaagagcctgaggacgaagaggaggaggaagaggaggaggaatatgatgaggaagaggaggaagaagatgatgaccgaccccccaagaaaccccgccatggaggcttcattctggacgaggctgatgttgacgatgagtatgaggacgaggaccagtgggaggatggagcagaggacattctagagaaagaagagattgaagcctccaatatcgataatgttgtcctggatgaagatcgttctggggctcgccgcctgcaaaacctctggagggaccagcgagaagaagaactgggcgagtattacatgaagaaatacgccaagtcatctgtgggagagacggtgtatggaggatctgatgagctctcagacgacatcacccagcagcagctgctcccaggagtcaaggatcccaatctgtggactgtcaaatgtaagattggggaggaacgggccacggccatttccttgatgcgcaagttcattgcctaccagttcacagacacgcccctgcagatcaagtcagtagtggcaccagagcatgtgaagggctacatctacgtggaggcctacaagcagacccacgtgaagcaggccattgagggggtgggcaacctgcggcttggctactggaaccagcagatggtgcccatcaaggagatgacagacgtgctcaaagtggtgaaggaggtggccaacctgaaaccaaagtcctgggtccgcctcaagcggggcatctacaaggatgacattgctcaggtggactacgtggagcccagccagaacaccatctccctgaagatgatcccacgcatcgactacgatcgcatcaaggcccgcatgagcttgaaagactggtttgccaaaaggaagaagtttaagcggcctccacagaggctgtttgatgctgagaagatcaggtccctggggggtgatgttgcctctgatggtgacttcctcatctttgaggggaaccgttacagccggaagggctttctgttcaagagcttcgccatgtctgctgtgatcacggagggtgtgaagccaacactctctgagctggaaaagtttgaggaccagccagagggcattgacctggaggtggtgactgagagcacagggaaggagcgggagcacaacttccaacctggggacaacgtggaggtctgtgagggtgagctcatcaacctgcagggcaagatcctcagcgtggatggcaacaagatcaccatcatgcccaagcatgaggacctcaaggacatgttggagttcccagcccaggaacttagaaaatacttcaagatgggggaccacgtgaaggtgattgctggccgattcgagggcgacacaggcctcattgtgcgggtggaggagaatttcgttatcctgttctctgacctcaccatgcatgagctgaaggtgctcccccgggacctgcagctctgctcagagacagcatcaggtgtggatgttgggggccagcatgaatggggcgagctggtgcagctggatccccagactgtgggtgtcatcgtgcgactagaacgggagaccttccaggtgctgaacatgtacgggaaggtggtgactgtcagacatcaggctgtgacccggaagaaggacaaccgctttgctgtggccttggactcagagcagaacaacatccatgtgaaagacatcgttaaggtcattgatggcccccactcaggccgagaaggggagattcgccatctcttccgaagcttcgccttcctacattgcaagaaactggtggagaacgggggcatgtttgtctgcaagacccgccacctggtgctggctgggggctcaaagccccgtgatgtgaccaacttcaccgtgggtggctttgcgcctatgagtccccggatcagcagccccatgcaccccagtgctggaggtcagcgtggcggctttggtagcccaggtggcggcagtggtggcatgagcaggggccggggccggagggacaacgaactcatcggccagaccgtgcgcatctcccaggggccctacaaaggctacatcggtgtggtgaaagatgccacagagtccacggcccgtgtggagctgcactccacctgccagaccatctctgtggaccgtcagcggctcaccacggtgggctcacggcgcccgggcggcatgacctcgacctatgggaggacgcccatgtatggctcccagacgcccatgtatggctctggctcccgaacacccatgtacggctcacagacacccctccaggatggtagccgcaccccacactacggctcacagacgcccctgcatgatggcagccgcactcctgcccagagtggggcctgggaccccaacaaccccaacacgccgtcacgggctgaggaagaatatgagtatgctttcgatgatgagcccaccccgtccccgcaggcctatgggggaacccccaatccccaaacacctggctacccagacccctcgtccccacaggtcaacccacaatacaacccgcagacgccagggacgccggccatgtacaacacagaccagttctctccctatgctgccccctccccacaaggttcctaccagcccagccccagcccccagagctaccaccaggtggcgccaagcccagcaggctaccagaatacccactccccagccagctaccaccctacaccgtcgcccatggcctatcaggctagccccagcccgagccccgttggctacagtcctatgacacctggagctccctcccctggtggctacaacccacacacgccaggctcaggcatcgagcagaactccagcgactgggtaaccactgacattcaggtgaaggtgcgggacacctacctggatacacaggtggtgggacagacaggtgtcatccgcagtgtcacggggggcatgtgctctgtgtacctgaaggacagtgagaaggttgtcagcatttccagtgagcacctggagcctatcacccccaccaagaacaacaaggtgaaagtgatcctgggcgaggatcgggaagccacgggcgtcctactgagcattgatggtgaggatggcattgtccgtatggaccttgatgagcagctcaagatcctcaacctccgcttcctggggaagctcctggaagcctgaagcaggcagggccggtggacttcgtcggatgaagagtgatcctccttccttccctggcccttggctgtgacacaagatcctcctgcagggctaggcggattgttctggatttccttttgtttttccttttagttttccatcttttccctccctggtgctcattggaatctgagtagagtctgggggagggtccccaccttcctgtacctcctccccacagcttgcttttgttgtaccgtctttcaataaaaagaagctgtttggtctaaaaaaaaaaaaaaaaaaaaaaaaacagaaaaaaaaaaaaagaagggggggctcaccagaactatatcctccttggggggcccctcacgcgagcaggaactactatgtgagtcgtcagggcccgccccctgcgaagggggggagaccacataggcaacgaggcagcggaggaacgaggggacactcacattgccgactgggaacgaccggagttgaatgcccgcatcggcgttggagagacacttccacagccagtgtgagtcgggccaatagaatgggagaggaggcgggacctaccaatgagctggcatgacctgacgacgggtgggatagtgacaatgaaacaaagggcgattgagaggatagcatggaggaaagcgctaacacacatgaacgtgggcggaacaatcccaaaaagggaacactactgagggacgccaccgcggggggggcaccccaaagtcgcaaggaacaaccaatcggcaacagagctggcaaaccacgaccacctcacaggccttggcaacaagaacaggtggggggggcagggacaacccctatctaggaagcgcgggagaaattaccgaaacaggggggggaacgtcgggggggtcgagggaccacggggggacccagcagagagggcgatgccggccacgggagacactagtatgaccactgcgggagcgctgaccaaacaaccggcgtcggaccaccccgacacgcggctgaaccagttactcggccacacgggagtagcccccaccaagccgtgagcaacgaaaccacgggcactgagagctccgccgcggaacggaaaaacccaagcgaccagcagagcaaaaacacgcccgctgaagaggcgcagtccgccacaagagagag

SEQ ID NO: 447469 - DNA, 4622 bp, Homo sapiens
tccagactgccttcagactcccaagaaacctcgccatggaggcttcattctggacgaggctgatgttgacgatgagtataaggacgaggaccagtgggaggatggagcagaggacattctagagaaagaagagattgaggcctccaatatcgataatgttgtcctggatgaagatcgttctggggctcgccgcctgcaaaacctctggagggaccagcgaggacagcaacttttccgaggaggaggacagcgagcgcagcagtgacggcgaggaggccgaggtagacgaagagcggcggagtgcagcgggcagtgagaaagaagaagagcctgaggacgaagaggaggaggaagaggaggaggaatatgatgaggaagaggaggaagaagatgatgaccgaccccccaagaaaccccgccatggaggcttcattctggacgaggctgatgttgacgatgagtatgaggacgaggaccagtgggaggatggagcagaggacattctagagaaagaagagattgaagcctccaatatcgataatgttgtcctggatgaagatcgttctggggctcgccgcctgcaaaacctctggagggaccagcgagaagaagaactgggcgagtattacatgaagaaatacgccaagtcatctgtgggagagacggtgtatggaggatctgatgagctctcagacgacatcacccagcagcagctgctcccaggagtcaaggatcccaatctgtggactgtcaaatgtaagattggggaggaacgggccacggccatttccttgatgcgcaagttcattgcctaccagttcacagacacgcccctgcagatcaagtcagtagtggcaccagagcatgtgaagggctacatctacgtggaggcctacaagcagacccacgtgaagcaggccattgagggggtgggcaacctgcggcttggctactggaaccagcagatggtgcccatcaaggagatgacagacgtgctcaaagtggtgaaggaggtggccaacctgaaaccaaagtcctgggtccgcctcaagcggggcatctacaaggatgacattgctcaggtggactacgtggagcccagccagaacaccatctccctgaagatgatcccacgcatcgactacgatcgcatcaaggcccgcatgagcttgaaagactggtttgccaaaaggaagaagtttaagcggcctccacagaggctgtttgatgctgagaagatcaggtccctggggggtgatgttgcctctgatggtgacttcctcatctttgaggggaaccgttacagccggaagggctttctgttcaagagcttcgccatgtctgctgtgatcacggagggtgtgaagccaacactctctgagctggaaaagtttgaggaccagccagagggcattgacctggaggtggtgactgagagcacagggaaggagcgggagcacaacttccaacctggggacaacgtggaggtctgtgagggtgagctcatcaacctgcagggcaagatcctcagcgtggatggcaacaagatcaccatcatgcccaagcatgaggacctcaaggacatgttggagttcccagcccaggaacttagaaaatacttcaagatgggggaccacgtgaaggtgattgctggccgattcgagggcgacacaggcctcattgtgcgggtggaggagaatttcgttatcctgttctctgacctcaccatgcatgagctgaaggtgctcccccgggacctgcagctctgctcagagacagcatcaggtgtggatgttgggggccagcatgaatggggcgagctggtgcagctggatccccagactgtgggtgtcatcgtgcgactagaacgggagaccttccaggtgctgaacatgtacgggaaggtggtgactgtcagacatcaggctgtgacccggaagaaggacaaccgctttgctgtggccttggactcagagcagaacaacatccatgtgaaagacatcgttaaggtcattgatggcccccactcaggccgagaaggggagattcgccatctcttccgaagcttcgccttcctacattgcaagaaactggtggagaacgggggcatgtttgtctgcaagacccgccacctggtgctggctgggggctcaaagccccgtgatgtgaccaacttcaccgtgggtggctttgcgcctatgagtccccggatcagcagccccatgcaccccagtgctggaggtcagcgtggcggctttggtagcccaggtggcggcagtggtggcatgagcaggggccggggccggagggacaacgaactcatcggccagaccgtgcgcatctcccaggggccctacaaaggctacatcggtgtggtgaaagatgccacagagtccacggcccgtgtggagctgcactccacctgccagaccatctctgtggaccgtcagcggctcaccacggtgggctcacggcgcccgggcggcatgacctcgacctatgggaggacgcccatgtatggctcccagacgcccatgtatggctctggctcccgaacacccatgtacggctcacagacacccctccaggatggtagccgcaccccacactacggctcacagacgcccctgcatgatggcagccgcactcctgcccagagtggggcctgggaccccaacaaccccaacacgccgtcacgggctgaggaagaatatgagtatgctttcgatgatgagcccaccccgtccccgcaggcctatgggggaacccccaatccccaaacacctggctacccagacccctcgtccccacaggtcaacccacaatacaacccgcagacgccagggacgccggccatgtacaacacagaccagttctctccctatgctgccccctccccacaaggttcctaccagcccagccccagcccccagagctaccaccaggtggcgccaagcccagcaggctaccagaatacccactccccagccagctaccaccctacaccgtcgcccatggcctatcaggctagccccagcccgagccccgttggctacagtcctatgacacctggagctccctcccctggtggctacaacccacacacgccaggctcaggcatcgagcagaactccagcgactgggtaaccactgacattcaggtgaaggtgcgggacacctacctggatacacaggtggtgggacagacaggtgtcatccgcagtgtcacggggggcatgtgctctgtgtacctgaaggacagtgagaaggttgtcagcatttccagtgagcacctggagcctatcacccccaccaagaacaacaaggtgaaagtgatcctgggcgaggatcgggaagccacgggcgtcctactgagcattgatggtgaggatggcattgtccgtatggaccttgatgagcagctcaagatcctcaacctccgcttcctggggaagctcctggaagcctgaagcaggcagggccggtggacttcgtcggatgaagagtgatcctccttccttccctggcccttggctgtgacacaagatcctcctgcagggctaggcggattgttctggatttccttttgtttttccttttagttttccatcttttccctccctggtgctcattggaatctgagtagagtctgggggagggtccccaccttcctgtacctcctccccacagcttgcttttgttgtaccgtctttcaataaaaagaagctgtttggtctaaaaaaaaaaaaaaaaaaaaaaaaacagaaaaaaaaaaaaagaagggggggctcaccagaactatatcctccttggggggcccctcacgcgagcaggaactactatgtgagtcgtcagggcccgccccctgcgaagggggggagaccacataggcaacgaggcagcggaggaacgaggggacactcacattgccgactgggaacgaccggagttgaatgcccgcatcggcgttggagagacacttccacagccagtgtgagtcgggccaatagaatgggagaggaggcgggacctaccaatgagctggcatgacctgacgacgggtgggatagtgacaatgaaacaaagggcgattgagaggatagcatggaggaaagcgctaacacacatgaacgtgggcggaacaatcccaaaaagggaacactactgagggacgccaccgcggggggggcaccccaaagtcgcaaggaacaaccaatcggcaacagagctggcaaaccacgaccacctcacaggccttggcaacaagaacaggtggggggggcagggacaacccctatctaggaagcgcgggagaaattaccgaaacaggggggggaacgtcgggggggtcgagggaccacggggggacccagcagagagggcgatgccggccacgggagacactagtatgaccactgcgggagcgctgaccaaacaaccggcgtcggaccaccccgacacgcggctgaaccagttactcggccacacgggagtagcccccaccaagccgtgagcaacgaaaccacgggcactgagagctccgccgcggaacggaaaaacccaagcgaccagcagagcaaaaacacgcccgctgaagaggcgcagtccgccacaagagagag

SEQ ID NO: 447470 - DNA, 3482 bp, Homo sapiens
ctgtgtgcccccagaacccccgcatgagcttgaaagactggtttgccaaaaggaagaagtttaagcggcctccacagaggctgtttgatgctgagaagatcaggtccctggggggtgatgttgcctctgatggtgacttcctcatctttgaggggaaccgttacagccggaagggctttctgttcaagagcttcgccatgtctgctgtgatcacggagggtgtgaagccaacactctctgagctggaaaagtttgaggaccagccagagggcattgacctggaggtggtgactgagagcacagggaaggagcgggagcacaacttccaacctggggacaacgtggaggtctgtgagggtgagctcatcaacctgcagggcaagatcctcagcgtggatggcaacaagatcaccatcatgcccaagcatgaggacctcaaggacatgttggagttcccagcccaggaacttagaaaatacttcaagatgggggaccacgtgaaggtgattgctggccgattcgagggcgacacaggcctcattgtgcgggtggaggagaatttcgttatcctgttctctgacctcaccatgcatgagctgaaggtgctcccccgggacctgcagctctgctcagagacagcatcaggtgtggatgttgggggccagcatgaatggggcgagctggtgcagctggatccccagactgtgggtgtcatcgtgcgactagaacgggagaccttccaggtgctgaacatgtacgggaaggtggtgactgtcagacatcaggctgtgacccggaagaaggacaaccgctttgctgtggccttggactcagagcagaacaacatccatgtgaaagacatcgttaaggtcattgatggcccccactcaggccgagaaggggagattcgccatctcttccgaagcttcgccttcctacattgcaagaaactggtggagaacgggggcatgtttgtctgcaagacccgccacctggtgctggctgggggctcaaagccccgtgatgtgaccaacttcaccgtgggtggctttgcgcctatgagtccccggatcagcagccccatgcaccccagtgctggaggtcagcgtggcggctttggtagcccaggtggcggcagtggtggcatgagcaggggccggggccggagggacaacgaactcatcggccagaccgtgcgcatctcccaggggccctacaaaggctacatcggtgtggtgaaagatgccacagagtccacggcccgtgtggagctgcactccacctgccagaccatctctgtggaccgtcagcggctcaccacggtgggctcacggcgcccgggcggcatgacctcgacctatgggaggacgcccatgtatggctcccagacgcccatgtatggctctggctcccgaacacccatgtacggctcacagacacccctccaggatggtagccgcaccccacactacggctcacagacgcccctgcatgatggcagccgcactcctgcccagagtggggcctgggaccccaacaaccccaacacgccgtcacgggctgaggaagaatatgagtatgctttcgatgatgagcccaccccgtccccgcaggcctatgggggaacccccaatccccaaacacctggctacccagacccctcgtccccacaggtcaacccacaatacaacccgcagacgccagggacgccggccatgtacaacacagaccagttctctccctatgctgccccctccccacaaggttcctaccagcccagccccagcccccagagctaccaccaggtggcgccaagcccagcaggctaccagaatacccactccccagccagctaccaccctacaccgtcgcccatggcctatcaggctagccccagcccgagccccgttggctacagtcctatgacacctggagctccctcccctggtggctacaacccacacacgccaggctcaggcatcgagcagaactccagcgactgggtaaccactgacattcaggtgaaggtgcgggacacctacctggatacacaggtggtgggacagacaggtgtcatccgcagtgtcacggggggcatgtgctctgtgtacctgaaggacagtgagaaggttgtcagcatttccagtgagcacctggagcctatcacccccaccaagaacaacaaggtgaaagtgatcctgggcgaggatcgggaagccacgggcgtcctactgagcattgatggtgaggatggcattgtccgtatggaccttgatgagcagctcaagatcctcaacctccgcttcctggggaagctcctggaagcctgaagcaggcagggccggtggacttcgtcggatgaagagtgatcctccttccttccctggcccttggctgtgacacaagatcctcctgcagggctaggcggattgttctggatttccttttgtttttccttttagttttccatcttttccctccctggtgctcattggaatctgagtagagtctgggggagggtccccaccttcctgtacctcctccccacagcttgcttttgttgtaccgtctttcaataaaaagaagctgtttggtctaaaaaaaaaaaaaaaaaaaaaaaaacagaaaaaaaaaaaaagaagggggggctcaccagaactatatcctccttggggggcccctcacgcgagcaggaactactatgtgagtcgtcagggcccgccccctgcgaagggggggagaccacataggcaacgaggcagcggaggaacgaggggacactcacattgccgactgggaacgaccggagttgaatgcccgcatcggcgttggagagacacttccacagccagtgtgagtcgggccaatagaatgggagaggaggcgggacctaccaatgagctggcatgacctgacgacgggtgggatagtgacaatgaaacaaagggcgattgagaggatagcatggaggaaagcgctaacacacatgaacgtgggcggaacaatcccaaaaagggaacactactgagggacgccaccgcggggggggcaccccaaagtcgcaaggaacaaccaatcggcaacagagctggcaaaccacgaccacctcacaggccttggcaacaagaacaggtggggggggcagggacaacccctatctaggaagcgcgggagaaattaccgaaacaggggggggaacgtcgggggggtcgagggaccacggggggacccagcagagagggcgatgccggccacgggagacactagtatgaccactgcgggagcgctgaccaaacaaccggcgtcggaccaccccgacacgcggctgaaccagttactcggccacacgggagtagcccccaccaagccgtgagcaacgaaaccacgggcactgagagctccgccgcggaacggaaaaacccaagcgaccagcagagcaaaaacacgcccgctgaagaggcgcagtccgccacaagagagag

SEQ ID NO: 447471 - DNA, 3702 bp, Homo sapiens
cgtcagccccagtcaggcgtcgtgcgaacagcagctggtaccgaaggcggaggtggagcccgagagggaaccagcggggaaactgaggctcggggtggagcgcaggattgtgggacgcgccaaggctgctgtctttcccagcagcagcggaagatgtcggacagcgaggacagcaacttttccgaggaggaggacagcgagcgcagcagtgacggcgaggaggccgaggtagacgaagagcggcggagtgcagcgggcagtgagaaagaagaagagcctgaggacgaagaggaggaggaagaggaggaggaatatgatgaggaagaggaggaagaagatgatgaccgaccccccaagaaaccccgccatggaggcttcattctggacgaggctgatgttgacgatgagtatgaggacgaggaccagtgggaggatggagcagaggacattctagagaaagaagagattgaagcctccaatatcgataatgttgtcctggatgaagatcgttctggggctcgccgcctgcaaaacctctggagggaccagcgagaagaagaactgggcgagtattacatgaagaaatacgccaagtcatctgtgggagagacggtgtatggaggatctgatgagctctcagacgacatcacccagcagcagctgctcccaggagtcaaggatcccaatctgtggactgtcaaatgtaagattggggaggaacgggccacggccatttccttgatgcgcaagttcattgcctaccagttcacagacacgcccctgcagatcaagtcagtagtggcaccagagcatgtgaagggctacatctacgtggaggcctacaagcagacccacgtgaagcaggccattgagggggtgggcaacctgcggcttggctactggaaccagcagatggtgcccatcaaggagatgacagacgtgctcaaagtggtgaaggaggtggccaacctgaaaccaaagtcctgggtccgcctcaagcggggcatctacaaggatgacattgctcaggtggactacgtggagcccagccagaacaccatctccctgaagatgatcccacgcatcgactacgatcgcatcaaggcccgcatgagcttgaaagactggtttgccaaaaggaagaagtttaagcggcctccacagaggctgtttgatgctgagaagatcaggtccctggggggtgatgttgcctctgatggtgacttcctcatctttgaggggaaccgttacagccggaagggctttctgttcaagagcttcgccatgtctgctgtgatcacggagggtgtgaagccaacactctctgagctggaaaagtttgaggaccagccagagggcattgacctggaggtggtgactgagagcacagggaaggagcgggagcacaacttccaacctggggacaacgtggaggtctgtgagggtgagctcatcaacctgcagggcaagatcctcagcgtggatggcaacaagatcaccatcatgcccaagcatgaggacctcaaggacatgttggagttcccagcccaggaacttagaaaatacttcaagatgggggaccacgtgaaggtgattgctggccgattcgagggcgacacaggcctcattgtgcgggtggaggagaatttcgttatcctgttctctgacctcaccatgcatgagctgaaggtgctcccccgggacctgcagctctgctcagagacagcatcaggtgtggatgttgggggccagcatgaatggggcgagctggtgcagctggatccccagactgtgggtgtcatcgtgcgactagaacgggagaccttccaggtgctgaacatgtacgggaaggtggtgactgtcagacatcaggctgtgacccggaagaaggacaaccgctttgctgtggccttggactcagagcagaacaacatccatgtgaaagacatcgttaaggtcattgatggcccccactcaggccgagaaggggagattcgccatctcttccgaagcttcgccttcctacattgcaagaaactggtggagaacgggggcatgtttgtctgcaagacccgccacctggtgctggctgggggctcaaagccccgtgatgtgaccaacttcaccgtgggtggctttgcgcctatgagtccccggatcagcagccccatgcaccccagtgctggaggtcagcgtggcggctttggtagcccaggtggcggcagtggtggcatgagcaggggccggggccggagggacaacgaactcatcggccagaccgtgcgcatctcccaggggccctacaaaggctacatcggtgtggtgaaagatgccacagagtccacggcccgtgtggagctgcactccacctgccagaccatctctgtggaccgtcagcggctcaccacggtgggctcacggcgcccgggcggcatgacctcgacctatgggaggacgcccatgtatggctcccagacgcccatgtatggctctggctcccgaacacccatgtacggctcacagacacccctccaggatggtagccgcaccccacactacggctcacagacgcccctgcatgatggcagccgcactcctgcccagagtggggcctgggaccccaacaaccccaacacgccgtcacgggctgaggaagaatatgagtatgctttcgatgatgagcccaccccgtccccgcaggcctatgggggaacccccaatccccaaacacctggctacccagacccctcgtccccacaggtcaacccacaatacaacccgcagacgccagggacgccggccatgtacaacacagaccagttctctccctatgctgccccctccccacaaggttcctaccagcccagccccagcccccagagctaccaccaggtggcgccaagcccagcaggctaccagaatacccactccccagccagctaccaccctacaccgtcgcccatggcctatcaggctagccccagcccgagccccgttggctacagtcctatgacacctggagctccctcccctggtggctacaacccacacacgccaggctcaggcatcgagcagaactccagcgactgggtaaccactgacattcaggtgaaggtgcgggacacctacctggatacacaggtggtgggacagacaggtgtcatccgcagtgtcacggtacgtggggcccagggtggtgggtgagcaggcatcctctccttggtaccccctaaactggagacagacctgtccccagatggtgacagcccagagtgggcagagctgggattgaggaagcctagagggcaaggggagctatgtgaacccaaaggaggcatcttacctgatttagcggggaatcagggagggctgcctggggaaggagaaatctgagccaagacctgacaaatgaataggagtaagctaaggaaagtgactggggtgagtgagttccaaatggagggaactgcatgtgcagaggcctggaggtgaggggaacctgggcacattccaggagctgaagggtttgttgtggctggaacataaagagccaaagggggccaagcagtgcttcacacctgtaatcccagcactctgggaggccgaggtgggcagatcacctgaggtcaggagttcaagaccagcctggtcaacgtggtgaaaccctgtctctactaaaaatacaaaaaaaaaaaaaaaaaa

SEQ ID NO: 447472 - DNA, 2703 bp, Homo sapiens
  misc_feature (2703)..(2703): n is a, c, g, or t
cgtcagccccagtcaggcgtcgtgcgaacagcagctggtaccgaaggcggaggtggagcccgagagggaaccagcggggaaactgaggctcggggtggagcgcaggattgtgggacgcgccaaggctgctgtctttcccagcagcagcggaagatgtcggacagcgaggacagcaacttttccgaggaggaggacagcgagcgcagcagtgacggcgaggaggccgaggtagacgaagagcggcggagtgcagcgggcagtgagaaagaagaagagcctgaggacgaagaggaggaggaagaggaggaggaatatgatgaggaagaggaggaagaagatgatgaccgaccccccaagaaaccccgccatggaggcttcattctggacgaggctgatgttgacgatgagtatgaggacgaggaccagtgggaggatggagcagaggacattctagagaaagaagagattgaagcctccaatatcgataatgttgtcctggatgaagatcgttctggggctcgccgcctgcaaaacctctggagggaccagcgagaagaagaactgggcgagtattacatgaagaaatacgccaagtcatctgtgggagagacggtgtatggaggatctgatgagctctcagacgacatcacccagcagcagctgctcccaggagtcaaggatcccaatctgtggactgtcaaatgtaagattggggaggaacgggccacggccatttccttgatgcgcaagttcattgcctaccagttcacagacacgcccctgcagatcaagtcagtagtggcaccagagcatgtgaagggctacatctacgtggaggcctacaagcagacccacgtgaagcaggccattgagggggtgggcaacctgcggcttggctactggaaccagcagatggtgcccatcaaggagatgacagacgtgctcaaagtggtgaaggaggtggccaacctgaaaccaaagtcctgggtccgcctcaagcggggcatctacaaggatgacattgctcaggtggactacgtggagcccagccagaacaccatctccctgaagatgatcccacgcatcgactacgatcgcatcaaggcccgcatgagcttgaaagactggtttgccaaaaggaagaagtttaagcggcctccacagaggctgtttgatgctgagaagatcaggtccctggggggtgatgttgcctctgatggtgacttcctcatctttgaggggaaccgttacagccggaagggctttctgttcaagagcttcgccatgtctgctgtgatcacggagggtgtgaagccaacactctctgagctggaaaagtttgaggaccagccagagggcattgacctggaggtggtgactgagagcacagggaaggagcgggagcacaacttccaacctggggacaacgtggaggtctgtgagggtgagctcatcaacctgcagggcaagatcctcagcgtggatggcaacaagatcaccatcatgcccaagcatgaggacctcaaggacatgttggagttcccagcccaggaacttagaaaatacttcaagatgggggaccacgtgaaggtgattgctggccgattcgagggcgacacaggcctcattgtgcgggtggaggagaatttcgttatcctgttctctgacctcaccatgcatgagctgaaggtgctcccccgggacctgcagctctgctcagagacagcatcaggtgtggatgttgggggccagcatgaatggggcgagctggtgcagctggatccccagactgtgggtgtcatcgtgcgactagaacgggagaccttccaggtgctgaacatgtacgggaaggtggtgactgtcagacatcaggctgtgacccggaagaaggacaaccgctttgctgtggccttggactcagagcagaacaacatccatgtgaaagacatcgttaaggtcattgatggcccccactcaggccgagaaggggagattcgccatctcttccgaagcttcgccttcctacattgcaagaaactggtggagaacgggggcatgtttgtctgcaagacccgccacctggtgctggctgggggctcaaagccccgtgatgtgaccaacttcaccgtgggtggctttgcgcctatgagtccccggatcagcagccccatgcaccccagtgctggaggtcagcgtggcggctttggtagcccaggtggcggcagtggtggcatgagcaggggccggggccggagggacaacgaactcatcggccagaccgtgcgcatctcccaggggccctacaaaggctacatcggtgtggtgaaagatgccacagagtccacggcccgtgtggagctgcactccacctgccagaccatctctgtggaccgtcagcggctcaccacggtgggctcacggcgcccgggcggcatgacctcgacctatgggaggacgcccatgtatggctcccagacgcccatgtatggctctggctcccgaacacccatgtacggctcacagacacccctccaggatggtagccgcaccccacactacggctcacagacgcccctgcatgatggcagccgcactcctgcccagagtggggcctgggaccccaacaaccccaacacgccgtcacgacacagcggttttgtggtttcgccagacctggtacgagccgaattcgaataatgaaan

SEQ ID NO: 447473 - DNA, 2776 bp, Homo sapiens
cgtcagccccagtcaggcgtcgtgcgaacagcagctggtaccgaaggcggaggtggagcccgagagggaaccagcggggaaactgaggctcggggtggagcgcaggattgtgggacgcgccaaggctgctgtctttcccagcagcagcggaagatgtcggacagcgaggacagcaacttttccgaggaggaggacagcgagcgcagcagtgacggcgaggaggccgaggtagacgaagagcggcggagtgcagcgggcagtgagaaagaagaagagcctgaggacgaagaggaggaggaagaggaggaggaatatgatgaggaagaggaggaagaagatgatgaccgaccccccaagaaaccccgccatggaggcttcattctggacgaggctgatgttgacgatgagtatgaggacgaggaccagtgggaggatggagcagaggacattctagagaaagaagagattgaagcctccaatatcgataatgttgtcctggatgaagatcgttctggggctcgccgcctgcaaaacctctggagggaccagcgagaagaagaactgggcgagtattacatgaagaaatacgccaagtcatctgtgggagagacggtgtatggaggatctgatgagctctcagacgacatcacccagcagcagctgctcccaggagtcaaggatcccaatctgtggactgtcaaatgtaagattggggaggaacgggccacggccatttccttgatgcgcaagttcattgcctaccagttcacagacacggcccctgcatgatggcagccgcactcctgcccagagtggggcctgggaccccaacaaccccaacacgccgtcacgggctgaggaagaatatgagtatgctttcgatgatgagcccaccccgtccccgcaggcctatgggggaacccccaatccccaaacacctggctacccagacccctcgtccccacaggtcaacccacaatacaacccgcagacgccagggacgccggccatgtacaacacagaccagttctctccctatgctgccccctccccacaaggttcctaccagcccagccccagcccccagagctaccaccaggtggcgccaagcccagcaggctaccagaatacccactccccagccagctaccaccctacaccgtcgcccatggcctatcaggctagccccagcccgagccccgttggctacagtcctatgacacctggagctccctcccctggtggctacaacccacacacgccaggctcaggcatcgagcagaactccagcgactgggtaaccactgacattcaggtgaaggtgcgggacacctacctggatacacaggtggtgggacagacaggtgtcatccgcagtgtcacggggggcatgtgctctgtgtacctgaaggacagtgagaaggttgtcagcatttccagtgagcacctggagcctatcacccccaccaagaacaacaaggtgaaagtgatcctgggcgaggatcgggaagccacgggcgtcctactgagcattgatggtgaggatggcattgtccgtatggaccttgatgagcagctcaagatcctcaacctccgcttcctggggaagctcctggaagcctgaagcaggcagggccggtggacttcgtcggatgaagagtgatcctccttccttccctggcccttggctgtgacacaagatcctcctgcagggctaggcggattgttctggatttccttttgtttttccttttagttttccatcttttccctccctggtgctcattggaatctgagtagagtctgggggagggtccccaccttcctgtacctcctccccacagcttgcttttgttgtaccgtctttcaataaaaagaagctgtttggtctaaaaaaaaaaaaaaaaaaaaaaaaacagaaaaaaaaaaaaagaagggggggctcaccagaactatatcctccttggggggcccctcacgcgagcaggaactactatgtgagtcgtcagggcccgccccctgcgaagggggggagaccacataggcaacgaggcagcggaggaacgaggggacactcacattgccgactgggaacgaccggagttgaatgcccgcatcggcgttggagagacacttccacagccagtgtgagtcgggccaatagaatgggagaggaggcgggacctaccaatgagctggcatgacctgacgacgggtgggatagtgacaatgaaacaaagggcgattgagaggatagcatggaggaaagcgctaacacacatgaacgtgggcggaacaatcccaaaaagggaacactactgagggacgccaccgcggggggggcaccccaaagtcgcaaggaacaaccaatcggcaacagagctggcaaaccacgaccacctcacaggccttggcaacaagaacaggtggggggggcagggacaacccctatctaggaagcgcgggagaaattaccgaaacaggggggggaacgtcgggggggtcgagggaccacggggggacccagcagagagggcgatgccggccacgggagacactagtatgaccactgcgggagcgctgaccaaacaaccggcgtcggaccaccccgacacgcggctgaaccagttactcggccacacgggagtagcccccaccaagccgtgagcaacgaaaccacgggcactgagagctccgccgcggaacggaaaaacccaagcgaccagcagagcaaaaacacgcccgctgaagaggcgcagtccgccacaagagagag

SEQ ID NO: 447474 - DNA, 1902 bp, Homo sapiens
cgtcagccccagtcaggcgtcgtgcgaacagcagctggtaccgaaggcggaggtggagcccgagagggaaccagcggggaaactgaggctcggggtggagcgcaggattgtgggacgcgccaaggctgctgtctttcccagcagcagcggaagatgtcggacagcgaggacagcaacttttccgaggaggaggacagcgagcgcagcagtgacggcgaggaggccgaggtagacgaagagcggcggagtgcagcgggcagtgagaaagaagaagagcctgaggacgaagaggaggaggaagaggaggaggaatatgatgaggaagaggaggaagaagatgatgaccgaccccccaagaaaccccgccatggaggcttcattctggacgaggctgatgttgacgatgagtatgaggacgaggaccagtgggaggatggagcagaggacattctagagaaagaagagattgaagcctccaatatcgataatgttgtcctggatgaagatcgttctggggctcgccgcctgcaaaacctctggagggaccagcgagaagaagaactgggcgagtattacatgaagaaatacgccaagtcatctgtgggagagacggtgtatggaggatctgatgagctctcagacgacatcacccagcagcagctgctcccaggagtcaaggatcccaatctgtggactgtcaaatgtaagattggggaggaacgggccacggccatttccttgatgcgcaagttcattgcctaccagttcacagacacgcccctgcagatcaagtcagtagtggcaccagagcatgtgaagggctacatctacgtggaggcctacaagcagacccacgtgaagcaggccattgagggggtgggcaacctgcggcttggctactggaaccagcagatggtgcccatcaaggagatgacagacgtgctcaaagtggtgaaggaggtggccaacctgaaaccaaagtcctgggtccgcctcaagcggggcatctacaaggatgacattgctcaggtggactacgtggagcccagccagaacaccatctccctgaagatgatcccacgcatcgactacgatcgcatcaaggcccgcatgagcttgaaagactggtttgccaaaaggaagaagtttaagcggcctccacagaggctgtttgatgctgagaagatcaggtccctggggggtgatgttgcctctgatggtgacttcctcatctttgaggggaaccgttacagccggaagggctttctgttcaagagcttcgccatgtctgctgtgatcacggagggtgtgaagccaacactctctgagctggaaaagtttgaggaccagccagagggcattgacctggaggtggtgactgagagcacagccctacgactgcccctgcagggaaggagcgggagcacaacttccaacctggggacaacgtggaggtctgtgagggtgagctcatcaacctgcagggcaagatcctcagcgtggatggcaacaagatcaccatcatgcccaagcatgaggacctcaaggacatgttggagttcccagcccaggaacttagaaaatacttcaagatgggggaccacgtgaaggtgattgctggccgattcgagggcgacacaggcctcattgtgcgggtggaggagaatttcgttatcctgttctctgacctcaccatgcatgagctgaaggtgctcccccgggacctgcagctctgctcagagacagcatcaggtgtggatgttgggggccagcatgaatggggcgagctggtgcagctggatccccagactgtgggtgtcatcgtgcgactagaacgggagaccttccaggtgctgacatgtacgggaaggtgtgactgtctcacatatataagacccctca

SEQ ID NO: 447475 - DNA, 1610 bp, Homo sapiens
cgtcagccccagtcaggcgtcgtgcgaacagcagctggtaccgaaggcggaggtggagcccgagagggaaccagcggggaaactgaggctcggggtggagcgcaggattgtgggacgcgccaaggctgctgtctttcccagcagcagcggaagatgtcggacagcgaggacagcaacttttccgaggaggaggacagcgagcgcagcagtgacggcgaggaggccgaggtagacgaagagcggcggagtgcagcgggcagtgagaaagaagaagagcctgaggacgaagaggaggaggaagaggaggaggaatatgatgaggaagaggaggaagaagatgatgaccgaccccccaagaaaccccgccatggaggcttcattctggacgaggctgatgttgacgatgagtatgaggacgaggaccagtgggaggatggagcagaggacattctagagaaagaagagattgaagcctccaatatcgataatgttgtcctggatgaagatcgttctggggctcgccgcctgcaaaacctctggagggaccagcgagaagaagaactgggcgagtattacatgaagaaatacgccaagtcatctgtgggagagacggtgtatggaggatctgatgagctctcagacgacatcacccagcagcagctgctcccaggagtcaaggatcccaatctgtggactgtcaaatgtaagattggggaggaacgggccacggccatttccttgatgcgcaagttcattgcctaccagttcacagacacgcccctgcagatcaagtcagtagtggcaccagagcatgtgaagggctacatctacgtggaggcctacaagcagacccacgtgaagcaggccattgagggggtgggcaacctgcggcttggctactggaaccagcagatggtgcccatcaaggagatgacagacgtgctcaaagtggtgaaggaggtggccaacctgaaaccaaagtcctgggtccgcctcaagcggggcatctacaaggatgacattgctcaggtggactacgtggagcccagccagaacaccatctccctgaagatgatcccacgcatcgactacgatcgcatcaaggcccgcatgagcttggtactcaggggaatctgtggcctgggggggagggagtgtgctcgatcccactggtggccaagccccctccctcacccttcccacccatgcccctttcctccatagaaagactggtttgccaaaaggaagaagtttaagcggcctccacagaggctgtttgatgctgagaagatcaggtgcgtgtccttggggactggctgggctgggtccccagggccggtgtgtagaatgtgccttttgcaggttcctccccaggggtggccccgccacaggtttagcctgtgaattggttagcttggcagtatagcctcaggcaagtcacttcacatccctgtgcctcagtttcttctgctataaagattgatgaggctgggcgcagcgggagggagcactttggaaggctaaggcaggaggcttgcttgaggcaaggagttcgagaccagcctgggcaacataatgagatcccatcttttaaaataataataataata

SEQ ID NO: 447476 - DNA, 900 bp, Homo sapiens
cgtcagccccagtcaggcgtcgtgcgaacagcagctggtaccgaaggcggaggtggagcccgagagggaaccagcggggaaactgaggctcggggtggagcgcaggattgtgggacgcgccaaggctgctgtctttcccagcagcagcggaagatgtcggacagcgaggacagcaacttttccgaggaggaggacagcgagcgcagcagtgacggcgaggaggccgaggtagacgaagagcggcggagtgcagcgggcagtgagaaagaagaagagcctgaggacgaagaggaggaggaagaggaggaggaatatgatgaggaagaggaggaagaagatgatgaccgaccccccaagaaaccccgccatggaggcttcattctggacgaggctgatgttgacgatgagtatgaggacgaggaccagtgggaggatggagcagaggacattctagagaaagaagagattgaagcctccaatatcgataatgttgtcctggatgaagatcgttctggggctcgccgcctgcaaaacctctggagggaccagcgagaagaagaactgggcgagtattacatgaagaaatacgccaagtcatctgtgggagagacggtgtatggaggatctgatgagctctcagacgacatcacccagcagcagctgctcccaggagtcaaggatcccaatctgtggactgtcaaatgtaagattggggaggaacgggccacggccatttccttgatgcgcaagttcattgcctaccagttcacagacacgcccctgcagatcaagtcagtagtggcaccagagcatgtgaagggctacatctacgtggagggatgacgcattctggaggtggacggtggtaatggatacgcatgatgctgttgtctgctgcag

SEQ ID NO: 447477 - DNA, 1263 bp, Homo sapiens
agagaacagattcggaaactggggaggtctagcatgtggcgtaggagggggtcctcactccgcttcgcgattgccaaaacgagcctgccggaagcgccctaaggggttttcttctcccagggaaccagcggggaaactgaggctcggggtggagcgcaggattgtgggacgcgccaaggctgctgtctttcccagcagcagcggaagatgtcggacagcgaggacagcaatttttccttttagttttccatcttttccctccctggtgctcattggaatctgagtagagtctgggggagggtccccaccttcctgtacctcctccccacagcttgcttttgttgtaccgtctttcaataaaaagaagctgtttggtctaaaaaaaaaaaaaaaaaaaaaaaaacagaaaaaaaaaaaaagaagggggggctcaccagaactatatcctccttggggggcccctcacgcgagcaggaactactatgtgagtcgtcagggcccgccccctgcgaagggggggagaccacataggcaacgaggcagcggaggaacgaggggacactcacattgccgactgggaacgaccggagttgaatgcccgcatcggcgttggagagacacttccacagccagtgtgagtcgggccaatagaatgggagaggaggcgggacctaccaatgagctggcatgacctgacgacgggtgggatagtgacaatgaaacaaagggcgattgagaggatagcatggaggaaagcgctaacacacatgaacgtgggcggaacaatcccaaaaagggaacactactgagggacgccaccgcggggggggcaccccaaagtcgcaaggaacaaccaatcggcaacagagctggcaaaccacgaccacctcacaggccttggcaacaagaacaggtggggggggcagggacaacccctatctaggaagcgcgggagaaattaccgaaacaggggggggaacgtcgggggggtcgagggaccacggggggacccagcagagagggcgatgccggccacgggagacactagtatgaccactgcgggagcgctgaccaaacaaccggcgtcggaccaccccgacacgcggctgaaccagttactcggccacacgggagtagcccccaccaagccgtgagcaacgaaaccacgggcactgagagctccgccgcggaacggaaaaacccaagcgaccagcagagcaaaaacacgcccgctgaagaggcgcagtccgccacaagagagag

SEQ ID NO: 447478 - DNA, 2184 bp, Homo sapiens
ggcacgaggcggcggcgggcgcggcctcctgggcgcggggcggctgcgaggagcaggaaagtggtcactaactgccaagagagaatccagcattggaagaaggtagataatgactataatgcccttcgagaaagactcagcaccttgcctgataaattgtcttataatataatggtaccatttggcccttttgccttcatgccaggaaaacttgtccatactaatgaagtcactgttttactgggggacaactggtttgcaaagtgctcagcaaagcaggctgtaggtttagttgagcaccggaaagaacatgtaagaaaaacaatagatgacttaaaaaaagtgatgaaaaattttgaatccagagttgaattcacagaagatttgcagaaaatgagcgatgctgcaggtgatattgttgacatacgagaagaaattaaatgtgacttcgaatttaaagcaaaacaccgaattgctcataaaccgcattccaaaccaaaaacttcagatatttttgaagcagatattgcaaatgatgtgaaatccaaggatttgctagctgataaagaactgtgggctcgacttgaagaactagagagacaggaagaattgctgggtgaacttgatagtaagcctgatactgtgattgcaaatggagaagatacgacatcttctgaagaggaaaaggaagatcgtaacacaaatgtgaatgcgatgcatcaagtaacagactctcatactccttgtcataaggatgttgcaagttcagaaccattcagtggtcaagtgaatagtcagttgaactgttcagtgaatggttccagttcttaccacagtgatgatgatgatgatgatgatgacgacgacgacgacaacattgacgacgatgatggtgataacgaccatgaggctttaggggttggagataattctataccaacaatatatttttcacatactgttgagcctaagagggtccgaataaatactggaaagaataccactttaaaattcagtgaaaagaaagaagaagccaaacgtaaacgaaagaacagcactggcagtggccactctgcccaggagctgccgaccatcaggacgcctgcagacatttacagagcctttgttgatgttgtgaatggagaatatgtccctcgcaaatccatcctgaagtctcgaagtagagagaatagtgtgtgtagcgacactagtgaaagcagtgctgctgaatttgatgataggcggggagttttgaggagtatcagctgcgaagaagccacttgcagtgacaccagtgagagcattttggaagaggaaccacaagaaaatcaaaagaaacttttgcccttatcagtaacacctgaggctttttctggaactgttatagaaaaagaatttgtatcaccttccttaacaccacccccagccattgctcatcccgcactacccactattccagaacgaaaggaagttctgttggaagcatctgaagaaactggaaagagggtttcaaagtttaaagctgccagattgcaacagaaagactaggccctgtctaggaaatgggaatttacatcctaaaacctagttgttcatttgtttagagtatctatagcaaaataggttacatgtagtttgaaataaggtatcctgagttactttggcaacaagttcttttacccttacccgtggtatttgaaaaaaatcaaggtaactgtctgaatactttaatatcagcttgttttgtgaattctctgaatactgtcaacactcttatctaagtttgcctttatgatgcagtggcagcattttgaattacttttcaaagaatactgttcatatgcattgtttttgtgtttcaaactaaatacaggcagttttgtgccagctgtgatattgtgcataccatatggaccattttaaagaaaattttaaaatttcaaatagattcaacaattacattacttgctttcacattttaaaggcactttaaaaaaatctacttctcttgtaggttttgcggctagttggctattcaagaaacctcgcccctctgaatgtcatactgtaatctttaaggaagaaagctacatgaattaattgtactctatgggaaaatttctttggaaagatattttgtaaaacttttttttccaagtaaaaactttatgaaacttggtctca

SEQ ID NO: 447479 - DNA, 717 bp, Homo sapiens
gatactctagacgcccctccgatctagcatactcaactagataccttatttcaaaactacatgtaacctattttgctatagatactctaaacaaatagttacatgtagtttgaaataaggtatcctattttgtttagagtatctatagcaaaataggttacatgtagtttgaaataaggtatcctgagttactttggcaacaagttcttttacccttacccgtggtatttgaaaaaaatcaaggtaactgtctgaatactttaatatcagcttgttttgtgaattctctgaatactgtcaacactcttatctaagtttgcctttatgatgcagtggcagcattttgaattacttttcaaagaatactgttcatatgcattgtttttgtgtttcaaactaaatacaggcagttttgtgccagctgtgatattgtgcataccatatggaccattttaaagaaaattttaaaatttcaaatagattcaacaattacattacttgctttcacattttaaaggcactttaaaaaaatctacttctcttgtaggttttgcggctagttggctattcaagaaacctcgcccctctgaatgtcatactgtaatctttaaggaagaaagctacatgaattaattgtactctatgggaaaatttctttggaaagatattttgtaaaacttttttttccaagtaaaaactttatgaaacttggtctca

SEQ ID NO: 447480 - DNA, 475 bp, Homo sapiens
attcccagtgggtcttctcactcttttccaggctccttggaggtcactgccctgatgacaacatggtcttcccttcaaggaagccacgtttctaagagggctctggcatatgcattggcaaccagtgacctggaaatgatatctgtaaatttctggctacaaaaaggtgttctttactttcaaatctcctgatggatgctgccataggaagcacaagagggctgaaaccaatacaggagtctgtgctaatccctcaggactcaaaaatgccccaatttttggaggacaagggtcatcttgcccaccttgcaaccagccagccattccaggaaagctattcctgcagcctcatggtagggtgagggctgagaaatggggcatggcagctgttttgcatccaccctgttgctgttctcttaccaacaaccagcagcctcttttttcatcaagaactcccctggctgtttattcatgt

SEQ ID NO: 447481 - DNA, 3004 bp, Homo sapiens
cagtaattaatgaacatgcaaaatataattgtatatttcaactcactaaaaaggcacagaaagagttgaatttgctaaaattaaatgtgcttatgaaacagctctagtacatgaattaagctcctagatacagatgcagcgccaaacgacggggagggagatggggcactcaaggcgacacgcggctcttgttgccgagcgtttcctgggcgtggagcttctatagaatgtaagctttttttttttaaggttccaaagcctatatttagtgctttcatatacgtaatctcaaaaaaaaaaaaagaaagaaatatcggcataaaatgtaagcttccagagggatacaaacgcagcccagcgcggacaccgccagccccagccacgcggttcgcatcaagcgcactcccctgggggcggggcctgcgcgagctgggcgtgtcgggggcggggcctgcgcgcttgcttccggcgtgccgcgagaggcggggcgtgtggggaggcgcggccgccacgcgacgcctggctgggcccgcaccggagaggcgtctcggtacctggcaggcggcctgctactcggagcccgctgcggggcggcggcggcggggacatgcacgtgtgagatgcggcagcgggcggcgcggacgcgaacagcagcggcggcggcgggcgcggcctcctgggcgcggggcgcgcggtgcctgagggcgggcgcgcgggcgctgggcaactgccggccgcgccgcctgcgcaggcgctggttcaggactcacacgccgcgctgaggcccgcgggcccgtcatggaggcgcccaccgtggagacgccccccgacccctcgcccccttcggccccggcccctgccctggttccgttgcgcgccccggatgtggcgcggctgcgcgaggagcaggaaaaggaagaaggtagataatgactataatgcccttcgagaaagactcagcaccttgcctgataaattgtcttataatataatggtaccatttggcccttttgccttcatgccaggaaaacttgtccatactaatgaagtcactgttttactgggggacaactggtttgcaaagtgctcagcaaagcaggctgtaggtttagttgagcaccggaaagaacatgtaagaaaaacaatagatgacttaaaaaaagtgatgaaaaattttgaatccagagttgaattcacagaagatttgcagaaaatgagcgatgctgcaggtgatattgttgacatacgagaagaaattaaatgtgacttcgaatttaaagcaaaacaccgaattgctcataaaccgcattccaaaccaaaaacttcagatatttttgaagcagatattgcaaatgatgtgaaatccaaggatttgctagctgataaagaactgtgggctcgacttgaagaactagagagacaggaagaattgctgggtgaacttgatagtaagcctgatactgtgattgcaaatggagaagatacgacatcttctgaagaggaaaaggaagatcgtaacacaaatgtgaatgcgatgcatcaagtaacagactctcatactccttgtcataaggatgttgcaagttcagaaccattcagtggtcaagtgaatagtcagttgaactgttcagtgaatggttccagttcttaccacagtgatgatgatgatgatgatgatgacgacgacgacgacaacattgacgacgatgatggtgataacgaccatgaggctttaggggttggagataattctataccaacaatatatttttcacatactgttgagcctaagagggtccgaataaatactggaaagaataccactttaaaattcagtgaaaagaaagaagaagccaaacgtaaacgaaagaacagcactggcagtggccactctgcccaggagctgccgaccatcaggacgcctgcagacatttacagagcctttgttgatgttgtgaatggagaatatgtccctcgcaaatccatcctgaagtctcgaagtagagagaatagtgtgtgtagcgacactagtgaaagcagtgctgctgaatttgatgataggcggggagttttgaggagtatcagctgcgaagaagccacttgcagtgacaccagtgagagcattttggaagaggaaccacaagaaaatcaaaagaaacttttgcccttatcagtaacacctgaggctttttctggaactgttatagaaaaagaatttgtatcaccttccttaacaccacccccagccattgctcatcccgcactacccactattccagaacgaaaggaagttctgttggaagcatctgaagaaactggaaagagggtttcaaagtttaaagctgccagattgcaacagaaagactaggccctgtctaggaaatgggaatttacatcctaaaacctagttgttcatttgtttagagtatctatagcaaaataggttacatgtagtttgaaataaggtatcctgagttactttggcaacaagttcttttacccttacccgtggtatttgaaaaaaatcaaggtaactgtctgaatactttaatatcagcttgttttgtgaattctctgaatactgtcaacactcttatctaagtttgcctttatgatgcagtggcagcattttgaattacttttcaaagaatactgttcatatgcattgtttttgtgtttcaaactaaatacaggcagttttgtgccagctgtgatattgtgcataccatatggaccattttaaagaaaattttaaaatttcaaatagattcaacaattacattacttgctttcacattttaaaggcactttaaaaaaatctacttctcttgtaggttttgcggctagttggctattcaagaaacctcgcccctctgaatgtcatactgtaatctttaaggaagaaagctacatgaattaattgtactctatgggaaaatttctttggaaagatattttgtaaaacttttttttccaagtaaaaactttatgaaacttggtctca

SEQ ID NO: 447482 - DNA, 3538 bp, Homo sapiens
gggtgctttgcttatattctgttatatatttattataaatatattatactaatatgagatacacaataacttatatatgaactaggtttatgatgagctaagtttgtgatgaagttgcacaaaattgtggcttagaagcaatataatgttgtctctctaacataaatgtcagaacgttaatagtccagggctggacagcaactgtgacccataaagacctctcaagttccattctctcacttcttgcattatactggactttcatttctaagatcactttatgggctaagacaattcctccaaattgagtcttcataaacatactctatgcaacagaaaggagaagagacaaagaaagcagggttaaaggcttatgctagctattgtatgagaaagattcacacagtaatcacgtttgtataccaatgtttgatggtttgtcactcagtcatgtcttagctgtcaatgaggctaggaaatgtagattttactttggggagtaatgttccctgtgtgtatttggtgttttctgtcaacaggaagaaggtagataatgactataatgcccttcgagaaagactcagcaccttgcctgataaattgtcttataatataatggtaccatttggcccttttgccttcatgccaggaaaacttgtccatactaatgaagtcactgttttactgggggacaactggtttgcaaagtgctcagcaaagcaggctgtaggtttagttgagcaccggaaagaacatgtaagaaaaacaatagatgacttaaaaaaagtgatgaaaaattttgaatccagagttgaattcacagaagatttgcagaaaatgagcgatgctgcaggtgatattgttgacatacgagaagaaattaaatgtgacttcgaatttaaagcaaaacaccgaattgctcataaaccgcattccaaaccaaaaacttcagatatttttgaagcagatattgcaaatgatgtgaaatccaaggatttgctagctgataaagaactgtgggctcgacttgaagaactagagagacaggaagaattgctgggtgaacttgatagtaagcctgatactgtgattgcaaatggagaagatacgacatcttctgaagaggaaaaggaagatcgtaacacaaatgtgaatgcgatgcatcaagtaacagactctcatactccttgtcataaggatgttgcaagttcagaaccattcagtggtcaagtgaatagtcagttgaactgttcagtgaatggttccagttcttaccacagtgatgatgatgatgatgatgatgacgacgacgacgacaacattgacgacgatgatggtgataacgaccatgaggctttaggggttggagataattctataccaacaatatatttttcacatactgttgagcctaagagggtccgaataaatactggaaagaataccactttaaaattcagtgaaaagaaagaagaagccaaacgtaaacgaaagaacagcactggcagtggccactctgcccaggagctgccgaccatcaggacgcctgcagacatttacagagcctttgttgatgttgtgaatggagaatatgtccctcgcaaatccatcctgaagtctcgaagtagagagaatagtgtgtgtagcgacactagtgaaagcagtgctgctgaatttgatgataggcggggagttttgaggagtatcagctgcgaagaagccacttgcagtgacaccagtgagagcattttggaagaggaaccacaagaaaatcaaaagaaacttttgcccttatcagtaacacctgaggctttttctggaactgttatagaaaaagaatttgtatcaccttccttaacaccacccccagccattgctcatcccgcactacccactattccagaacgaaaggaagttctgttggaagcatctgaagaaactggaaagagggtttcaaagtttaaagctgccagattgcaacagaaagactaggccctgtctaggaaatgggaatttacatcctaaaacctagttgttcatttgtttagagtatctatagcaaaataggttacatgtagtttgaaataaggtatcctgagttactttggcaacaagttcttttacccttacccgtggtatttgaaaaaaatcaaggtaactgtctgaatactttaatatcagcttgttttgtgaattctctgaatactgtcaacactcttatctaagtttgcctttatgatgcagtggcagcattttgaattacttttcaaagaatactgttcatatgcattgtttttgtgtttcaaactaaatacaggcagttttgtgccagctgtgatattgtgcataccatatggaccattttaaagaaaattttaaaatttcaaatagattcaacaattacattacttgctttcacattttaaaggcactttaaaaaaatctacttctcttgtaggttttgcggctagttggctattcaagaaacctcgcccctctgaatgtcatactgtaatctttaaggaagaaagctacatgaattaattgtactctatgggaaaatttctttggaaagatattttgtaaaacttttttttccaagtaaaaactttatgaaacttggtctcaaaaatgttgtgaactttatgattcaaaattgagtacagatatgtccttgattcatatgtatgctacatgtatcacacaacagatctggaattctttcagttcctcagatacttctcccttagtttttgcagtttcactgggattatgttttgggaaacaaggaaaggtctagatgcttaaacattttaaataaaaattccttacagtttcatcttcccaacattttcattctttaaggctactttcctactaactgaaataacacatttacttttaccacaattcctcaaaataaatttattctaacattgaaaataacattacaagttaatcattagcttgatgcatgctaaaatgtagcttttaaaaagcattctgcattagtactaaaataagccatcaatgccagtccaccctctctattcatggctaaatatttaaaggttatttatagcttctttaatgaattcttcttaaacaaagtgaaattatgtcctagaaaagtagaagctattcgtaactagagcagtgcaactttaaagttttatgaatatgtattttaatgacaagggggcgagcttgcatccccactagttaatggataattcaaaccgaggactgattttgaaagatcacctaaaaatgtagatttgttctttagtaaatttagatcaactatgcatatattttgtaggtaaatctttcagtccatgccccaaccctcaccaaaaccaaagcagaaattacacacacaaagatgctcccgttaggaattgctattcacatgaggctttctgtgctagatttttttctcagaaacaaactttactgtaggactattgtggtgttcttaacagatttgtaatttcaagatgcgtgtcattaaataatttttcatgttcaaagactt

SEQ ID NO: 447483 - DNA, 2923 bp, Homo sapiens
cagtaattaatgaacatgcaaaatataattgtatatttcaactcactaaaaaggcacagaaagagttgaatttgctaaaattaaatgtgcttatgaaacagctctagtacatgaattaagctcctagatacagatgcagcgccaaacgacggggagggagatggggcactcaaggcgacacgcggctcttgttgccgagcgtttcctgggcgtggagcttctatagaatgtaagctttttttttttaaggttccaaagcctatatttagtgctttcatatacgtaatctcaaaaaaaaaaaaagaaagaaatatcggcataaaatgtaagcttccagagggatacaaacgcagcccagcgcggacaccgccagccccagccacgcggttcgcatcaagcgcactcccctgggggcggggcctgcgcgagctgggcgtgtcgggggcggggcctgcgcgcttgcttccggcgtgccgcgagaggcggggcgtgtggggaggcgcggccgccacgcgacgcctggctgggcccgcaccggagaggcgtctcggtacctggcaggcggcctgctactcggagcccgctgcggggcggcggcggcggggacatgcacgtgtgagatgccgcctgcgcaggcgctggttcaggactcacacgccgcgctgaggcccgcgggcccgtcatggaggcgcccaccgtggagacgccccccgacccctcgcccccttcggccccggcccctgccctggttccgttgcgcgccccggatgtggcgcggctgcgcgaggagcaggaaaaggtggtcactaactgccaagagagaatccagcattggaagaaggtagataatgactataatgcccttcgagaaagactcagcaccttgcctgataaattgtcttataatataatggtaccatttggcccttttgccttcatgccaggaaaacttgtccatactaatgaagtcactgttttactgggggacaactggtttgcaaagtgctcagcaaagcaggctgtaggtttagttgagcaccggaaagaacatgtaagaaaaacaatagatgacttaaaaaaagtgatgaaaaattttgaatccagagttgaattcacagaagatttgcagaaaatgagcgatgctgcaggtgatattgttgacatacgagaagaaattaaatgtgacttcgaatttaaagcaaaacaccgaattgctcataaaccgcattccaaaccaaaaacttcagatatttttgaagcagatattgcaaatgatgtgaaatccaaggatttgctagctgataaagaactgtgggctcgacttgaagaactagagagacaggaagaattgctgggtgaacttgatagtaagcctgatactgtgattgcaaatggagaagatacgacatcttctgaagaggaaaaggaagatcgtaacacaaatgtgaatgcgatgcatcaagtaacagactctcatactccttgtcataaggatgttgcaagttcagaaccattcagtggtcaagtgaatagtcagttgaactgttcagtgaatggttccagttcttaccacagtgatgatgatgatgatgatgatgacgacgacgacgacaacattgacgacgatgatggtgataacgaccatgaggctttaggggttggagataattctataccaacaatatatttttcacatactgttgagcctaagagggtccgaataaatactggaaagaataccactttaaaattcagtgaaaagaaagaagaagccaaacgtaaacgaaagaacagcactggcagtggccactctgcccaggagctgccgaccatcaggacgcctgcagacatttacagagcctttgttgatgttgtgaatggagaatatgtccctcgcaaatccatcctgaagtctcgaagtagagagaatagtgtgtgtagcgacactagtgaaagcagtgctgctgaatttgatgataggcggggagttttgaggagtatcagctgcgaagaagccacttgcagtgacaccagtgagagcattttggaagaggaaccacaagaaaatcaaaagaaacttttgcccttatcagtaacacctgaggctttttctggaactgttatagaaaaagaatttgtatcaccttccttaacaccacccccagccattgctcatcccgcactacccactattccagaacgaaaggaagttctgttggaagcatctgaagaaactggaaagagggtttcaaagtttaaagctgccagattgcaacagaaagactaggccctgtctaggaaatgggaatttacatcctaaaacctagttgttcatttgtttagagtatctatagcaaaataggttacatgtagtttgaaataaggtatcctgagttactttggcaacaagttcttttacccttacccgtggtatttgaaaaaaatcaaggtaactgtctgaatactttaatatcagcttgttttgtgaattctctgaatactgtcaacactcttatctaagtttgcctttatgatgcagtggcagcattttgaattacttttcaaagaatactgttcatatgcattgtttttgtgtttcaaactaaatacaggcagttttgtgccagctgtgatattgtgcataccatatggaccattttaaagaaaattttaaaatttcaaatagattcaacaattacattacttgctttcacattttaaaggcactttaaaaaaatctacttctcttgtaggttttgcggctagttggctattcaagaaacctcgcccctctgaatgtcatactgtaatctttaaggaagaaagctacatgaattaattgtactctatgggaaaatttctttggaaagatattttgtaaaacttttttttccaagtaaaaactttatgaaacttggtctca

SEQ ID NO: 447484 - DNA, 2241 bp, Homo sapiens
attcccagtgggtcttctcactcttttccaggctccttggaggtcactgccctgatgacaacatggtcttcccttcaaggaagccacgtttctaagagggctctggcatatgcattggtggtcactaactgccaagagagaatccagcattggaagaaggtagataatgactataatgcccttcgagaaagactcagcaccttgcctgataaattgtcttataatataatggtaccatttggcccttttgccttcatgccaggaaaacttgtccatactaatgaagtcactgttttactgggggacaactggtttgcaaagtgctcagcaaagcaggctgtaggtttagttgagcaccggaaagaacatgtaagaaaaacaatagatgacttaaaaaaagtgatgaaaaattttgaatccagagttgaattcacagaagatttgcagaaaatgagcgatgctgcaggtgatattgttgacatacgagaagaaattaaatgtgacttcgaatttaaagcaaaacaccgaattgctcataaaccgcattccaaaccaaaaacttcagatatttttgaagcagatattgcaaatgatgtgaaatccaaggatttgctagctgataaagaactgtgggctcgacttgaagaactagagagacaggaagaattgctgggtgaacttgatagtaagcctgatactgtgattgcaaatggagaagatacgacatcttctgaagaggaaaaggaagatcgtaacacaaatgtgaatgcgatgcatcaagtaacagactctcatactccttgtcataaggatgttgcaagttcagaaccattcagtggtcaagtgaatagtcagttgaactgttcagtgaatggttccagttcttaccacagtgatgatgatgatgatgatgatgacgacgacgacgacaacattgacgacgatgatggtgataacgaccatgaggctttaggggttggagataattctataccaacaatatatttttcacatactgttgagcctaagagggtccgaataaatactggaaagaataccactttaaaattcagtgaaaagaaagaagaagccaaacgtaaacgaaagaacagcactggcagtggccactctgcccaggagctgccgaccatcaggacgcctgcagacatttacagagcctttgttgatgttgtgaatggagaatatgtccctcgcaaatccatcctgaagtctcgaagtagagagaatagtgtgtgtagcgacactagtgaaagcagtgctgctgaatttgatgataggcggggagttttgaggagtatcagctgcgaagaagccacttgcagtgacaccagtgagagcattttggaagaggaaccacaagaaaatcaaaagaaacttttgcccttatcagtaacacctgaggctttttctggaactgttatagaaaaagaatttgtatcaccttccttaacaccacccccagccattgctcatcccgcactacccactattccagaacgaaaggaagttctgttggaagcatctgaagaaactggaaagagggtttcaaagtttaaagctgccagattgcaacagaaagactaggccctgtctaggaaatgggaatttacatcctaaaacctagttgttcatttgtttagagtatctatagcaaaataggttacatgtagtttgaaataaggtatcctgagttactttggcaacaagttcttttacccttacccgtggtatttgaaaaaaatcaaggtaactgtctgaatactttaatatcagcttgttttgtgaattctctgaatactgtcaacactcttatctaagtttgcctttatgatgcagtggcagcattttgaattacttttcaaagaatactgttcatatgcattgtttttgtgtttcaaactaaatacaggcagttttgtgccagctgtgatattgtgcataccatatggaccattttaaagaaaattttaaaatttcaaatagattcaacaattacattacttgctttcacattttaaaggcactttaaaaaaatctacttctcttgtaggttttgcggctagttggctattcaagaaacctcgcccctctgaatgtcatactgtaatctttaaggaagaaagctacatgaattaattgtactctatgggaaaatttctttggaaagatattttgtaaaacttttttttccaagtaaaaactttatgaaacttggtctca

SEQ ID NO: 447485 - DNA, 1795 bp, Homo sapiens
gactagttctagatcgcgagcggcgctcgcgatctagaactaggaaattaaatgtgacttcgaatttaaagcaaaacaccgaattgctcataaaccgcattccaaaccaaaaacttcagatatttttgaagcagatattgcaaatgatgtgaaatccaaggatttgctagctgataaagaactgtgggctcgacttgaagaactagagagacaggaagaattgctgggtgaacttgatagtaagcctgatactgtgattgcaaatggagaagatacgacatcttctgaagaggaaaaggaagatcgtaacacaaatgtgaatgcgatgcatcaagtaacagactctcatactccttgtcataaggatgttgcaagttcagaaccattcagtggtcaagtgaatagtcagttgaactgttcagtgaatggttccagttcttaccacagtgatgatgatgatgatgatgatgacgacgacgacgacaacattgacgacgatgatggtgataacgaccatgaggctttaggggttggagataattctataccaacaatatatttttcacatactgttgagcctaagagggtccgaataaatactggaaagaataccactttaaaattcagtgaaaagaaagaagaagccaaacgtaaacgaaagaacagcactggcagtggccactctgcccaggagctgccgaccatcaggacgcctgcagacatttacagagcctttgttgatgttgtgaatggagaatatgtccctcgcaaatccatcctgaagtctcgaagtagagagaatagtgtgtgtagcgacactagtgaaagcagtgctgctgaatttgatgataggcggggagttttgaggagtatcagctgcgaagaagccacttgcagtgacaccagtgagagcattttggaagaggaaccacaagaaaatcaaaagaaacttttgcccttatcagtaacacctgaggctttttctggaactgttatagaaaaagaatttgtatcaccttccttaacaccacccccagccattgctcatcccgcactacccactattccagaacgaaaggaagttctgttggaagcatctgaagaaactggaaagagggtttcaaagtttaaagctgccagattgcaacagaaagactaggccctgtctaggaaatgggaatttacatcctaaaacctagttgttcatttgtttagagtatctatagcaaaataggttacatgtagtttgaaataaggtatcctgagttactttggcaacaagttcttttacccttacccgtggtatttgaaaaaaatcaaggtaactgtctgaatactttaatatcagcttgttttgtgaattctctgaatactgtcaacactcttatctaagtttgcctttatgatgcagtggcagcattttgaattacttttcaaagaatactgttcatatgcattgtttttgtgtttcaaactaaatacaggcagttttgtgccagctgtgatattgtgcataccatatggaccattttaaagaaaattttaaaatttcaaatagattcaacaattacattacttgctttcacattttaaaggcactttaaaaaaatctacttctcttgtaggttttgcggctagttggctattcaagaaacctcgcccctctgaatgtcatactgtaatctttaaggaagaaagctacatgaattaattgtactctatgggaaaatttctttggaaagatattttgtaaaacttttttttccaagtaaaaactttatgaaacttggtctca

SEQ ID NO: 447486 - DNA, 3046 bp, Homo sapiens
cagtaattaatgaacatgcaaaatataattgtatatttcaactcactaaaaaggcacagaaagagttgaatttgctaaaattaaatgtgcttatgaaacagctctagtacatgaattaagctcctagatacagatgcagcgccaaacgacggggagggagatggggcactcaaggcgacacgcggctcttgttgccgagcgtttcctgggcgtggagcttctatagaatgtaagctttttttttttaaggttccaaagcctatatttagtgctttcatatacgtaatctcaaaaaaaaaaaaagaaagaaatatcggcataaaatgtaagcttccagagggatacaaacgcagcccagcgcggacaccgccagccccagccacgcggttcgcatcaagcgcactcccctgggggcggggcctgcgcgagctgggcgtgtcgggggcggggcctgcgcgcttgcttccggcgtgccgcgagaggcggggcgtgtggggaggcgcggccgccacgcgacgcctggctgggcccgcaccggagaggcgtctcggtacctggcaggcggcctgctactcggagcccgctgcggggcggcggcggcggggacatgcacgtgtgagatgcggcagcgggcggcgcggacgcgaacagcagcggcggcggcgggcgcggcctcctgggcgcggggcgcgcggtgcctgagggcgggcgcgcgggcgctgggcaactgccggccgcgccgcctgcgcaggcgctggttcaggactcacacgccgcgctgaggcccgcgggcccgtcatggaggcgcccaccgtggagacgccccccgacccctcgcccccttcggccccggcccctgccctggttccgttgcgcgccccggatgtggcgcggctgcgcgaggagcaggaaaaggaagaaggtagataatgactataatgcccttcgagaaagactcagcaccttgcctgataaattgtcttataatataatggtaccatttggcccttttgccttcatgccaggaaaacttgtccatactaatgaagtcactgttttactgggggacaactggtttgcaaagtgctcagcaaagcaggctgtaggtttagttgagcaccggaaagaacatgtaagaaaaacaatagatgacttaaaaaaagtgatgaaaaattttgaatccagagttgaattcacagaagatttgcagaaaatgagcgatgctgcaggtgatattgttgacatacgagaagaaattaaatgtgacttcgaatttaaagcaaaacaccgaattgctcataaaccgcattccaaaccaaaaacttcagatatttttgaagcagatattgcaaatgatgtgaaatccaaggatttgctagctgataaagaactgtgggctcgacttgaagaactagagagacaggaagaattgctgggtgaacttgatagtaagcctgatactgtgattgcaaatggagaagatacgacatcttctgaagaggaaaaggaagatcgtaacacaaatgtgaatgcgatgcatcaagtaacagactctcatactccttgtcataaggatgttgcaagttcagaaccattcagtggtcaagtgaatagtcagttgaactgttcagtgaatggttccagttcttaccacagtgatgatgatgatgatgatgatgacgacgacgacgacaacattgacgacgatgatggtgataacgaccatgaggctttaggggttggagataattctataccaacaatatatttttcacatactgttgagcctaagagggtccgaataaatactggaaagaataccactttaaaattcagtgaaaagaaagaagaagccaaacgtaaacgaaagaacagcactggcagtggccactctgcccaggagctgccgaccatcaggacgcctgcagacatttacagagcctttgttgatgttgtgaatggagaatatgtccctcgcaaatccatcctgaagtctcgaagtagagagaatagtgtgtgtagcgacactagtgaaagcagtgctgctgaatttgatgataggcggggagttttgaggagtatcagctgcgaagaagccacttgcagtgacaccagtgagagcattttggaagaggaaccacaagaaaatcaaaagaaacttttgcccttatcagtaacacctgagttgaacatatagttgaccagattaaatgcagcaaacatccaggctttttctggaactgttatagaaaaagaatttgtatcaccttccttaacaccacccccagccattgctcatcccgcactacccactattccagaacgaaaggaagttctgttggaagcatctgaagaaactggaaagagggtttcaaagtttaaagctgccagattgcaacagaaagactaggccctgtctaggaaatgggaatttacatcctaaaacctagttgttcatttgtttagagtatctatagcaaaataggttacatgtagtttgaaataaggtatcctgagttactttggcaacaagttcttttacccttacccgtggtatttgaaaaaaatcaaggtaactgtctgaatactttaatatcagcttgttttgtgaattctctgaatactgtcaacactcttatctaagtttgcctttatgatgcagtggcagcattttgaattacttttcaaagaatactgttcatatgcattgtttttgtgtttcaaactaaatacaggcagttttgtgccagctgtgatattgtgcataccatatggaccattttaaagaaaattttaaaatttcaaatagattcaacaattacattacttgctttcacattttaaaggcactttaaaaaaatctacttctcttgtaggttttgcggctagttggctattcaagaaacctcgcccctctgaatgtcatactgtaatctttaaggaagaaagctacatgaattaattgtactctatgggaaaatttctttggaaagatattttgtaaaacttttttttccaagtaaaaactttatgaaacttggtctca

SEQ ID NO: 447487 - DNA, 2952 bp, Homo sapiens
cagtaattaatgaacatgcaaaatataattgtatatttcaactcactaaaaaggcacagaaagagttgaatttgctaaaattaaatgtgcttatgaaacagctctagtacatgaattaagctcctagatacagatgcagcgccaaacgacggggagggagatggggcactcaaggcgacacgcggctcttgttgccgagcgtttcctgggcgtggagcttctatagaatgtaagctttttttttttaaggttccaaagcctatatttagtgctttcatatacgtaatctcaaaaaaaaaaaaagaaagaaatatcggcataaaatgtaagcttccagagggatacaaacgcagcccagcgcggacaccgccagccccagccacgcggttcgcatcaagcgcactcccctgggggcggggcctgcgcgagctgggcgtgtcgggggcggggcctgcgcgcttgcttccggcgtgccgcgagaggcggggcgtgtggggaggcgcggccgccacgcgacgcctggctgggcccgcaccggagaggcgtctcggtacctggcaggcggcctgctactcggagcccgctgcggggcggcggcggcggggacatgcacgtgtgagatgcggcagcgggcggcgcggacgcgaacagcagcggcggcggcgggcgcggcctcctgggcgcggggcgcgcggtgcctgagggcgggcgcgcgggcgctgggcaactgccggccgcgccgcctgcgcaggcgctggttcaggactcacacgccgcgctgaggcccgcgggcccgtcatggaggcgcccaccgtggagacgccccccgacccctcgcccccttcggccccggcccctgccctggttccgttgcgcgccccggatgtggcgcggctgcgcgaggagcaggaaaaggaagaaggtagataatgactataatgcccttcgagaaagactcagcaccttgcctgataaattgtcttataatataatggtaccatttggcccttttgccttcatgccaggaaaacttgtccatactaatgaagtcactgttttactgggggacaactggtttgcaaagtgctcagcaaagcaggctgtaggtttagttgagcaccggaaagaacatgtaagaaaaacaatagatgacttaaaaaaagtgatgaaaaattttgaatccagagttgaattcacagaagatttgcagaaaatgagcgatgctgcaggtgatattgttgacatacgagaagaaattaaatgtgacttcgaatttaaagcaaaacaccgaattgctcataaaccgcattccaaaccaaaaacttcagatatttttgaagcagatattgcaaatgatgtgaaatccaaggatttgctagctgataaagaactgtgggctcgacttgaagaactagagagacaggaagaattgctgggtgaacttgatagtaagcctgatactgtgattgcaaatggagaagatacgacatcttctgaagaggaaaaggaagatcgtaacacaaatgtgaatgcgatgcatcaagtaacagactctcatactccttgtcataaggatgttgcaagttcagaaccattcagtggtcaagtgaatagtcagttgaactgttcagtgaatggttccagttcttaccacagtgatgatgatgatgatgatgatgacgacgacgacgacaacattgacgacgatgatggtgataacgaccatgaggctttaggggttggagataattctataccaacaatatatttttcacatactgttgagcctaagagggtccgaataaatactggaaagaataccactttaaaattcagtgaaaagaaagaagaagccaaacgtaaacgaaagaacagcactggcagtgagcctttgttgatgttgtgaatggagaatatgtccctcgcaaatccatcctgaagtctcgaagtagagagaatagtgtgtgtagcgacactagtgaaagcagtgctgctgaatttgatgataggcggggagttttgaggagtatcagctgcgaagaagccacttgcagtgacaccagtgagagcattttggaagaggaaccacaagaaaatcaaaagaaacttttgcccttatcagtaacacctgaggctttttctggaactgttatagaaaaagaatttgtatcaccttccttaacaccacccccagccattgctcatcccgcactacccactattccagaacgaaaggaagttctgttggaagcatctgaagaaactggaaagagggtttcaaagtttaaagctgccagattgcaacagaaagactaggccctgtctaggaaatgggaatttacatcctaaaacctagttgttcatttgtttagagtatctatagcaaaataggttacatgtagtttgaaataaggtatcctgagttactttggcaacaagttcttttacccttacccgtggtatttgaaaaaaatcaaggtaactgtctgaatactttaatatcagcttgttttgtgaattctctgaatactgtcaacactcttatctaagtttgcctttatgatgcagtggcagcattttgaattacttttcaaagaatactgttcatatgcattgtttttgtgtttcaaactaaatacaggcagttttgtgccagctgtgatattgtgcataccatatggaccattttaaagaaaattttaaaatttcaaatagattcaacaattacattacttgctttcacattttaaaggcactttaaaaaaatctacttctcttgtaggttttgcggctagttggctattcaagaaacctcgcccctctgaatgtcatactgtaatctttaaggaagaaagctacatgaattaattgtactctatgggaaaatttctttggaaagatattttgtaaaacttttttttccaagtaaaaactttatgaaacttggtctca

SEQ ID NO: 447488 - DNA, 1527 bp, Homo sapiens
tctccctactgtatcctaattgtggaaatcaagaagctgttggaggaagtgaaagaaaagaatcccaagctgactattgattgcaatgcttccggggcaacggcacctccgtgctgtgactttttttgctgagcagcctgggatcgctctacgaattacacaggaagcgggattcgggtctctaagatgtcttatgaatgcaggtcagagggtcacatgttaacactagagtctgtcgagaggtaggatacagtagggagatctccctactgtatcctacctacaatatatttttcacatactgttgagcctaagagggtccgaataaatactggaaagaataccactttaaaattcagtgaaaagaaagaagaagccaaacgtaaacgaaagaacagcactggcagtggccactctgcccaggagctgccgaccatcaggacgcctgcagacatttacagagcctttgttgatgttgtgaatggagaatatgtccctcgcaaatccatcctgaagtctcgaagtagagagaatagtgtgtgtagcgacactagtgaaagcagtgctgctgaatttgatgataggcggggagttttgaggagtatcagctgcgaagaagccacttgcagtgacaccagtgagagcattttggaagaggaaccacaagaaaatcaaaagaaacttttgcccttatcagtaacacctgaggctttttctggaactgttatagaaaaagaatttgtatcaccttccttaacaccacccccagccattgctcatcccgcactacccactattccagaacgaaaggaagttctgttggaagcatctgaagaaactggaaagagggtttcaaagtttaaagctgccagattgcaacagaaagactaggccctgtctaggaaatgggaatttacatcctaaaacctagttgttcatttgtttagagtatctatagcaaaataggttacatgtagtttgaaataaggtatcctgagttactttggcaacaagttcttttacccttacccgtggtatttgaaaaaaatcaaggtaactgtctgaatactttaatatcagcttgttttgtgaattctctgaatactgtcaacactcttatctaagtttgcctttatgatgcagtggcagcattttgaattacttttcaaagaatactgttcatatgcattgtttttgtgtttcaaactaaatacaggcagttttgtgccagctgtgatattgtgcataccatatggaccattttaaagaaaattttaaaatttcaaatagattcaacaattacattacttgctttcacattttaaaggcactttaaaaaaatctacttctcttgtaggttttgcggctagttggctattcaagaaacctcgcccctctgaatgtcatactgtaatctttaaggaagaaagctacatgaattaattgtactctatgggaaaatttctttggaaagatattttgtaaaacttttttttccaagtaaaaactttatgaaacttggtctca

SEQ ID NO: 447489 - DNA, 1122 bp, Homo sapiens
cacttactgctcctaacggcaaggagctgcgaccatcaggacgcgcagacatttacagcctttgttgatgttgtgaatggagaatatgtccctcgcaaatccatcctgaagtctcgaagtagagagaatagtgtgtgtagcgacactagtgaaagcagtgctgctgaatttgatgataggcggggagttttgaggagtatcagctgcgaagaagccacttgcagtgacaccagtgagagcattttggaagaggaaccacaagaaaatcaaaagaaacttttgcccttatcagtaacacctgaggctttttctggaactgttatagaaaaagaatttgtatcaccttccttaacaccacccccagccattgctcatcccgcactacccactattccagaacgaaaggaagttctgttggaagcatctgaagaaactggaaagagggtttcaaagtttaaagctgccagattgcaacagaaagactaggccctgtctaggaaatgggaatttacatcctaaaacctagttgttcatttgtttagagtatctatagcaaaataggttacatgtagtttgaaataaggtatcctgagttactttggcaacaagttcttttacccttacccgtggtatttgaaaaaaatcaaggtaactgtctgaatactttaatatcagcttgttttgtgaattctctgaatactgtcaacactcttatctaagtttgcctttatgatgcagtggcagcattttgaattacttttcaaagaatactgttcatatgcattgtttttgtgtttcaaactaaatacaggcagttttgtgccagctgtgatattgtgcataccatatggaccattttaaagaaaattttaaaatttcaaatagattcaacaattacattacttgctttcacattttaaaggcactttaaaaaaatctacttctcttgtaggttttgcggctagttggctattcaagaaacctcgcccctctgaatgtcatactgtaatctttaaggaagaaagctacatgaattaattgtactctatgggaaaatttctttggaaagatattttgtaaaacttttttttccaagtaaaaactttatgaaacttggtctca

SEQ ID NO: 447490 - DNA, 1595 bp, Homo sapiens
ctatttttgtataaaacgacatgtacagatatttccagcaatttatgcacattctttaattctgttccagttgaacatatagttgaccagattaaatgcagcaaacatccaggtgaaattgagtcatttctttttttgtggaacttctgatttctgtcattgagttaattatattaaaattttgaaacctgtacttattcctactagtatcagcacttttatttttcaacttccactgatcttttaaaattgaggcaatatgcagtaaaatatttaaataattgcataaacaccaccaaagagatatcagttagaaatgtcagtactggtgaaactaagctattggctagcaggcagcaaggccatcataggatagctcattcatcaactgatgtacaaaagtcagagtttgacaccctaatagcatttttattttaatacattatttttcacagcatgggctggacatgaatggaatgtatgaaagtttgaagaccttttatttatccatttcttttttttcccagataaaatttacattttacattttgttttcttgcatgtatactgtaaaaattacttctgtttggtggtgaaattaaaacttaatggtgttggtttctctgaacaattagtattttggtgtagtagtgttgtctagccaaaaatctcgtgaatttacttttaatgaaaagaattgccaaatgagtgaatgggaagattttgtgggtgtcttatttgcattttattaccataacctgacttttgttttctaggctttttctggaactgttatagaaaaagaatttgtatcaccttccttaacaccacccccagccattgctcatcccgcactacccactattccagaacgaaaggaagttctgttggaagcatctgaagaaactggaaagagggtttcaaagtttaaagctgccagattgcaacagaaagactaggccctgtctaggaaatgggaatttacatcctaaaacctagttgttcatttgtttagagtatctatagcaaaataggttacatgtagtttgaaataaggtatcctgagttactttggcaacaagttcttttacccttacccgtggtatttgaaaaaaatcaaggtaactgtctgaatactttaatatcagcttgttttgtgaattctctgaatactgtcaacactcttatctaagtttgcctttatgatgcagtggcagcattttgaattacttttcaaagaatactgttcatatgcattgtttttgtgtttcaaactaaatacaggcagttttgtgccagctgtgatattgtgcataccatatggaccattttaaagaaaattttaaaatttcaaatagattcaacaattacattacttgctttcacattttaaaggcactttaaaaaaatctacttctcttgtaggttttgcggctagttggctattcaagaaacctcgcccctctgaatgtcatactgtaatctttaaggaagaaagctacatgaattaattgtactctatgggaaaatttctttggaaagatattttgtaaaacttttttttccaagtaaaaactttatgaaacttggtctca

SEQ ID NO: 447491 - DNA, 2355 bp, Homo sapiens
cagtaattaatgaacatgcaaaatataattgtatatttcaactcactaaaaaggcacagaaagagttgaatttgctaaaattaaatgtgcttatgaaacagctctagtacatgaattaagctcctagatacagatgcagcgccaaacgacggggagggagatggggcactcaaggcgacacgcggctcttgttgccgagcgtttcctgggcgtggagcttctatagaatgtaagctttttttttttaaggttccaaagcctatatttagtgctttcatatacgtaatctcaaaaaaaaaaaaagaaagaaatatcggcataaaatgtaagcttccagagggatacaaacgcagcccagcgcggacaccgccagccccagccacgcggttcgcatcaagcgcactcccctgggggcggggcctgcgcgagctgggcgtgtcgggggcggggcctgcgcgcttgcttccggcgtgccgcgagaggcggggcgtgtggggaggcgcggccgccacgcgacgcctggctgggcccgcaccggagaggcgtctcggtacctggcaggcggcctgctactcggagcccgctgcggggcggcggcggcggggacatgcacgtgtgagatgcggcagcgggcggcgcggacgcgaacagcagcggcggcggcgggcgcggcctcctgggcgcggggcgcgcggtgcctgagggcgggcgcgcgggcgctgggcaactgccggccgcgccgcctgcgcaggcgctggttcaggactcacacgccgcgctgaggcccgcgggcccgtcatggaggcgcccaccgtggagacgccccccgacccctcgcccccttcggccccggcccctgccctggttccgttgcgcgccccggatgtggcgcggctgcgcgaggagcaggaaaaggaagaaggtagataatgactataatgcccttcgagaaagactcagcaccttgcctgataaattgtcttataatataatggtaccatttggcccttttgccttcatgccaggaaaacttgtccatactaatgaagtcactgttttactgggggacaactggtttgcaaagtgctcagcaaagcaggctgtaggtttagttgagcaccggaaagaacatgtaagaaaaacaatagatgacttaaaaaaagtgatgaaaaattttgaatccagagttgaattcacagaagatttgcagaaaatgagcgatgctgcaggtgatattgttgacatacgagaagaaattaaatgtgacttcgaatttaaagcaaaacaccgaattgctcataaaccgcattccaaaccaaaaacttcagatatttttgaagcagatattgcaaatgatgtgaaatccaaggatttgctagctgataaagaactgtgggctcgacttgaagaactagagagacaggaagaattgctgggtgaacttgatagtaagcctgatactgtgattgcaaatggagaagatacgacatcttctgaagaggaaaaggaagatcgtaacacaaatgtgaatgcgatgcatcaagtaacagactctcatactccttgtcataaggatgttgcaagttcagaaccattcagtggtcaagtgaatagtcagttgaactgttcagtgaatggttccagttcttaccacagtgatgatgatgatgatgatgatgacgacgacgacgacaacattgacgacgatgatggtgataacgaccatgaggctttaggggttggagataattctataccaacaatatatttttcacatactgttgagcctaagagggtccgaataaatactggaaagaataccactttaaaattcagtgaaaagaaagaagaagccaaacgtaaacgaaagaacagcactggcagtggccactctgcccaggagctgccgaccatcaggacgcctgcagacatttacagagcctttgttgatgttgtgaatggagaatatgtccctcgcaaatccatcctgaagtctcgaagtagagagaatagtgtgtgtagcgacactagtgaaagcagtgctgctgaatttgatgataggcggggagttttgaggagtatcagctgcgaagaagccacttgcagtgacaccagtgagagcattttggaagaggaaccacaagaaaatcaaaagaaacttttgcccttatcagtaacacctgaggttttgcggctagttggctattcaagaaacctcgcccctctgaatgtcatactgtaatctttaaggaagaaagctacatgaattaattgtactctatgggaaaatttctttggaaagatattttgtaaaacttttttttccaagtaaaaactttatgaaacttggtctca

SEQ ID NO: 447492 - DNA, 2332 bp, Homo sapiens
cagtaattaatgaacatgcaaaatataattgtatatttcaactcactaaaaaggcacagaaagagttgaatttgctaaaattaaatgtgcttatgaaacagctctagtacatgaattaagctcctagatacagatgcagcgccaaacgacggggagggagatggggcactcaaggcgacacgcggctcttgttgccgagcgtttcctgggcgtggagcttctatagaatgtaagctttttttttttaaggttccaaagcctatatttagtgctttcatatacgtaatctcaaaaaaaaaaaaagaaagaaatatcggcataaaatgtaagcttccagagggatacaaacgcagcccagcgcggacaccgccagccccagccacgcggttcgcatcaagcgcactcccctgggggcggggcctgcgcgagctgggcgtgtcgggggcggggcctgcgcgcttgcttccggcgtgccgcgagaggcggggcgtgtggggaggcgcggccgccacgcgacgcctggctgggcccgcaccggagaggcgtctcggtacctggcaggcggcctgctactcggagcccgctgcggggcggcggcggcggggacatgcacgtgtgagatgcggcagcgggcggcgcggacgcgaacagcagcggcggcggcgggcgcggcctcctgggcgcggggcgcgcggtgcctgagggcgggcgcgcgggcgctgggcaactgccggccgcgccgcctgcgcaggcgctggttcaggactcacacgccgcgctgaggcccgcgggcccgtcatggaggcgcccaccgtggagacgccccccgacccctcgcccccttcggccccggcccctgccctggttccgttgcgcgccccggatgtggcgcggctgcgcgaggagcaggaaaaggaagaaggtagataatgactataatgcccttcgagaaagactcagcaccttgcctgataaattgtcttataatataatggtaccatttggcccttttgccttcatgccaggaaaacttgtccatactaatgaagtcactgttttactgggggacaactggtttgcaaagtgctcagcaaagcaggctgtaggtttagttgagcaccggaaagaacatgtaagaaaaacaatagatgacttaaaaaaagtgatgaaaaattttgaatccagagttgaattcacagaagatttgcagaaaatgagcgatgctgcaggtgatattgttgacatacgagaagaaattaaatgtgacttcgaatttaaagcaaaacaccgaattgctcataaaccgcattccaaaccaaaaacttcagatatttttgaagcagatattgcaaatgatgtgaaatccaaggatttgctagctgataaagaactgtgggctcgacttgaagaactagagagacaggaagaattgctgggtgaacttgatagtaagcctgatactgtgattgcaaatggagaagatacgacatcttctgaagaggaaaaggaagatcgtaacacaaatgtgaatgcgatgcatcaagtaacagactctcatactccttgtcataaggatgttgcaagttcagaaccattcagtggtcaagtgaatagtcagttgaactgttcagtgaatggttccagttcttaccacagtgatgatgatgatgatgatgatgacgacgacgacgacaacattgacgacgatgatggtgataacgaccatgaggctttaggggttggagataattctataccaacaatatatttttcacatactgttgagcctaagagggtccgaataaatactggaaagaataccactttaaaattcagtgaaaagaaagaagaagccaaacgtaaacgaaagaacagcactggcagtggccactctgcccaggagctgccgaccatcaggacgcctgcagacatttacagagcctttgttgatgttgtgaatggagaatatgtccctcgcaaatccatcctgaagtctcgaagtagagagaatagtgtgtgtagcgacactagtgaaagcagtgctgctgaatttgatgataggcggggagttttgaggagtatcagctgcgaagaagccacttgcagtgacaccagtgagagcattttggaagaggaaccacaagaaaatcaaaagaaacttttgcccttatcagtaacacctgaggtgtgtgtgtgtatcttttaattctttatttcatatagtatctttgaccagttttagctatttaatctgaaaagtcataagattaaattaattctaggttttatactttcttggtactaattaataaaaaattaatagtcacaaaca

SEQ ID NO: 447493 - DNA, 452 bp, Homo sapiens
gccactctgcccaggagctgccgaccatcaggacgcctgcagacatttacaggtgggaggcgctcacagctgcagggcagtctgctgggcttgcctctctttctgccactgaacctttactggagaaagttgactgtaacacagaagaccctcactgaaaagtgaagtgttctgaggagttaacttaggatctgataggctgaccggctgtagcttcccagtccagagcagtgggaatggaggattttttttttttttcactttctcctcttcaccagtgcttttgaaacatttccaaatggtctagtcagaaaatcttgtatcttcagaaagcatttttgtttccagtgggctaggtccctacgtttctaccacagccgtaacatgcttggcatgcagtttaccttttcagagtagaaattatactgttgcaggttttttttttttttcct

SEQ ID NO: 447494 - DNA, 2628 bp, Homo sapiens
gggtgctttgcttatattctgttatatatttattataaatatattatactaatatgagatacacaataacttatatatgaactaggtttatgatgagctaagtttgtgatgaagttgcacaaaattgtggcttagaagcaatataatgttgtctctctaacataaatgtcagaacgttaatagtccagggctggacagcaactgtgacccataaagacctctcaagttccattctctcacttcttgcattatactggactttcatttctaagatcactttatgggctaagacaattcctccaaattgagtcttcataaacatactctatgcaacagaaaggagaagagacaaagaaagcagggttaaaggcttatgctagctattgtatgagaaagattcacacagtaatcacgtttgtataccaatgtttgatggtttgtcactcagtcatgtcttagctgtcaatgaggctaggaaatgtagattttactttggggagtaatgttccctgtgtgtatttggtgttttctgtcaacaggaagaaggtagataatgactataatgcccttcgagaaagactcagcaccttgcctgataaattgtcttataatataatggtaccatttggcccttttgccttcatgccaggaaaacttgtccatactaatgaagtcactgttttactgggggacaactggtttgcaaagtgctcagcaaagcaggctgtaggtttagttgagcaccggaaagaacatgtaagaaaaacaatagatgacttaaaaaaagtgatgaaaaattttgaatccagagttgaattcacagaagatttgcagaaaatgagcgatgctgcaggtgatattgttgacatacgagaagaaattaaatgtgacttcgaatttaaagcaaaacaccgaattgctcataaaccgcattccaaaccaaaaacttcagatatttttgaagcagatattgcaaatgatgtgaaatccaaggatttgctagctgataaagaactgtgggctcgacttgaagaactagagagacaggaagaattgctgggtgaacttgatagtaagcctgatactgtgattgcaaatggagaagatacgacatcttctgaagaggaaaaggaagatcgtaacacaaatgtgaatgcgatgcatcaagtaacagactctcatactccttgtcataaggatgttgcaagttcagaaccattcagtggtcaagtgaatagtcagttgaactgttcagtgaatggttccagttcttaccacagtgatgatgatgatgatgatgatgacgacgacgacgacaacattgacgacgatgatggtgataacgaccatgaggctttaggggttggagataattctataccaacaatatatttttcacatactgttgagcctaagagggtccgaataaatactggaaagaataccactttaaaattcagtgaaaagaaagaagaagccaaacgtaaacgaaagaacagcactggcagtggccactctgcccaggagctgccgaccatcaggacgcctgcagacatttacagagcctttgttgatgttgtgaatggagaatatgtccctcgcaaatccatcctgaagtctcgaagtagagagaatagtgtgtgtagcgacactagtgaaagcagtgctgctgaatttgatgataggcggggagttttgaggagtatcagctgcgaagaagccacttgcagtgacaccagtgagagcattttggaagaggaaccacaagaaaatcaaaagaaacttttgcccttatcagtaacacctgaggctttttctggaactgttatagaaaaagaatttgtatcaccttccttaacaccacccccagccattgctcatcccgcactacccactattccagaacgaaaggaagttctgttggaagcatctgaagaaactggaaagagggtttcaaagtttaaagctgccagattgcaacagaaagactaggccctgtctaggaaatgggaatttacatcctaaaacctagttgttcatttgtttagagtatctatagcaaaataggttacatgtagtttgaaataaggtatcctgagttactttggcaacaagttcttttacccttacccgtggtatttgaaaaaaatcaaggtaactgtctgaatactttaatatcagcttgttttgtgaattctctgaatactgtcaacactcttatctaagtttgcctttatgatgcagtggcagcattttgaattacttttcaaagaatactgttcatatgcattgtttttgtgtttcaaactaaatacaggcagttttgtgccagctgtgatattgtgcataccatatggaccattttaaagaaaattttaaaatttcaaatagattcaacaattacattacttgctttcacattttaaaggcactttaaaaaaatctacttctcttgtaggttttgcggctagttggctattcaagaaacctcgcccctctgaatgtcatactgtaatctttaaggaagaaagctacatgaattaattgtactctatgggaaaatttctttggaaagatattttgtaaaacttttttttccaagtaaaaactttatgaaacttggtctca

SEQ ID NO: 447495 - DNA, 2821 bp, Homo sapiens
gggtgctttgcttatattctgttatatatttattataaatatattatactaatatgagatacacaataacttatatatgaactaggtttatgatgagctaagtttgtgatgaagttgcacaaaattgtggcttagaagcaatataatgttgtctctctaacataaatgtcagaacgttaatagtccagggctggacagcaactgtgacccataaagacctctcaagttccattctctcacttcttgcattatactggactttcatttctaagatcactttatgggctaagacaattcctccaaattgagtcttcataaacatactctatgcaacagaaaggagaagagacaaagaaagcagggttaaaggcttatgctagctattgtatgagaaagattcacacagtaatcacgtttgtataccaatgtttgatggtttgtcactcagtcatgtcttagctgtcaatgaggctaggaaatgtagattttactttggggagtaatgttccctgtgtgtatttggtgttttctgtcaacaggaagaaggtagataatgactataatgcccttcgagaaagactcagcaccttgcctgataaattgtcttataatataatggtaccatttggcccttttgccttcatgccaggaaaacttgtccatactaatgaagtcactgttttactgggggacaactggtttgcaaagtgctcagcaaagcaggctgtaggtttagttgagcaccggaaagaacatgtaagaaaaacaatagatgacttaaaaaaagtgatgaaaaattttgaatccagagttgaattcacagaagatttgcagaaaatgagcgatgctgcaggtgatattgttgacatacgagaagaaattaaatgtgacttcgaatttaaagcaaaacaccgaattgctcataaaccgcattccaaaccaaaaacttcagatatttttgaagcagatattgcaaatgatgtgaaatccaaggatttgctagctgataaagaactgtgggctcgacttgaagaactagagagacaggaagaattgctgggtgaacttgatagtaagcctgatactgtgattgcaaatggagaagatacgacatcttctgaagaggaaaaggaagatcgtaacacaaatgtgaatgcgatgcatcaagtaacagactctcatactccttgtcataaggatgttgcaagttcagaaccattcagtggtcaagtgaatagtcagttgaactgttcagtgaatggttccagttcttaccacagtgatgatgatgatgatgatgatgacgacgacgacgacaacattgacgacgatgatggtgataacgaccatgaggctttaggggttggagataattctataccaacaatatatttttcacatactgttgagcctaagagggtccgaataaatactggaaagaataccactttaaaattcagtgaaaagaaagaagaagccaaacgtaaacgaaagaacagcactggcagtggccactctgcccaggagctgccgaccatcaggacgcctgcagacatttacagagcctttgttgatgttgtgaatggagaatatgtccctcgcaaatccatcctgaagtctcgaagtagagagaatagtgtgtgtagcgacactagtgaaagcagtgctgctgaatttgatgataggcggggagttttgaggagtatcagctgcgaagaagccacttgcagtgacaccagtgagagcattttggaagaggaaccacaagaaaatcaaaagaaacttttgcccttatcagtaacacctgaggctttttctggaactgttatagaaaaagaatttgtatcaccttccttaacaccacccccagccattgctcatcccgcactacccactattccagaacgaaaggaagttctgttggaagcatctgaagaaactggaaagagggtttcaaagtttaaagctgccagattgcaacagaaagactaggccctgtctaggaaatgggaatttacatcctaaaacctagttgttcatttgtttagagtatctatagcaaaataggttacatgtagtttgaaataaggtatcctgagttactttggcaacaagttcttttacccttacccgtggtatttgaaaaaaatcaaggtaactgtctgaatactttaatatcagcttgttttgtgaattctctgaatactgtcaacactcttatctaagtttgcctttatgatgcagtggcagcattttgaattacttttcaaagaatactgttcatatgcattgtttttgtgtttcaaactaaatacaggcagttttgtgccagctgtgatattgtgcataccatatggaccattttaaagaaaattttaaaatttcaaatagattcaacaattacattacttgctttcacattttaaaggcactttaaaaaaatctacttctcttgtaggttttgcggctagttggctattcaagaaacctcgcccctctgaatgtcatactgtaatctttaaggaagaaagctacatgaattaattgtactctatgggaaaatttctttggaaagatattttgtaaaacttttttttccaagtaaaaactttatgaaacttggtctcaaaaatgttgtgaactttatgattcaaaattgagtacagatatgtccttgattcatatgtatgctacatgtatcacacaacagatctggaattctttcagttcctcggtttgaattatccattaactagtggggatgcaagctcgcccccttgtcattaaaatacatattcataaaactttaaagttgcagtcg

SEQ ID NO: 447496 - DNA, 2943 bp, Homo sapiens
cagtaattaatgaacatgcaaaatataattgtatatttcaactcactaaaaaggcacagaaagagttgaatttgctaaaattaaatgtgcttatgaaacagctctagtacatgaattaagctcctagatacagatgcagcgccaaacgacggggagggagatggggcactcaaggcgacacgcggctcttgttgccgagcgtttcctgggcgtggagcttctatagaatgtaagctttttttttttaaggttccaaagcctatatttagtgctttcatatacgtaatctcaaaaaaaaaaaaagaaagaaatatcggcataaaatgtaagcttccagagggatacaaacgcagcccagcgcggacaccgccagccccagccacgcggttcgcatcaagcgcactcccctgggggcggggcctgcgcgagctgggcgtgtcgggggcggggcctgcgcgcttgcttccggcgtgccgcgagaggcggggcgtgtggggaggcgcggccgccacgcgacgcctggctgggcccgcaccggagaggcgtctcggtacctggcaggcggcctgctactcggagcccgctgcggggcggcggcggcggggacatgcacgtgtgagatgcggcagcgggcggcgcggacgcgaacagcagcggcggcggcgggcgcggcctcctgggcgcggggcgcgcgggcccgtcatggaggcgcccaccgtggagacgccccccgacccctcgcccccttcggccccggcccctgccctggttccgttgcgcgccccggatgtggcgcggctgcgcgaggagcaggaaaaggtggtcactaactgccaagagagaatccagcattggaagaaggtagataatgactataatgcccttcgagaaagactcagcaccttgcctgataaattgtcttataatataatggtaccatttggcccttttgccttcatgccaggaaaacttgtccatactaatgaagtcactgttttactgggggacaactggtttgcaaagtgctcagcaaagcaggctgtaggtttagttgagcaccggaaagaacatgtaagaaaaacaatagatgacttaaaaaaagtgatgaaaaattttgaatccagagttgaattcacagaagatttgcagaaaatgagcgatgctgcaggtgatattgttgacatacgagaagaaattaaatgtgacttcgaatttaaagcaaaacaccgaattgctcataaaccgcattccaaaccaaaaacttcagatatttttgaagcagatattgcaaatgatgtgaaatccaaggatttgctagctgataaagaactgtgggctcgacttgaagaactagagagacaggaagaattgctgggtgaacttgatagtaagcctgatactgtgattgcaaatggagaagatacgacatcttctgaagaggaaaaggaagatcgtaacacaaatgtgaatgcgatgcatcaagtaacagactctcatactccttgtcataaggatgttgcaagttcagaaccattcagtggtcaagtgaatagtcagttgaactgttcagtgaatggttccagttcttaccacagtgatgatgatgatgatgatgatgacgacgacgacgacaacattgacgacgatgatggtgataacgaccatgaggctttaggggttggagataattctataccaacaatatatttttcacatactgttgagcctaagagggtccgaataaatactggaaagaataccactttaaaattcagtgaaaagaaagaagaagccaaacgtaaacgaaagaacagcactggcagtggccactctgcccaggagctgccgaccatcaggacgcctgcagacatttacagagcctttgttgatgttgtgaatggagaatatgtccctcgcaaatccatcctgaagtctcgaagtagagagaatagtgtgtgtagcgacactagtgaaagcagtgctgctgaatttgatgataggcggggagttttgaggagtatcagctgcgaagaagccacttgcagtgacaccagtgagagcattttggaagaggaaccacaagaaaatcaaaagaaacttttgcccttatcagtaacacctgaggctttttctggaactgttatagaaaaagaatttgtatcaccttccttaacaccacccccagccattgctcatcccgcactacccactattccagaacgaaaggaagttctgttggaagcatctgaagaaactggaaagagggtttcaaagtttaaagctgccagattgcaacagaaagactaggccctgtctaggaaatgggaatttacatcctaaaacctagttgttcatttgtttagagtatctatagcaaaataggttacatgtagtttgaaataaggtatcctgagttactttggcaacaagttcttttacccttacccgtggtatttgaaaaaaatcaaggtaactgtctgaatactttaatatcagcttgttttgtgaattctctgaatactgtcaacactcttatctaagtttgcctttatgatgcagtggcagcattttgaattacttttcaaagaatactgttcatatgcattgtttttgtgtttcaaactaaatacaggcagttttgtgccagctgtgatattgtgcataccatatggaccattttaaagaaaattttaaaatttcaaatagattcaacaattacattacttgctttcacattttaaaggcactttaaaaaaatctacttctcttgtaggttttgcggctagttggctattcaagaaacctcgcccctctgaatgtcatactgtaatctttaaggaagaaagctacatgaattaattgtactctatgggaaaatttctttggaaagatattttgtaaaacttttttttccaagtaaaaactttatgaaacttggtctca

SEQ ID NO: 447497 - DNA, 3710 bp, Homo sapiens
cagtaattaatgaacatgcaaaatataattgtatatttcaactcactaaaaaggcacagaaagagttgaatttgctaaaattaaatgtgcttatgaaacagctctagtacatgaattaagctcctagatacagatgcagcgccaaacgacggggagggagatggggcactcaaggcgacacgcggctcttgttgccgagcgtttcctgggcgtggagcttctatagaatgtaagctttttttttttaaggttccaaagcctatatttagtgctttcatatacgtaatctcaaaaaaaaaaaaagaaagaaatatcggcataaaatgtaagcttccagagggatacaaacgcagcccagcgcggacaccgccagccccagccacgcggttcgcatcaagcgcactcccctgggggcggggcctgcgcgagctgggcgtgtcgggggcggggcctgcgcgcttgcttccggcgtgccgcgagaggcggggcgtgtggggaggcgcggccgccacgcgacgcctggctgggcccgcaccggagaggcgtctcggtacctggcaggcggcctgctactcggagcccgctgcggggcggcggcggcggggacatgcacgtgtgagatgcggcagcgggcggcgcggacgcgaacagcagcggcggcggcgggcgcggcctcctgggcgcggggcgcgcggtgcctgagggcgggcgcgcgggcgctgggcaactgccggccgcgccgcctgcgcaggcgctggttcaggactcacacgccgcgctgaggcccgcgggcccgtcatggaggcgcccaccgtggagacgccccccgacccctcgcccccttcggccccggcccctgccctggttccgttgcgcgccccggatgtggcgcggctgcgcgaggagcaggaaaaggaagaaggtagataatgactataatgcccttcgagaaagactcagcaccttgcctgataaattgtcttataatataatggtaccatttggcccttttgccttcatgccaggaaaacttgtccatactaatgaagtcactgttttactgggggacaactggtttgcaaagtgctcagcaaagcaggctgtaggtttagttgagcaccggaaagaacatgtaagaaaaacaatagatgacttaaaaaaagtgatgaaaaattttgaatccagagttgaattcacagaagatttgcagaaaatgagcgatgctgcaggtgatattgttgacatacgagaagaaattaaatgtgacttcgaatttaaagcaaaacaccgaattgctcataaaccgcattccaaaccaaaaacttcagatatttttgaagcagatattgcaaatgatgtgaaatccaaggatttgctagctgataaagaactgtgggctcgacttgaagaactagagagacaggaagaattgctgggtgaacttgatagtaagcctgatactgtgattgcaaatggagaagatacgacatcttctgaagaggaaaaggaagatcgtaacacaaatgtgaatgcgatgcatcaagtaacagactctcatactccttgtcataaggatgttgcaagttcagaaccattcagtggtcaagtgaatagtcagttgaactgttcagtgaatggttccagttcttaccacagtgatgatgatgatgatgatgatgacgacgacgacgacaacattgacgacgatgatggtgataacgaccatgaggctttaggggttggagataattctataccaacaatatatttttcacatactgttgagcctaagagggtccgaataaatactggaaagaataccactttaaaattcagtgaaaagaaagaagaagccaaacgtaaacgaaagaacagcactggcagtggccactctgcccaggagctgccgaccatcaggacgcctgcagacatttacagagcctttgttgatgttgtgaatggagaatatgtccctcgcaaatccatcctgaagtctcgaagtagagagaatagtgtgtgtagcgacactagtgaaagcagtgctgctgaatttgatgataggcggggagttttgaggagtatcagctgcgaagaagccacttgcagtgacaccagtgagagcattttggaagaggaaccacaagaaaatcaaaagaaacttttgcccttatcagtaacacctgagttgaacatatagttgaccagattaaatgcagcaaacatccaggtgaaattgagtcatttctttttttgtggaacttctgatttctgtcattgagttaattatattaaaattttgaaacctgtacttattcctactagtatcagcacttttatttttcaacttccactgatcttttaaaattgaggcaatatgcagtaaaatatttaaataattgcataaacaccaccaaagagatatcagttagaaatgtcagtactggtgaaactaagctattggctagcaggcagcaaggccatcataggatagctcattcatcaactgatgtacaaaagtcagagtttgacaccctaatagcatttttattttaatacattatttttcacagcatgggctggacatgaatggaatgtatgaaagtttgaagaccttttatttatccatttcttttttttcccagataaaatttacattttacattttgttttcttgcatgtatactgtaaaaattacttctgtttggtggtgaaattaaaacttaatggtgttggtttctctgaacaattagtattttggtgtagtagtgttgtctagccaaaaatctcgtgaatttacttttaatgaaaagaattgccaaatgagtgaatgggaagattttgtgggtgtcttatttgcattttattaccataacctgacttttgttttctaggctttttctggaactgttatagaaaaagaatttgtatcaccttccttaacaccacccccagccattgctcatcccgcactacccactattccagaacgaaaggaagttctgttggaagcatctgaagaaactggaaagagggtttcaaagtttaaagctgccagattgcaacagaaagactaggccctgtctaggaaatgggaatttacatcctaaaacctagttgttcatttgtttagagtatctatagcaaaataggttacatgtagtttgaaataaggtatcctgagttactttggcaacaagttcttttacccttacccgtggtatttgaaaaaaatcaaggtaactgtctgaatactttaatatcagcttgttttgtgaattctctgaatactgtcaacactcttatctaagtttgcctttatgatgcagtggcagcattttgaattacttttcaaagaatactgttcatatgcattgtttttgtgtttcaaactaaatacaggcagttttgtgccagctgtgatattgtgcataccatatggaccattttaaagaaaattttaaaatttcaaatagattcaacaattacattacttgctttcacattttaaaggcactttaaaaaaatctacttctcttgtaggttttgcggctagttggctattcaagaaacctcgcccctctgaatgtcatactgtaatctttaaggaagaaagctacatgaattaattgtactctatgggaaaatttctttggaaagatattttgtaaaacttttttttccaagtaaaaactttatgaaacttggtctca

SEQ ID NO: 447498 - DNA, 2950 bp, Homo sapiens
cagtaattaatgaacatgcaaaatataattgtatatttcaactcactaaaaaggcacagaaagagttgaatttgctaaaattaaatgtgcttatgaaacagctctagtacatgaattaagctcctagatacagatgcagcgccaaacgacggggagggagatggggcactcaaggcgacacgcggctcttgttgccgagcgtttcctgggcgtggagcttctatagaatgtaagctttttttttttaaggttccaaagcctatatttagtgctttcatatacgtaatctcaaaaaaaaaaaaagaaagaaatatcggcataaaatgtaagcttccagagggatacaaacgcagcccagcgcggacaccgccagccccagccacgcggttcgcatcaagcgcactcccctgggggcggggcctgcgcgagctgggcgtgtcgggggcggggcctgcgcgcttgcttccggcgtgccgcgagaggcggggcgtgtggggaggcgcggccgccacgcgacgcctggctgggcccgcaccggagaggcgtctcggtacctggcaggcggcctgctactcggagcccgctgcggggcggcggcggcggggacatgcacgtgtgagatgcggcagcgggcggcgcggacgcgaacagcagcggcggcggcgggcgcggcctcctgggcgcggggcgcgcggtgcctgagggcgggcgcgcgggcgctgggcaactgccggccgcgccgcctgcgcaggcgctggttcaggactcacacgccgcgctgaggcccgcgggcccgtcatggaggcgcccaccgtggagacgccccccgacccctcgcccccttcggccccggcccctgccctggttccgttgcgcgccccggatgtggcgcggctgcgcgaggagcaggaaaaggaagaaggtagataatgactataatgcccttcgagaaagactcagcaccttgcctgataaattgtcttataatataatggtaccatttggcccttttgccttcatgccaggaaaacttgtccatactaatgaagtcactgttttactgggggacaactggtttgcaaagtgctcagcaaagcaggctgtaggtttagttgagcaccggaaagaacatgtaagaaaaacaatagatgacttaaaaaaagtgatgaaaaattttgaatccagagttgaattcacagaagatttgcagaaaatgagcgatgctgcaggtgatattgttgacatacgagaagaaattaaatgtgacttcgaatttaaagcaaaacaccgaattgctcataaaccgcattccaaaccaaaaacttcagatatttttgaagcagatattgcaaatgatgtgaaatccaaggatttgctagctgataaagaactgtgggctcgacttgaagaactagagagacaggaagaattgctgggtgaacttgatagtaagcctgatactgtgattgcaaatggagaagatacgacatcttctgaagaggatactccttgtcataaggatgttgcaagttcagaaccattcagtggtcaagtgaatagtcagttgaactgttcagtgaatggttccagttcttaccacagtgatgatgatgatgatgatgatgacgacgacgacgacaacattgacgacgatgatggtgataacgaccatgaggctttaggggttggagataattctataccaacaatatatttttcacatactgttgagcctaagagggtccgaataaatactggaaagaataccactttaaaattcagtgaaaagaaagaagaagccaaacgtaaacgaaagaacagcactggcagtggccactctgcccaggagctgccgaccatcaggacgcctgcagacatttacagagcctttgttgatgttgtgaatggagaatatgtccctcgcaaatccatcctgaagtctcgaagtagagagaatagtgtgtgtagcgacactagtgaaagcagtgctgctgaatttgatgataggcggggagttttgaggagtatcagctgcgaagaagccacttgcagtgacaccagtgagagcattttggaagaggaaccacaagaaaatcaaaagaaacttttgcccttatcagtaacacctgaggctttttctggaactgttatagaaaaagaatttgtatcaccttccttaacaccacccccagccattgctcatcccgcactacccactattccagaacgaaaggaagttctgttggaagcatctgaagaaactggaaagagggtttcaaagtttaaagctgccagattgcaacagaaagactaggccctgtctaggaaatgggaatttacatcctaaaacctagttgttcatttgtttagagtatctatagcaaaataggttacatgtagtttgaaataaggtatcctgagttactttggcaacaagttcttttacccttacccgtggtatttgaaaaaaatcaaggtaactgtctgaatactttaatatcagcttgttttgtgaattctctgaatactgtcaacactcttatctaagtttgcctttatgatgcagtggcagcattttgaattacttttcaaagaatactgttcatatgcattgtttttgtgtttcaaactaaatacaggcagttttgtgccagctgtgatattgtgcataccatatggaccattttaaagaaaattttaaaatttcaaatagattcaacaattacattacttgctttcacattttaaaggcactttaaaaaaatctacttctcttgtaggttttgcggctagttggctattcaagaaacctcgcccctctgaatgtcatactgtaatctttaaggaagaaagctacatgaattaattgtactctatgggaaaatttctttggaaagatattttgtaaaacttttttttccaagtaaaaactttatgaaacttggtctca

SEQ ID NO: 447499 - DNA, 1826 bp, Homo sapiens
  misc_feature (239)..(239): n is a, c, g, or t
cctggcaataaattacctgtgactctcgaacttcatagacaaaagcaccgtgagtagctcataaagcgcgcgattccgaaatcaggaaaacttcagagttatttttgaaagcagcatattgcaaatgattgtgaagatccaatcgaattcgtctatactgatccccacctggagggctcgatgttgaagcaacatatcagtacacatggcaacgaattgctagggatgatctctgcatntttaaagccttgcatgactcgctggattcgcaattcgcgagcatccatcctcattatctctctcgaaacgacgtacaagagaaccatcgtatccacaacatcgtggactgcgatgccctcgcactaactgagactcatcatactccttgtcataaggatgttgcaagttcagaaccattcagtggtcaagtgaatagtcagttgaactgttcagtgaatggttccagttcttaccacagtgatgatgatgatgatgatgatgacgacgacgacgacaacattgacgacgatgatggtgataacgaccatgaggctttaggggttggagataattctataccaacaatatatttttcacatactgttgagcctaagagggtccgaataaatactggaaagaataccactttaaaattcagtgaaaagaaagaagaagccaaacgtaaacgaaagaacagcactggcagtggccactctgcccaggagctgccgaccatcaggacgcctgcagacatttacagagcctttgttgatgttgtgaatggagaatatgtccctcgcaaatccatcctgaagtctcgaagtagagagaatagtgtgtgtagcgacactagtgaaagcagtgctgctgaatttgatgataggcggggagttttgaggagtatcagctgcgaagaagccacttgcagtgacaccagtgagagcattttggaagaggaaccacaagaaaatcaaaagaaacttttgcccttatcagtaacacctgaggctttttctggaactgttatagaaaaagaatttgtatcaccttccttaacaccacccccagccattgctcatcccgcactacccactattccagaacgaaaggaagttctgttggaagcatctgaagaaactggaaagagggtttcaaagtttaaagctgccagattgcaacagaaagactaggccctgtctaggaaatgggaatttacatcctaaaacctagttgttcatttgtttagagtatctatagcaaaataggttacatgtagtttgaaataaggtatcctgagttactttggcaacaagttcttttacccttacccgtggtatttgaaaaaaatcaaggtaactgtctgaatactttaatatcagcttgttttgtgaattctctgaatactgtcaacactcttatctaagtttgcctttatgatgcagtggcagcattttgaattacttttcaaagaatactgttcatatgcattgtttttgtgtttcaaactaaatacaggcagttttgtgccagctgtgatattgtgcataccatatggaccattttaaagaaaattttaaaatttcaaatagattcaacaattacattacttgctttcacattttaaaggcactttaaaaaaatctacttctcttgtaggttttgcggctagttggctattcaagaaacctcgcccctctgaatgtcatactgtaatctttaaggaagaaagctacatgaattaattgtactctatgggaaaatttctttggaaagatattttgtaaaacttttttttccaagtaaaaactttatgaaacttggtctca

SEQ ID NO: 447500 - DNA, 3265 bp, Homo sapiens
cagtaattaatgaacatgcaaaatataattgtatatttcaactcactaaaaaggcacagaaagagttgaatttgctaaaattaaatgtgcttatgaaacagctctagtacatgaattaagctcctagatacagatgcagcgccaaacgacggggagggagatggggcactcaaggcgacacgcggctcttgttgccgagcgtttcctgggcgtggagcttctatagaatgtaagctttttttttttaaggttccaaagcctatatttagtgctttcatatacgtaatctcaaaaaaaaaaaaagaaagaaatatcggcataaaatgtaagcttccagagggatacaaacgcagcccagcgcggacaccgccagccccagccacgcggttcgcatcaagcgcactcccctgggggcggggcctgcgcgagctgggcgtgtcgggggcggggcctgcgcgcttgcttccggcgtgccgcgagaggcggggcgtgtggggaggcgcggccgccacgcgacgcctggctgggcccgcaccggagaggcgtctcggtacctggcaggcggcctgctactcggagcccgctgcggggcggcggcggcggggacatgcacgtgtgagatgcggcagcgggcggcgcggacgcgaacagcagcggcggcggcgggcgcggcctcctgggcgcggggcgcgcggtgcctgagggcgggcgcgcgggcgctgggcaactgccggccgcgccgcctgcgcaggcgctggttcaggactcacacgccgcgctgaggcccgcgggcccgtcatggaggcgcccaccgtggagacgccccccgacccctcgcccccttcggccccggcccctgccctggttccgttgcgcgccccggatgtggcgcggctgcgcgaggagcaggaaaaggaagaaggtagataatgactataatgcccttcgagaaagactcagcaccttgcctgataaattgtcttataatataatggtaccatttggcccttttgccttcatgccaggaaaacttgtccatactaatgaagtcactgttttactgggggacaactggtttgcaaagtgctcagcaaagcaggctgtaggtttagttgagcaccggaaagaacatgtaagaaaaacaatagatgacttaaaaaaagtgatgaaaaattttgaatccagagttgaattcacagaagatttgcagaaaatgagcgatgctgcaggtgatattgttgacatacgagaagaaattaaatgtgacttcgaatttaaagcaaaacaccgaattgctcataaaccgcattccaaaccaaaaacttcagatatttttgaagcagatattgcaaatgatgtgaaatccaaggatttgctagctgataaagaactgtgggctcgacttgaagaactagagagacaggaagaattgctgggtgaacttgatagtaagcctgatactgtgattgcaaatggagaagatacgacatcttctgaagaggaaaaggaagatcgtaacacaaatgtgaatgcgatgcatcaagtaacagactctcatactccttgtcataaggatgttgcaagttcagaaccattcagtggtcaagtgaatagtcagttgaactgttcagtgaatggttccagttcttaccacagtgatgatgatgatgatgatgatgacgacgacgacgacaacattgacgacgatgatggtgataacgaccatgaggctttaggggttggagataattctataccaacaatatatttttcacatactgttgagcctaagagggtccgaataaatactggaaagaataccactttaaaattcagtgaaaagaaagaagaagccaaacgtaaacgaaagaacagcactggcagtggccactctgcccaggagctgccgaccatcaggacgcctgcagacatttacagagcctttgttgatgttgtgaatggagaatatgtccctcgcaaatccatcctgaagtctcgaagtagagagaatagtgtgtgtagcgacactagtgaaagcagtgctgctgaatttgatgataggcggggagttttgaggagtatcagctgcgaagaagccacttgcagtgacaccagtgagagcattttggaagaggaaccacaagaaaatcaaaagaaacttttgcccttatcagtaacacctgaggttttgcggctagttggctattcaagaaacctcgcccctctgaatgtcatactgtaatctttaaggaagaaagctacatgaattaattgtactctatgggaaaatttctttggaaagatattttgtaaaacttttttttccaagtaaaaactttatgaaacttggtctcaaaaatgttgtgaactttatgattcaaaattgagtacagatatgtccttgattcatatgtatgctacatgtatcacacaacagatctggaattctttcagttcctcagatacttctcccttagtttttgcagtttcactgggattatgttttgggaaacaaggaaaggtctagatgcttaaacattttaaataaaaattccttacagtttcatcttcccaacattttcattctttaaggctactttcctactaactgaaataacacatttacttttaccacaattcctcaaaataaatttattctaacattgaaaataacattacaagttaatcattagcttgatgcatgctaaaatgtagcttttaaaaagcattctgcattagtactaaaataagccatcaatgccagtccaccctctctattcatggctaaatatttaaaggttatttatagcttctttaatgaattcttcttaaacaaagtgaaattatgtcctagaaaagtagaagctattcgtaactagagcagtgcaactttaaagttttatgaatatgtattttaatgacaagggggcgagcttgcatccccactagttaatggataattcaaaccgaggactgattttgaaagatcacctaaaaatgtagatttgttctttagtaaatttagatcaactatgcatatattttgtaggtaaatctttcagtccatgccccaaccctcaccaaaaccaaagcagaaattacacacacaaagatgctcccgttaggaattgctattcacatgaggctttctgtgctagatttttttctcagaaacaaactttactgtaggactattgtggtgttcttaacagatttgtaatttcaagatgcgtgtcattaaataatttttcatgttcaaagactt

SEQ ID NO: 447501 - DNA, 548 bp, Homo sapiens
cttctacgaccctttacctgaacttttcaactccgttggtggtgggaggcagcgggcagaaatttactgttggccactgccaggtctatttcatatttcaaaggaggtcccggttaacccgggaccccctttggtgaacatggcccagtgaggccttgtcagccctgtcaatgcaacaacaatgtggaccccagtgcctctgggaattgtgaccggctgacaggcaggtgtttgaagtgtatccacaacacagccggcatctactgcgaccagtgcaaagcaggctacttcggggacccattggctcccaacccagcagacaagtgtcgagcttgcaactgtaaccccatgggctcagagcctgtaggatgtcgaagtgatggcacctgtgtttgcaagccaggatttggtggccccaactgtgagcatggagcattcagctgtccagcttgttggaccctgggagccattgaaagactaactcacgcaaggctgtggtctgatctaatttgcctttataaatgcctacttcatgcagtagataaagc

SEQ ID NO: 447502 - DNA, 405 bp, Homo sapiens
aacacatgtctaatgtgctatgctcgggctcaaatgacgcaaaccccgaattctggattcacatagcacaggctagttgtccttttgatccatactccttgtctggtcgattcacggcaacgtagcatatagcatgtgctgtgataatcatcacagtatcatgagccatcctcaatagactgcctggcaaggcacgcactgctatcagcgctgagtctttgcttctataatagtcctgacttggaaaccctttcgggacagtgctgttgggatatagtcaacttattctttgagtaatgtgactaaaggaaaaaactttgactttgcccaggcatgaaattcttcctaatgtcagaacagagtgcaacccagtcacactgtggccagtaaaatactattgcctca

SEQ ID NO: 447503 - DNA, 2959 bp, Homo sapiens
  misc_feature (6)..(6): n is a, c, g, or t
  misc_feature (10)..(10): n is a, c, g, or t
  misc_feature (18)..(18): n is a, c, g, or t
  misc_feature (91)..(91): n is a, c, g, or t
  misc_feature (2955)..(2959): n is a, c, g, or t
ttcctncggncattgcgnagatttcatctggccaggacactggctgtccacctggcactggtcccgacagaggccgagctggggaaagttnatgttcactgggggcaggaaccctccttatctccaggctgcctcccaacctcaggaggccacaagattagcagaaagccacgttgagtcagccagtaacatggagcaactgacaagggaaactgaggactattccaaacaagccctctcactggtgcgcaaggccctgcatgaaggagtcggaagcggaagcggtagcccggacggtgctgtggtgcaagggcttgtggaaaaattggagaaaaccaagtccctggcccagcagttgacaagggaggccactcaagcggaaattgaagcagataggtcttatcagcacagtctccgcctcctggattcagtgtctcggcttcagggagtcagtgatcagtcctttcaggtggaagaagcaaagaggatcaaacaaaaagcggattcactctcaagcctggtaaccaggcatatggatgagttcaagcgtacacagaagaatctgggaaactggaaagaagaagcacagcagctcttacagaatggaaaaagtgggagagagaaatcagatcagctgctttcccgtgccaatcttgctaaaagcagagcacaagaagcactgagtatgggcaatgccactttttatgaagttgagagcatccttaaaaacctcagagagtttgacctgcaggtggacaacagaaaagcagaagctgaagaagccatgaagagactctcctacatcagccagaaggtttcagatgccagtgacaagacccagcaagcagaaagagccctggggagcgctgctgctgatgcacagagggcaaagaatggggccggggaggccctggaaatctccagtgagattgaacaggagattgggagtctgaacttggaagccaatgtgacagcagatggagccttggccatggaaaagggactggcctctctgaagagtgagatgagggaagtggaaggagagctggaaaggaaggagctggagtttgacacgaatatggatgcagtacagatggtgattacagaagcccagaaggttgataccagagccaagaacgctggggttacaatccaagacacactcaacacattagacggcctcctgcatctgatggaccagcctctcagtgtagatgaagaggggctggtcttactggagcagaagctttcccgagccaagacccagatcaacagccaactgcggcccatgatgtcagagctggaagagagggcacgtcagcagaggggccacctccatttgctggagacaagcatagatgggattctggctgatgtgaagaacttggagaacattagggacaacctgcccccaggctgctacaatacccaggctcttgagcaacagtgaagctgccataaatatttctcaactgaggttcttgggatacagatctcagggctcgggagccatgtcatgtgagtgggtgggatggggacatttgaacatgtttaatgggtatgctcaggtcaactgacctgaccccattcctgatcccatggccaggtggttgtcttattgcaccatactccttgcttcctgatgctgggcaatgaggcagatagcactgggtgtgagaatgatcaaggatctggaccccaaagaatagactggatggaaagacaaactgcacaggcagatgtttgcctcataatagtcgtaagtggagtcctggaatttggacaagtgctgttgggatatagtcaacttattctttgagtaatgtgactaaaggaaaaaactttgactttgcccaggcatgaaattcttcctaatgtcagaacagagtgcaacccagtcacactgtggccagtaaaatactattgcctcatattgtcctctgcaagcttcttgctgatcagagttcctcctacttacaacccagggtgtgaacatgttctccattttcaagctggaagaagtgagcagtgttggagtgaggacctgtaaggcaggcccattcagagctatggtgcttgctggtgcctgccaccttcaagttctggacctgggcatgacatcctttcttttaatgatgccatggcaacttagagattgcatttttattaaagcatttcctaccagcaaagcaaatgttgggaaagtatttactttttcggtttcaaagtgatagaaaagtgtggcttgggcattgaaagaggtaaaattctctagatttattagtcctaattcaatcctacttttcgaacaccaaaaatgatgcgcatcaatgtattttatcttattttctcaatctcctctctctttcctccacccataataagagaatgttcctactcacacttcagctgggtcacatccatccctccattcatccttccatccatctttccatccattacctccatccatccttccaacatatatttattgagtacctactgtgtgccaggggctggtgggacagtggtgacatagtctctgccctcatagagttgattgtctagtgaggaagacaagcatttttaaaaaataaatttaaacttacaaactttgtttgtcacaagtggtgtttattgcaataaccgcttggtttgcaacctctttgctcaacagaacatatgttgcaagaccctcccatgggggcacttgagttttggcaaggctgacagagctctgggttgtgcacatttctttgcattccagctgtcactctgtgcctttctacaactgattgcaacagactgttgagttatgataacaccagtgggaattgctggaggaaccagaggcacttccaccttggctgggaagactatggtgctgccttgcttctgtatttccttggattttcctgaaagtgtttttaaataaagaacaattgttagatgccnnnnn

SEQ ID NO: 447504 - DNA, 5258 bp, Homo sapiens
  misc_feature (4666)..(4666): n is a, c, g, or t
gaccacctgatcgaaggaaaaggaaggcacagcggagcgcagagtgagaaccaccaaccgaggcgccgggcagcgacccctgcagcggagacagagactgagcggcccggcaccgccatgcctgcgctctggctgggctgctgcctctgcttctcgctcctcctgcccgcagcccgggccacctccaggagggaagtctgtgattgcaatgggaagtccaggcagtgtatctttgatcgggaacttcacagacaaactggtaatggattccgctgcctcaactgcaatgacaacactgatggcattcactgcgagaagtgcaagaatggcttttaccggcacagagaaagggaccgctgtttgccctgcaattgtaactccaaaggttctcttagtgctcgatgtgacaactctggacggtgcagctgtaaaccaggtgtgacaggagccagatgcgaccgatgtctgccaggcttccacatgctcacggatgcggggtgcacccaagaccagagactgctagactccaagtgtgactgtgacccagctggcatcgcagggccctgtgacgcgggccgctgtgtctgcaagccagctgttactggagaacgctgtgataggtgtcgatcaggttactataatctggatggggggaaccctgagggctgtacccagtgtttctgctatgggcattcagccagctgccgcagctctgcagaatacagtgtccataagatcacctctacctttcatcaagatgttgatggctggaaggctgtccaacgaaatgggtctcctgcaaagctccaatggtcacagcgccatcaagatgtgtttagctcagcccaacgactagaccctgtctattttgtggctcctgccaaatttcttgggaatcaacaggtgagctatgggcaaagcctgtcctttgactaccgtgtggacagaggaggcagacacccatctgcccatgatgtgattctggaaggtgctggtctacggatcacagctcccttgatgccacttggcaagacactgccttgtgggctcaccaagacttacacattcaggttaaatgagcatccaagcaataattggagcccccagctgagttactttgagtatcgaaggttactgcggaatctcacagccctccgcatccgagctacatatggagaatacagtactgggtacattgacaatgtgaccctgatttcagcccgccctgtctctggagccccagcaccctgggttgaacagtgtatatgtcctgttgggtacaaggggcaattctgccaggattgtgcttctggctacaagagagattcagcgagactggggccttttggcacctgtattccttgtaactgtcaagggggaggggcctgtgatccagacacaggagattgttattcaggggatgagaatcctgacattgagtgtgctgactgcccaattggtttctacaacgatccgcacgacccccgcagctgcaagccatgtccctgtcataacgggttcagctgctcagtgatgccggagacggaggaggtggtgtgcaataactgccctcccggggtcaccggtgcccgctgtgagctctgtgctgatggctactttggggacccctttggtgaacatggcccagtgaggccttgtcagccctgtcaatgcaacaacaatgtggaccccagtgcctctgggaattgtgaccggctgacaggcaggtgtttgaagtgtatccacaacacagccggcatctactgcgaccagtgcaaagcaggctacttcggggacccattggctcccaacccagcagacaagtgtcgagcttgcaactgtaaccccatgggctcagagcctgtaggatgtcgaagtgatggcacctgtgtttgcaagccaggatttggtggccccaactgtgagcatggagcattcagctgtccagcttgctataatcaagtgaagattcagatggatcagtttatgcagcagcttcagagaatggaggccctgatttcaaaggctcagggtggtgatggagtagtacctgatacagagctggaaggcaggatgcagcaggctgagcaggcccttcaggacattctgagagatgcccagatttcagaaggtgctagcagatcccttggtctccagttggccaaggtgaggagccaagagaacagctaccagagccgcctggatgacctcaagatgactgtggaaagagttcgggctctgggaagtcagtaccagaaccgagttcgggatactcacaggctcatcactcagatgcagctgagcctggcagaaagtgaagcttccttgggaaacactaacattcctgcctcagaccactacgtggggccaaatggctttaaaagtctggctcaggaggccacaagattagcagaaagccacgttgagtcagccagtaacatggagcaactgacaagggaaactgaggactattccaaacaagccctctcactggtgcgcaaggccctgcatgaaggagtcggaagcggaagcggtagcccggacggtgctgtggtgcaagggcttgtggaaaaattggagaaaaccaagtccctggcccagcagttgacaagggaggccactcaagcggaaattgaagcagataggtcttatcagcacagtctccgcctcctggattcagtgtctcggcttcagggagtcagtgatcagtcctttcaggtggaagaagcaaagaggatcaaacaaaaagcggattcactctcaagcctggtaaccaggcatatggatgagttcaagcgtacacagaagaatctgggaaactggaaagaagaagcacagcagctcttacagaatggaaaaagtgggagagagaaatcagatcagctgctttcccgtgccaatcttgctaaaagcagagcacaagaagcactgagtatgggcaatgccactttttatgaagttgagagcatccttaaaaacctcagagagtttgacctgcaggtggacaacagaaaagcagaagctgaagaagccatgaagagactctcctacatcagccagaaggtttcagatgccagtgacaagacccagcaagcagaaagagccctggggagcgctgctgctgatgcacagagggcaaagaatggggccggggaggccctggaaatctccagtgagattgaacaggagattgggagtctgaacttggaagccaatgtgacagcagatggagccttggccatggaaaagggactggcctctctgaagagtgagatgagggaagtggaaggagagctggaaaggaaggagctggagtttgacacgaatatggatgcagtacagatggtgattacagaagcccagaaggttgataccagagccaagaacgctggggttacaatccaagacacactcaacacattagacggcctcctgcatctgatgggtatgtgaacccacaacccacaaccttccagctccatgctccagggctttgctccagaacactcactatacctagccccagcaaaggggagtctcagctttccttaaggatatcagtaaatgtgctttgtttccaggcccagataactttcggcaggttcccttacatttactggaccctgttttaccgttgctaagatgggtcactgaacacctattgcacttgggggtaaaggtctgtgggccaaagaacaggtgtatataagcaacttcacagaacacgagacagcttgggaatcctgctaaagagtctggcctggaccctgagaagccagtggacagttttaagcagaggaataacatcaccactgtatatttcagaaagatcactagggcagccgagtggaggaaagcttgaagagggggttagagagaaggcaggttgagactacttaagatattgttgaaataattgaagagagaaatgacaggagcctgctctaaggcagtagaatggtggctgggaagatgtgaaggaagattttcccagtctgtgaagtcaagaatcacttgccggccgggtgtggtggctcacgcctgtaattctagcactttgggagactgaagcgggtggatcacccgaggtcaggagttgaagaccagcctggccaacatggtgaaaccctgtctctactaaaagtacaaaaattagctggatgtggtggtgggcgcctgtaattccagctactcaggagtctgaggcaggagaatcgcttgaacccaggaggcggaggttacagtgagccaagattgcaccactgctctccagcctggggaacagagcaagactgtctcaaaaaaaaaaaaaaagggaaacaaaaacaacagcactcagtggcaggaaacacaactaggaaccatcacgcaagacacaaagttaaaccctggaaggtaacccaggtggcgcagcacactccgagctgcacggggacaaaacaccccagaaagacaatgtgacgcagcagctaggctagagacaaataatcacgggcacacgaatccgaggaatgggaaccaaccggagggcgaaacgaaacaccactacagagacaccccctaacaagaaaagatccagactgcccacagaaaagcaaacacatatcacctaagcggcacacacagtcccccggcggaacttcaccacggaaagacaaggccaganattactcaacaaccaccatcgaatacggggaccacggataacaatcacagcggcttgggaacacctgagccagcaccagaactcgtagcaacacactcagaagcaattccggtaccaacaagaattccacaagcaaacaccatctacgggagccacaccagtcgtacatgaggcacacacagacaaaacccacacaggctaccggcaagacaaccacacgttcgaaaacaccggcgcaataactaaacccggaacaggagaggagggacaacaacacacaccccccatgatagaatggcgcaccactgtgataaccaactatgcgagactggcacagaccacacccagtggggaccccacgcaaatggagaaaccacaagatataacgccacacgaaagaggatacaaacgtgcccacgtaacagggcattcgtgcgaaaaaacaaccggggccacaaacaagcagacacaagaaaacaacaaaacacacgcaaagttgaactacttcaacacgcgagtagcaacgcggctcaacaacaaaacaaacgcgggcacgcaaagaagacaccgctaggagcccaagctatcaacc

SEQ ID NO: 447505 - DNA, 2046 bp, Homo sapiens
  misc_feature (2042)..(2046): n is a, c, g, or t
agcggggaacaatcacttgaacaggagattgggagtctgaacttggaagccaatgtgacagcagatggagccttggccatggaaaagggactggcctctctgaagagtgagatgagggaagtggaaggagagctggaaaggaaggagctggagtttgacacgaatatggatgcagtacagatggtgattacagaagcccagaaggttgataccagagccaagaacgctggggttacaatccaagacacactcaacacattagacggcctcctgcatctgatggaccagcctctcagtgtagatgaagaggggctggtcttactggagcagaagctttcccgagccaagacccagatcaacagccaactgcggcccatgatgtcagagctggaagagagggcacgtcagcagaggggccacctccatttgctggagacaagcatagatgggattctggctgatgtgaagaacttggagaacattagggacaacctgcccccaggctgctacaatacccaggctcttgagcaacagtgaagctgccataaatatttctcaactgaggttcttgggatacagatctcagggctcgggagccatgtcatgtgagtgggtgggatggggacatttgaacatgtttaatgggtatgctcaggtcaactgacctgaccccattcctgatcccatggccaggtggttgtcttattgcaccatactccttgcttcctgatgctgggcaatgaggcagatagcactgggtgtgagaatgatcaaggatctggaccccaaagaatagactggatggaaagacaaactgcacaggcagatgtttgcctcataatagtcgtaagtggagtcctggaatttggacaagtgctgttgggatatagtcaacttattctttgagtaatgtgactaaaggaaaaaactttgactttgcccaggcatgaaattcttcctaatgtcagaacagagtgcaacccagtcacactgtggccagtaaaatactattgcctcatattgtcctctgcaagcttcttgctgatcagagttcctcctacttacaacccagggtgtgaacatgttctccattttcaagctggaagaagtgagcagtgttggagtgaggacctgtaaggcaggcccattcagagctatggtgcttgctggtgcctgccaccttcaagttctggacctgggcatgacatcctttcttttaatgatgccatggcaacttagagattgcatttttattaaagcatttcctaccagcaaagcaaatgttgggaaagtatttactttttcggtttcaaagtgatagaaaagtgtggcttgggcattgaaagaggtaaaattctctagatttattagtcctaattcaatcctacttttcgaacaccaaaaatgatgcgcatcaatgtattttatcttattttctcaatctcctctctctttcctccacccataataagagaatgttcctactcacacttcagctgggtcacatccatccctccattcatccttccatccatctttccatccattacctccatccatccttccaacatatatttattgagtacctactgtgtgccaggggctggtgggacagtggtgacatagtctctgccctcatagagttgattgtctagtgaggaagacaagcatttttaaaaaataaatttaaacttacaaactttgtttgtcacaagtggtgtttattgcaataaccgcttggtttgcaacctctttgctcaacagaacatatgttgcaagaccctcccatgggggcacttgagttttggcaaggctgacagagctctgggttgtgcacatttctttgcattccagctgtcactctgtgcctttctacaactgattgcaacagactgttgagttatgataacaccagtgggaattgctggaggaaccagaggcacttccaccttggctgggaagactatggtgctgccttgcttctgtatttccttggattttcctgaaagtgtttttaaataaagaacaattgttagatgccnnnnn

SEQ ID NO: 447506 - DNA, 2021 bp, Homo sapiens
  misc_feature (2017)..(2021): n is a, c, g, or t
gagaagattagcatggcccctgcgcaaggatgacacgcaaattcgtgaagcgttccatatttttactggcctctctgaagagtgagatgagggaagtggaaggagagctggaaaggaaggagctggagtttgacacgaatatggatgcagtacagatggtgattacagaagcccagaaggttgataccagagccaagaacgctggggttacaatccaagacacactcaacacattagacggcctcctgcatctgatggaccagcctctcagtgtagatgaagaggggctggtcttactggagcagaagctttcccgagccaagacccagatcaacagccaactgcggcccatgatgtcagagctggaagagagggcacgtcagcagaggggccacctccatttgctggagacaagcatagatgggattctggctgatgtgaagaacttggagaacattagggacaacctgcccccaggctgctacaatacccaggctcttgagcaacagtgaagctgccataaatatttctcaactgaggttcttgggatacagatctcagggctcgggagccatgtcatgtgagtgggtgggatggggacatttgaacatgtttaatgggtatgctcaggtcaactgacctgaccccattcctgatcccatggccaggtggttgtcttattgcaccatactccttgcttcctgatgctgggcaatgaggcagatagcactgggtgtgagaatgatcaaggatctggaccccaaagaatagactggatggaaagacaaactgcacaggcagatgtttgcctcataatagtcgtaagtggagtcctggaatttggacaagtgctgttgggatatagtcaacttattctttgagtaatgtgactaaaggaaaaaactttgactttgcccaggcatgaaattcttcctaatgtcagaacagagtgcaacccagtcacactgtggccagtaaaatactattgcctcatattgtcctctgcaagcttcttgctgatcagagttcctcctacttacaacccagggtgtgaacatgttctccattttcaagctggaagaagtgagcagtgttggagtgaggacctgtaaggcaggcccattcagagctatggtgcttgctggtgcctgccaccttcaagttctggacctgggcatgacatcctttcttttaatgatgccatggcaacttagagattgcatttttattaaagcatttcctaccagcaaagcaaatgttgggaaagtatttactttttcggtttcaaagtgatagaaaagtgtggcttgggcattgaaagaggtaaaattctctagatttattagtcctaattcaatcctacttttcgaacaccaaaaatgatgcgcatcaatgtattttatcttattttctcaatctcctctctctttcctccacccataataagagaatgttcctactcacacttcagctgggtcacatccatccctccattcatccttccatccatctttccatccattacctccatccatccttccaacatatatttattgagtacctactgtgtgccaggggctggtgggacagtggtgacatagtctctgccctcatagagttgattgtctagtgaggaagacaagcatttttaaaaaataaatttaaacttacaaactttgtttgtcacaagtggtgtttattgcaataaccgcttggtttgcaacctctttgctcaacagaacatatgttgcaagaccctcccatgggggcacttgagttttggcaaggctgacagagctctgggttgtgcacatttctttgcattccagctgtcactctgtgcctttctacaactgattgcaacagactgttgagttatgataacaccagtgggaattgctggaggaaccagaggcacttccaccttggctgggaagactatggtgctgccttgcttctgtatttccttggattttcctgaaagtgtttttaaataaagaacaattgttagatgccnnnnn

SEQ ID NO: 447507 - DNA, 4238 bp, Homo sapiens
gaccacctgatcgaaggaaaaggaaggcacagcggagcgcagagtgagaaccaccaaccgaggcgccgggcagcgacccctgcagcggagacagagactgagcggcccggcaccgccatgcctgcgctctggctgggctgctgcctctgcttctcgctcctcctgcccgcagcccgggccacctccaggagggaagtctgtgattgcaatgggaagtccaggcagtgtatctttgatcgggaacttcacagacaaactggtaatggattccgctgcctcaactgcaatgacaacactgatggcattcactgcgagaagtgcaagaatggcttttaccggcacagagaaagggaccgctgtttgccctgcaattgtaactccaaaggttctcttagtgctcgatgtgacaactctggacggtgcagctgtaaaccaggtgtgacaggagccagatgcgaccgatgtctgccaggcttccacatgctcacggatgcggggtgcacccaagaccagagactgctagactccaagtgtgactgtgacccagctggcatcgcagggccctgtgacgcgggccgctgtgtctgcaagccagctgttactggagaacgctgtgataggtgtcgatcaggttactataatctggatggggggaaccctgagggctgtacccagtgtttctgctatgggcattcagccagctgccgcagctctgcagaatacagtgtccataagatcacctctacctttcatcaagatgttgatggctggaaggctgtccaacgaaatgggtctcctgcaaagctccaatggtcacagcgccatcaagatgtgtttagctcagcccaacgactagaccctgtctattttgtggctcctgccaaatttcttgggaatcaacaggtgagctatgggcaaagcctgtcctttgactaccgtgtggacagaggaggcagacacccatctgcccatgatgtgattctggaaggtgctggtctacggatcacagctcccttgatgccacttggcaagacactgccttgtgggctcaccaagacttacacattcaggttaaatgagcatccaagcaataattggagcccccagctgagttactttgagtatcgaaggttactgcggaatctcacagccctccgcatccgagctacatatggagaatacagtactgggtacattgacaatgtgaccctgatttcagcccgccctgtctctggagccccagcaccctgggttgaacagtgtatatgtcctgttgggtacaaggggcaattctgccaggattgtgcttctggctacaagagagattcagcgagactggggccttttggcacctgtattccttgtaactgtcaagggggaggggcctgtgatccagacacaggagattgttattcaggggatgagaatcctgacattgagtgtgctgactgcccaattggtttctacaacgatccgcacgacccccgcagctgcaagccatgtccctgtcataacgggttcagctgctcagtgatgccggagacggaggaggtggtgtgcaataactgccctcccggggtcaccggtgcccgctgtgagctctgtgctgatggctactttggggacccctttggtgaacatggcccagtgaggccttgtcagccctgtcaatgcaacaacaatgtggaccccagtgcctctgggaattgtgaccggctgacaggcaggtgtttgaagtgtatccacaacacagccggcatctactgcgaccagtgcaaagcaggctacttcggggacccattggctcccaacccagcagacaagtgtcgagcttgcaactgtaaccccatgggctcagagcctgtaggatgtcgaagtgatggcacctgtgtttgcaagccaggatttggtggccccaactgtgagcatggagcattcagctgtccagcttgctataatcaagtgaagattcagatggatcagtttatgcagcagcttcagagaatggaggccctgatttcaaaggctcagggtggtgatggagtagtacctgatacagagctggaaggcaggatgcagcaggctgagcaggcccttcaggacattctgagagatgcccagatttcagaaggtgctagcagatcccttggtctccagttggccaaggtgaggagccaagagaacagctaccagagccgcctggatgacctcaagatgactgtggaaagagttcgggctctgggaagtcagtaccagaaccgagttcgggatactcacaggctcatcactcagatgcagctgagcctggcagaaagtgaagcttccttgggaaacactaacattcctgcctcagaccactacgtggggccaaatggctttaaaagtctggctcaggaggccacaagattagcagaaagccacgttgagtcagccagtaacatggagcaactgacaagggaaactgaggactattccaaacaagccctctcactggtgcgcaaggccctgcatgaaggagtcggaagcggaagcggtagcccggacggtgctgtggtgcaagggcttgtggaaaaattggagaaaaccaagtccctggcccagcagttgacaagggaggccactcaagcggaaattgaagcagataggtcttatcagcacagtctccgcctcctggattcagtgtctcggcttcagggagtcagtgatcagtcctttcaggtggaagaagcaaagaggatcaaacaaaaagcggattcactctcaagcctggtaaccaggcatatggatgagttcaagcgtacacagaagaatctgggaaactggaaagaagaagcacagcagctcttacagaatggaaaaagtgggagagagaaatcagatcagctgctttcccgtgccaatcttgctaaaagcagagcacaagaagcactgagtatgggcaatgccactttttatgaagttgagagcatccttaaaaacctcagagagtttgacctgcaggtggacaacagaaaagcagaagctgaagaagccatgaagagactctcctacatcagccagaaggtttcagatgccagtgacaagacccagcaagcagaaagagccctggggagcgctgctgctgatgcacagagggcaaagaatggggccggggaggccctggaaatctccagtgagattgaacaggagattgggagtctgaacttggaagccaatgtgacagcagatggagccttggccatggaaaagggactggcctctctgaagagtgagatgagggaagtggaaggagagctggaaaggaaggagctggagtttgacacgaatatggatgcagtacagatggtgattacagaagcccagaaggttgataccagagccaagaacgctggggttacaatccaagacacactcaacacattagacggcctcctgcatctgatggaccagcctctcagtgtagatgaagaggggctggtcttactggagcagaagctttcccgagccaagacccagatcaacagccaactgcggcccatgatgtcagagctggaagagagggcacgtcagcagaggggccacctccatttgctggagacaagcatagatgggattctggctgatgtgaagaacttggagaacattagggacaacctgcccccaggctgctacaatacccaggctcttgagcaacagtgaagctgccataaatatttctcaactgaggttcttgggatacagatctcagggctcgggagccatgtcatgtgagtgggtgggatggggacatttgaacatgtttaatgggtatgctcaggtcaactgacctgaccccattcctgatcccatggccaggtggttgtcttattgcaccatactccttgcttcctgatgctgggcaatgaggcagatagcactgggtgtgagaatgatcaaggatctggaccccaaagaatagactggatggaaagacaaactgcacaggcagatgtttgcctcataatagtcgtaagtggagtcctggaatttggacaagtgctgttgggatatagtcaacttattctttgagtaatgtgactaaaggaaaaaactttgactttgcccaggcatgaaattcttcctaatgtcagaacagagtgcaacccagtcacactgtggccagtaaaatactattgcctcatattgtcctctgcaagcttcttgctgatcagtatcccgtcggtaccgagctcgattta

SEQ ID NO: 447508 - DNA, 5018 bp, Homo sapiens
  misc_feature (5014)..(5018): n is a, c, g, or t
gaccacctgatcgaaggaaaaggaaggcacagcggagcgcagagtgagaaccaccaaccgaggcgccgggcagcgacccctgcagcggagacagagactgagcggcccggcaccgccatgcctgcgctctggctgggctgctgcctctgcttctcgctcctcctgcccgcagcccgggccacctccaggagggaagtctgtgattgcaatgggaagtccaggcagtgtatctttgatcgggaacttcacagacaaactggtaatggattccgctgcctcaactgcaatgacaacactgatggcattcactgcgagaagtgcaagaatggcttttaccggcacagagaaagggaccgctgtttgccctgcaattgtaactccaaaggttctcttagtgctcgatgtgacaactctggacggtgcagctgtaaaccaggtgtgacaggagccagatgcgaccgatgtctgccaggcttccacatgctcacggatgcggggtgcacccaagaccagagactgctagactccaagtgtgactgtgacccagctggcatcgcagggccctgtgacgcgggccgctgtgtctgcaagccagctgttactggagaacgctgtgataggtgtcgatcaggttactataatctggatggggggaaccctgagggctgtacccagtgtttctgctatgggcattcagccagctgccgcagctctgcagaatacagtgtccataagatcacctctacctttcatcaagatgttgatggctggaaggctgtccaacgaaatgggtctcctgcaaagctccaatggtcacagcgccatcaagatgtgtttagctcagcccaacgactagaccctgtctattttgtggctcctgccaaatttcttgggaatcaacaggtgagctatgggcaaagcctgtcctttgactaccgtgtggacagaggaggcagacacccatctgcccatgatgtgattctggaaggtgctggtctacggatcacagctcccttgatgccacttggcaagacactgccttgtgggctcaccaagacttacacattcaggttaaatgagcatccaagcaataattggagcccccagctgagttactttgagtatcgaaggttactgcggaatctcacagccctccgcatccgagctacatatggagaatacagtactgggtacattgacaatgtgaccctgatttcagcccgccctgtctctggagccccagcaccctgggttgaacagtgtatatgtcctgttgggtacaaggggcaattctgccaggattgtgcttctggctacaagagagattcagcgagactggggccttttggcacctgtattccttgtaactgtcaagggggaggggcctgtgatccagacacaggagattgttattcaggggatgagaatcctgacattgagtgtgctgactgcccaattggtttctacaacgatccgcacgacccccgcagctgcaagccatgtccctgtcataacgggttcagctgctcagtgatgccggagacggaggaggtggtgtgcaataactgccctcccggggtcaccggtgcccgctgtgagctctgtgctgatggctactttggggacccctttggtgaacatggcccagtgaggccttgtcagccctgtcaatgcaacaacaatgtggaccccagtgcctctgggaattgtgaccggctgacaggcaggtgtttgaagtgtatccacaacacagccggcatctactgcgaccagtgcaaagcaggctacttcggggacccattggctcccaacccagcagacaagtgtcgagcttgcaactgtaaccccatgggctcagagcctgtaggatgtcgaagtgatggcacctgtgtttgcaagccaggatttggtggccccaactgtgagcatggagcattcagctgtccagcttgctataatcaagtgaagattcagatggatcagtttatgcagcagcttcagagaatggaggccctgatttcaaaggctcagggtggtgatggagtagtacctgatacagagctggaaggcaggatgcagcaggctgagcaggcccttcaggacattctgagagatgcccagatttcagaaggtgctagcagatcccttggtctccagttggccaaggtgaggagccaagagaacagctaccagagccgcctggatgacctcaagatgactgtggaaagagttcgggctctgggaagtcagtaccagaaccgagttcgggatactcacaggctcatcactcagatgcagctgagcctggcagaaagtgaagcttccttgggaaacactaacattcctgcctcagaccactacgtggggccaaatggctttaaaagtctggctcaggaggccacaagattagcagaaagccacgttgagtcagccagtaacatggagcaactgacaagggaaactgaggactattccaaacaagccctctcactggtgcgcaaggccctgcatgaaggagtcggaagcggaagcggtagcccggacggtgctgtggtgcaagggcttgtggaaaaattggagaaaaccaagtccctggcccagcagttgacaagggaggccactcaagcggaaattgaagcagataggtcttatcagcacagtctccgcctcctggattcagtgtctcggcttcagggagtcagtgatcagtcctttcaggtggaagaagcaaagaggatcaaacaaaaagcggattcactctcaagcctggtaaccaggcatatggatgagttcaagcgtacacagaagaatctgggaaactggaaagaagaagcacagcagctcttacagaatggaaaaagtgggagagagaaatcagatcagctgctttcccgtgccaatcttgctaaaagcagagcacaagaagcactgagtatgggcaatgccactttttatgaagttgagagcatccttaaaaacctcagagagtttgacctgcaggtggacaacagaaaagcagaagctgaagaagccatgaagagactctcctacatcagccagaaggtttcagatgccagtgacaagacccagcaagcagaaagagccctggggagcgctgctgctgatgcacagagggcaaagaatggggccggggaggccctggaaatctccagtgagattgaacaggagattgggagtctgaacttggaagccaatgtgacagcagatggagccttggccatggaaaagggactggcctctctgaagagtgagatgagggaagtggaaggagagctggaaaggaaggagctggagtttgacacgaatatggatgcagtacagatggtgattacagaagcccagaaggttgataccagagccaagaacgctggggttacaatccaagacacactcaacacattagacggcctcctgcatctgatggaccagcctctcagtgtagatgaagaggggctggtcttactggagcagaagctttcccgagccaagacccagatcaacagccaactgcggcccatgatgtcagagctggaagagagggcacgtcagcagaggggccacctccatttgctggagacaagcatagatgggattctggctgatgtgaagaacttggagaacattagggacaacctgcccccaggctgctacaatacccaggctcttgagcaacagtgaagctgccataaatatttctcaactgaggttcttgggatacagatctcagggctcgggagccatgtcatttgtcttattgcaccatactccttgcttcctgatgctgggcaatgaggcagatagcactgggtgtgagaatgatcaaggatctggaccccaaagaatagactggatggaaagacaaactgcacaggcagatgtttgcctcataatagtcgcatgaaattcttcctaatgtcagaacagagtgcaacccagtcacactgtggccagtaaaatactattgcctcatattgtcctctgcaagcttcttgctgatcagagttcctcctacttacaacccagggtgtgaacatgttctccattttcaagctggaagaagtgagcagtgttggagtgaggacctgtaaggcaggcccattcagagctatggtgcttgctggtgcctgccaccttcaagttctggacctgggcatgacatcctttcttttaatgatgccatggcaacttagagattgcatttttattaaagcatttcctaccagcaaagcaaatgttgggaaagtatttactttttcggtttcaaagtgatagaaaagtgtggcttgggcattgaaagaggtaaaattctctagatttattagtcctaattcaatcctacttttcgaacaccaaaaatgatgcgcatcaatgtattttatcttattttctcaatctcctctctctttcctccacccataataagagaatgttcctactcacacttcagctgggtcacatccatccctccattcatccttccatccatctttccatccattacctccatccatccttccaacatatatttattgagtacctactgtgtgccaggggctggtgggacagtggtgacatagtctctgccctcatagagttgattgtctagtgaggaagacaagcatttttaaaaaataaatttaaacttacaaactttgtttgtcacaagtggtgtttattgcaataaccgcttggtttgcaacctctttgctcaacagaacatatgttgcaagaccctcccatgggggcacttgagttttggcaaggctgacagagctctgggttgtgcacatttctttgcattccagctgtcactctgtgcctttctacaactgattgcaacagactgttgagttatgataacaccagtgggaattgctggaggaaccagaggcacttccaccttggctgggaagactatggtgctgccttgcttctgtatttccttggattttcctgaaagtgtttttaaataaagaacaattgttagatgccnnnnn

SEQ ID NO: 447509 - DNA, 4774 bp, Homo sapiens
  misc_feature (4770)..(4774): n is a, c, g, or t
gaccacctgatcgaaggaaaaggaaggcacagcggagcgcagagtgagaaccaccaaccgaggcgccgggcagcgacccctgcagcggagacagagactgagcggcccggcaccgccatgcctgcgctctggctgggctgctgcctctgcttctcgctcctcctgcccgcagcccgggccacctccaggagggaagtctgtgattgcaatgggaagtccaggcagtgtatctttgatcgggaacttcacagacaaactggtaatggattccgctgcctcaactgcaatgacaacactgatggcattcactgcgagaagtgcaagaatggcttttaccggcacagagaaagggaccgctgtttgccctgcaattgtaactccaaaggttctcttagtgctcgatgtgacaactctggacggtgcagctgtaaaccaggtgtgacaggagccagatgcgaccgatgtctgccaggcttccacatgctcacggatgcggggtgcacccaagaccagagactgctagactccaagtgtgactgtgacccagctggcatcgcagggccctgtgacgcgggccgctgtgtctgcaagccagctgttactggagaacgctgtgataggtgtcgatcaggttactataatctggatggggggaaccctgagggctgtacccagtgtttctgctatgggcattcagccagctgccgcagctctgcagaatacagtgtccataagatcacctctacctttcatcaagatgttgatggctggaaggctgtccaacgaaatgggtctcctgcaaagctccaatggtcacagcgccatcaagatgtgtttagctcagcccaacgactagaccctgtctattttgtggctcctgccaaatttcttgggaatcaacaggtgagctatgggcaaagcctgtcctttgactaccgtgtggacagaggaggcagacacccatctgcccatgatgtgattctggaaggtgctggtctacggatcacagctcccttgatgccacttggcaagacactgccttgtgggctcaccaagacttacacattcaggttaaatgagcatccaagcaataattggagcccccagctgagttactttgagtatcgaaggttactgcggaatctcacagccctccgcatccgagctacatatggagaatacagtactgggtacattgacaatgtgaccctgatttcagcccgccctgtctctggagccccagcaccctgggttgaacagtgtatatgtcctgttgggtacaaggggcaattctgccaggattgtgcttctggctacaagagagattcagcgagactggggccttttggcacctgtattccttgtaactgtcaagggggaggggcctgtgatccagacacaggagattgttattcaggggatgagaatcctgacattgagtgtgctgactgcccaattggtttctacaacgatccgcacgacccccgcagctgcaagccatgtccctgtcataacgggttcagctgctcagtgatgccggagacggaggaggtggtgtgcaataactgccctcccggggtcaccggtgcccgctgtgagctctgtgctgatggctactttggggacccctttggtgaacatggcccagtgaggccttgtcagccctgtcaatgcaacaacaatgtggaccccagtgcctctgggaattgtgaccggctgacaggcaggtgtttgaagtgtatccacaacacagccggcatctactgcgaccagtgcaaagcaggctacttcggggacccattggctcccaacccagcagacaagtgtcgagcttgcaactgtaaccccatgggctcagagcctgtaggatgtcgaagtgatggcacctgtgtttgcaagccaggatttggtggccccaactgtgagcatggagcattcagctgtccagcttgctataatcaagtgaagattcagatggatcagtttatgcagcagcttcagagaatggaggccctgatttcaaaggctcagggtggtgatggagtagtacctgatacagagctggaaggcaggatgcagcaggctgagcaggcccttcaggacattctgagagatgcccagatttcagaaggtgctagcagatcccttggtctccagttggccaaggtgaggagccaagagaacagctaccagagccgcctggatgacctcaagatgactgtggaaagagttcgggctctgggaagtcagtaccagaaccgagttcgggatactcacaggctcatcactcagatgcagctgagcctggcagaaagtgaagcttccttgggaaacactaacattcctgcctcagaccactacgtggggccaaatggctttaaaagtctggctcaggaggccacaagattagcagaaagccacgttgagtcagccagtaacatggagcaactgacaagggaaactgaggactattccaaacaagccctctcactggtgcgcaaggccctgcatgaaggagtcggaagcggaagcggtagcccggacggtgctgtggtgcaagggcttgtggaaaaattggagaaaaccaagtccctggcccagcagttgacaagggaggccactcaagcggaaattgaagcagataggtcttatcagcacagtctccgcctcctggattcagtgtctcggcttcagggagtcagtgatcagtcctttcaggtggaagaagcaaagaggatcaaacaaaaagcggattcactctcaagcctggtaaccaggcatatggatgagttcaagcgtacacagaagaatctgggaaactggaaagaagaagcacagcagctcttacagaatggaaaaagtgggagagagaaatcagatcagctgctttcccgtgccaatcttgctaaaagcagagcacaagaagcactgagtatgggcaatgccactttttatgaagttgagagcatccttaaaaacctcagagagtttgacctgcaggtggacaacagaaaagcagaagctgaagaagccatgaagagactctcctacatcagccagaaggtttcagatgccagtgacaagacccagcaagcagaaagagccctggggagcgctgctgctgatgcacagagggcaaagaatggggccggggaggccctggaaatctccagtgagattgaacaggagattgggagtctgaacttggaagccaatgtgacagcagatggagccttggccatggaaaagggactggcctctctgaagagtgagatgagggaagtggaaggagagctggaaaggaaggagctggagtttgacacgaatatggatgcagtacagatggtgattacagaagcccagaaggttgataccagagccaagaacgctggggttacaatccaagacacactcaacacattagacggcctcctgcatctgatggaccagcctctcagtgtagatgaagaggggctggtcttactggagcagaagctttcccgagccaagacccagatcaacagccaactgcggcccatgatgtcagagctggaagagagggcacgtcagcagaggggccacctccatttgctggagacaagcatagatgggattctggctgatgtgaagaacttggagaacattagggacaacctgcccccaggctgctacaatacccaggctcttgagcaacagtgaagctgccataaatatttctcaactgaggttcttgggatacagatctcagggctcgggagccatgtcatgtgagtgggtgggatggggacatttgaacatgtttaatgggtatgctcaggtcaactgacctgaccccattcctgatcccatggccaggtggctgtaaggcaggcccattcagagctatggtgcttgctggtgcctgccaccttcaagttctggacctgggcatgacatcctttcttttaatgatgccatggcaacttagagattgcatttttattaaagcatttcctaccagcaaagcaaatgttgggaaagtatttactttttcggtttcaaagtgatagaaaagtgtggcttgggcattgaaagaggtaaaattctctagatttattagtcctaattcaatcctacttttcgaacaccaaaaatgatgcgcatcaatgtattttatcttattttctcaatctcctctctctttcctccacccataataagagaatgttcctactcacacttcagctgggtcacatccatccctccattcatccttccatccatctttccatccattacctccatccatccttccaacatatatttattgagtacctactgtgtgccaggggctggtgggacagtggtgacatagtctctgccctcatagagttgattgtctagtgaggaagacaagcatttttaaaaaataaatttaaacttacaaactttgtttgtcacaagtggtgtttattgcaataaccgcttggtttgcaacctctttgctcaacagaacatatgttgcaagaccctcccatgggggcacttgagttttggcaaggctgacagagctctgggttgtgcacatttctttgcattccagctgtcactctgtgcctttctacaactgattgcaacagactgttgagttatgataacaccagtgggaattgctggaggaaccagaggcacttccaccttggctgggaagactatggtgctgccttgcttctgtatttccttggattttcctgaaagtgtttttaaataaagaacaattgttagatgccnnnnn

SEQ ID NO: 447510 - DNA, 1322 bp, Homo sapiens
  misc_feature (3)..(3): n is a, c, g, or t
  misc_feature (24)..(24): n is a, c, g, or t
  misc_feature (1318)..(1322): n is a, c, g, or t
ggncgactctagagtatcccctgnggagaagtgggtgtgagaatgatcaaggatctggaccccaaagaatagactggatggaaagacaaactgcacaggcagatgtttgcctcataatagtcgtaagtggagtcctggaatttggacaagtgctgttgggatatagtcaacttattctttgagtaatgtgactaaaggaaaaaactttgactttgcccaggcatgaaattcttcctaatgtcagaacagagtgcaacccagtcacactgtggccagtaaaatactattgcctcatattgtcctctgcaagcttcttgctgatcagagttcctcctacttacaacccagggtgtgaacatgttctccattttcaagctggaagaagtgagcagtgttggagtgaggacctgtaaggcaggcccattcagagctatggtgcttgctggtgcctgccaccttcaagttctggacctgggcatgacatcctttcttttaatgatgccatggcaacttagagattgcatttttattaaagcatttcctaccagcaaagcaaatgttgggaaagtatttactttttcggtttcaaagtgatagaaaagtgtggcttgggcattgaaagaggtaaaattctctagatttattagtcctaattcaatcctacttttcgaacaccaaaaatgatgcgcatcaatgtattttatcttattttctcaatctcctctctctttcctccacccataataagagaatgttcctactcacacttcagctgggtcacatccatccctccattcatccttccatccatctttccatccattacctccatccatccttccaacatatatttattgagtacctactgtgtgccaggggctggtgggacagtggtgacatagtctctgccctcatagagttgattgtctagtgaggaagacaagcatttttaaaaaataaatttaaacttacaaactttgtttgtcacaagtggtgtttattgcaataaccgcttggtttgcaacctctttgctcaacagaacatatgttgcaagaccctcccatgggggcacttgagttttggcaaggctgacagagctctgggttgtgcacatttctttgcattccagctgtcactctgtgcctttctacaactgattgcaacagactgttgagttatgataacaccagtgggaattgctggaggaaccagaggcacttccaccttggctgggaagactatggtgctgccttgcttctgtatttccttggattttcctgaaagtgtttttaaataaagaacaattgttagatgccnnnnn

SEQ ID NO: 447511 - DNA, 1288 bp, Homo sapiens
  misc_feature (1284)..(1288): n is a, c, g, or t
tccaaattccaggactccacttacgactattatgaggcaaacatctgcctgtgcacgttgtctttccatccagtctattctttggggtccagatccttgatcattctcacacccagtgctgttgggatatagtcaacttattctttgagtaatgtgactaaaggaaaaaactttgactttgcccaggcatgaaattcttcctaatgtcagaacagagtgcaacccagtcacactgtggccagtaaaatactattgcctcatattgtcctctgcaagcttcttgctgatcagagttcctcctacttacaacccagggtgtgaacatgttctccattttcaagctggaagaagtgagcagtgttggagtgaggacctgtaaggcaggcccattcagagctatggtgcttgctggtgcctgccaccttcaagttctggacctgggcatgacatcctttcttttaatgatgccatggcaacttagagattgcatttttattaaagcatttcctaccagcaaagcaaatgttgggaaagtatttactttttcggtttcaaagtgatagaaaagtgtggcttgggcattgaaagaggtaaaattctctagatttattagtcctaattcaatcctacttttcgaacaccaaaaatgatgcgcatcaatgtattttatcttattttctcaatctcctctctctttcctccacccataataagagaatgttcctactcacacttcagctgggtcacatccatccctccattcatccttccatccatctttccatccattacctccatccatccttccaacatatatttattgagtacctactgtgtgccaggggctggtgggacagtggtgacatagtctctgccctcatagagttgattgtctagtgaggaagacaagcatttttaaaaaataaatttaaacttacaaactttgtttgtcacaagtggtgtttattgcaataaccgcttggtttgcaacctctttgctcaacagaacatatgttgcaagaccctcccatgggggcacttgagttttggcaaggctgacagagctctgggttgtgcacatttctttgcattccagctgtcactctgtgcctttctacaactgattgcaacagactgttgagttatgataacaccagtgggaattgctggaggaaccagaggcacttccaccttggctgggaagactatggtgctgccttgcttctgtatttccttggattttcctgaaagtgtttttaaataaagaacaattgttagatgccnnnnn

SEQ ID NO: 447512 - DNA, 3691 bp, Homo sapiens
gaccacctgatcgaaggaaaaggaaggcacagcggagcgcagagtgagaaccaccaaccgaggcgccgggcagcgacccctgcagcggagacagagactgagcggcccggcaccgccatgcctgcgctctggctgggctgctgcctctgcttctcgctcctcctgcccgcagcccgggccacctccaggagggaagtctgtgattgcaatgggaagtccaggcagtgtatctttgatcgggaacttcacagacaaactggtaatggattccgctgcctcaactgcaatgacaacactgatggcattcactgcgagaagtgcaagaatggcttttaccggcacagagaaagggaccgctgtttgccctgcaattgtaactccaaaggttctcttagtgctcgatgtgacaactctggacggtgcagctgtaaaccaggtgtgacaggagccagatgcgaccgatgtctgccaggcttccacatgctcacggatgcggggtgcacccaagaccagagactgctagactccaagtgtgactgtgacccagctggcatcgcagggccctgtgacgcgggccgctgtgtctgcaagccagctgttactggagaacgctgtgataggtgtcgatcaggttactataatctggatggggggaaccctgagggctgtacccagtgtttctgctatgggcattcagccagctgccgcagctctgcagaatacagtgtccataagatcacctctacctttcatcaagatgttgatggctggaaggctgtccaacgaaatgggtctcctgcaaagctccaatggtcacagcgccatcaagatgtgtttagctcagcccaacgactagaccctgtctattttgtggctcctgccaaatttcttgggaatcaacaggtgagctatgggcaaagcctgtcctttgactaccgtgtggacagaggaggcagacacccatctgcccatgatgtgattctggaaggtgctggtctacggatcacagctcccttgatgccacttggcaagacactgccttgtgggctcaccaagacttacacattcaggttaaatgagcatccaagcaataattggagcccccagctgagttactttgagtatcgaaggttactgcggaatctcacagccctccgcatccgagctacatatggagaatacagtactgggtacattgacaatgtgaccctgatttcagcccgccctgtctctggagccccagcaccctgggttgaacagtgtatatgtcctgttgggtacaaggggcaattctgccaggattgtgcttctggctacaagagagattcagcgagactggggccttttggcacctgtattccttgtaactgtcaagggggaggggcctgtgatccagacacaggagattgttattcaggggatgagaatcctgacattgagtgtgctgactgcccaattggtttctacaacgatccgcacgacccccgcagctgcaagccatgtccctgtcataacgggttcagctgctcagtgatgccggagacggaggaggtggtgtgcaataactgccctcccggggtcaccggtgcccgctgtgagctctgtgctgatggctactttggggacccctttggtgaacatggcccagtgaggccttgtcagccctgtcaatgcaacaacaatgtggaccccagtgcctctgggaattgtgaccggctgacaggcaggtgtttgaagtgtatccacaacacagccggcatctactgcgaccagtgcaaagcaggctacttcggggacccattggctcccaacccagcagacaagtgtcgagcttgcaactgtaaccccatgggctcagagcctgtaggatgtcgaagtgatggcacctgtgtttgcaagccaggatttggtggccccaactgtgagcatggagcattcagctgtccagcttgctataatcaagtgaagattcagatggatcagtttatgcagcagcttcagagaatggaggccctgatttcaaaggctcagggtggtgatggagtagtacctgatacagagctggaaggcaggatgcagcaggctgagcaggcccttcaggacattctgagagatgcccagatttcagaaggtgctagcagatcccttggtctccagttggccaaggtgaggagccaagagaacagctaccagagccgcctggatgacctcaagatgactgtggaaagagttcgggctctgggaagtcagtaccagaaccgagttcgggatactcacaggctcatcactcagatgcagctgagcctggcagaaagtgaagcttccttgggaaacactaacattcctgcctcagaccactacgtggggccaaatggctttaaaagtctggctcaggaggccacaagattagcagaaagccacgttgagtcagccagtaacatggagcaactgacaagggaaactgaggactattccaaacaagccctctcactggtgcgcaaggccctgcatgaaggagtcggaagcggaagcggtagcccggacggtgctgtggtgcaagggcttgtggaaaaattggagaaaaccaagtccctggcccagcagttgacaagggaggccactcaagcggaaattgaagcagataggtcttatcagcacagtctccgcctcctggattcagtgtctcggcttcagggagtcagtgatcagtcctttcaggtggaagaagcaaagaggatcaaacaaaaagcggattcactctcaagcctggtaaccaggcatatggatgagttcaagcgtacacagaagaatctgggaaactggaaagaagaagcacagcagctcttacagaatggaaaaagtgggagagagaaatcagatcagctgctttcccgtgccaatcttgctaaaagcagagcacaagaagcactgagtatgggcaatgccactttttatgaagttgagagcatccttaaaaacctcagagagtttgacctgcaggtggacaacagaaaagcagaagctgaagaagccatgaagagactctcctacatcagccagaaggtttcagatgccagtgacaagacccagcaagcagaaagagccctggggagcgctgctgctgatgcacagagggcaaagaatggggccggggaggccctggaaatctccagtgagattgaacaggagattgggagtctgaacttggaagccaatgtgacagcagatggagccttggccatggaaaagggactggcctctctgaagagtgagatgagggaagtggaaggagagctggaaaggaaggagctggagtttgacacgaatatggatgcagtacagatggtgattacagaagcccagaaggttgataccagagccaagaacgctggggttacaatccaagacacactcaacacattagacggcctcctgcatctgatggaccctgcacttgatggaccagctggcaccacccagatcaataaactggcttatttgaatttgcggccccccacccaggaactgactcagtgcaagaagacagcttcgactccctgtgatttcatctctgaccaatccgcactcctggctcactggcttccccaacccatgaagttttccttaaaaactctgctcccgaaatgctcagggagactgatttgataacaataaaactctggtctcccgc

SEQ ID NO: 447513 - DNA, 3420 bp, Homo sapiens
gaccacctgatcgaaggaaaaggaaggcacagcggagcgcagagtgagaaccaccaaccgaggcgccgggcagcgacccctgcagcggagacagagactgagcggcccggcaccgccatgcctgcgctctggctgggctgctgcctctgcttctcgctcctcctgcccgcagcccgggccacctccaggagggaagtctgtgattgcaatgggaagtccaggcagtgtatctttgatcgggaacttcacagacaaactggtaatggattccgctgcctcaactgcaatgacaacactgatggcattcactgcgagaagtgcaagaatggcttttaccggcacagagaaagggaccgctgtttgccctgcaattgtaactccaaaggttctcttagtgctcgatgtgacaactctggacggtgcagctgtaaaccaggtgtgacaggagccagatgcgaccgatgtctgccaggcttccacatgctcacggatgcggggtgcacccaagaccagagactgctagactccaagtgtgactgtgacccagctggcatcgcagggccctgtgacgcgggccgctgtgtctgcaagccagctgttactggagaacgctgtgataggtgtcgatcaggttactataatctggatggggggaaccctgagggctgtacccagtgtttctgctatgggcattcagccagctgccgcagctctgcagaatacagtgtccataagatcacctctacctttcatcaagatgttgatggctggaaggctgtccaacgaaatgggtctcctgcaaagctccaatggtcacagcgccatcaagatgtgtttagctcagcccaacgactagaccctgtctattttgtggctcctgccaaatttcttgggaatcaacaggtgagctatgggcaaagcctgtcctttgactaccgtgtggacagaggaggcagacacccatctgcccatgatgtgattctggaaggtgctggtctacggatcacagctcccttgatgccacttggcaagacactgccttgtgggctcaccaagacttacacattcaggttaaatgagcatccaagcaataattggagcccccagctgagttactttgagtatcgaaggttactgcggaatctcacagccctccgcatccgagctacatatggagaatacagtactgggtacattgacaatgtgaccctgatttcagcccgccctgtctctggagccccagcaccctgggttgaacagtgtatatgtcctgttgggtacaaggggcaattctgccaggattgtgcttctggctacaagagagattcagcgagactggggccttttggcacctgtattccttgtaactgtcaagggggaggggcctgtgatccagacacaggagattgttattcaggggatgagaatcctgacattgagtgtgctgactgcccaattggtttctacaacgatccgcacgacccccgcagctgcaagccatgtccctgtcataacgggttcagctgctcagtgatgccggagacggaggaggtggtgtgcaataactgccctcccggggtcaccggtgcccgctgtgagctctgtgctgatggctactttggggacccctttggtgaacatggcccagtgaggccttgtcagccctgtcaatgcaacaacaatgtggaccccagtgcctctgggaattgtgaccggctgacaggcaggtgtttgaagtgtatccacaacacagccggcatctactgcgaccagtgcaaagcaggctacttcggggacccattggctcccaacccagcagacaagtgtcgagcttgcaactgtaaccccatgggctcagagcctgtaggatgtcgaagtgatggcacctgtgtttgcaagccaggatttggtggccccaactgtgagcatggagcattcagctgtccagcttgctataatcaagtgaagattcagatggatcagtttatgcagcagcttcagagaatggaggccctgatttcaaaggctcagggtggtgatggagtagtacctgatacagagctggaaggcaggatgcagcaggctgagcaggcccttcaggacattctgagagatgcccagatttcagaaggtgctagcagatcccttggtctccagttggccaaggtgaggagccaagagaacagctaccagagccgcctggatgacctcaagatgactgtggaaagagttcgggctctgggaagtcagtaccagaaccgagttcgggatactcacaggctcatcactcagatgcagctgagcctggcagaaagtgaagcttccttgggaaacactaacattcctgcctcagaccactacgtggggccaaatggctttaaaagtctggctcaggaggccacaagattagcagaaagccacgttgagtcagccagtaacatggagcaactgacaagggaaactgaggactattccaaacaagccctctcactggtgcgcaaggccctgcatgaaggagtcggaagcggaagcggtagcccggacggtgctgtggtgcaagggcttgtggaaaaattggagaaaaccaagtccctggcccagcagttgacaagggaggccactcaagcggaaattgaagcagataggtcttatcagcacagtctccgcctcctggattcagtgtctcggcttcagggagtcagtgatcagtcctttcaggtggaagaagcaaagaggatcaaacaaaaagcggattcactctcaagcctggtaaccaggcatatggatgagttcaagcgtacacagaagaatctgggaaactggaaagaagaagcacagcagctcttacagaatggaaaaagtgggagagagaaatcagatcagctgctttcccgtgccaatcttgctaaaagcagagcacaagaagcactgagtatgggcaatgccactttttatgaagttgagagcatccttaaaaacctcagagagtttgacctgcaggtggacaacagaaaagcagaagctgaagaagccatgaagagactctcctacatcagccagaaggtttcagatgccagtgacaagacccagcaagcagaaagagccctggggagcgctgctgctgatgcacagagggcaaagaatggggccggggaggccctggaaatctccagtgagattgaacaggagattgggagtctgaacttggaagccaatgtgacagcagatggagccttggccatggaaaagggactggcctctctgaagagtgagatgagggaagtggaaggagagctggaaaggaaggagctggagtttgacacgaatatggatgcagtacagatggtgattacagaagcccagcgttcttggctctggtatcaaccttctggcttctgtaatcacctcggaccggccgac

SEQ ID NO: 447514 - DNA, 2956 bp, Homo sapiens
gaccacctgatcgaaggaaaaggaaggcacagcggagcgcagagtgagaaccaccaaccgaggcgccgggcagcgacccctgcagcggagacagagactgagcggcccggcaccgccatgcctgcgctctggctgggctgctgcctctgcttctcgctcctcctgcccgcagcccgggccacctccaggagggaagtctgtgattgcaatgggaagtccaggcagtgtatctttgatcgggaacttcacagacaaactggtaatggattccgctgcctcaactgcaatgacaacactgatggcattcactgcgagaagtgcaagaatggcttttaccggcacagagaaagggaccgctgtttgccctgcaattgtaactccaaaggttctcttagtgctcgatgtgacaactctggacggtgcagctgtaaaccaggtgtgacaggagccagatgcgaccgatgtctgccaggcttccacatgctcacggatgcggggtgcacccaagaccagagactgctagactccaagtgtgactgtgacccagctggcatcgcagggccctgtgacgcgggccgctgtgtctgcaagccagctgttactggagaacgctgtgataggtgtcgatcaggttactataatctggatggggggaaccctgagggctgtacccagtgtttctgctatgggcattcagccagctgccgcagctctgcagaatacagtgtccataagatcacctctacctttcatcaagatgttgatggctggaaggctgtccaacgaaatgggtctcctgcaaagctccaatggtcacagcgccatcaagatgtgtttagctcagcccaacgactagaccctgtctattttgtggctcctgccaaatttcttgggaatcaacaggtgagctatgggcaaagcctgtcctttgactaccgtgtggacagaggaggcagacacccatctgcccatgatgtgattctggaaggtgctggtctacggatcacagctcccttgatgccacttggcaagacactgccttgtgggctcaccaagacttacacattcaggttaaatgagcatccaagcaataattggagcccccagctgagttactttgagtatcgaaggttactgcggaatctcacagccctccgcatccgagctacatatggagaatacagtactgggtacattgacaatgtgaccctgatttcagcccgccctgtctctggagccccagcaccctgggttgaacagtgtatatgtcctgttgggtacaaggggcaattctgccaggattgtgcttctggctacaagagagattcagcgagactggggccttttggcacctgtattccttgtaactgtcaagggggaggggcctgtgatccagacacaggagattgttattcaggggatgagaatcctgacattgagtgtgctgactgcccaattggtttctacaacgatccgcacgacccccgcagctgcaagccatgtccctgtcataacgggttcagctgctcagtgatgccggagacggaggaggtggtgtgcaataactgccctcccggggtcaccggtgcccgctgtgagctctgtgctgatggctactttggggacccctttggtgaacatggcccagtgaggccttgtcagccctgtcaatgcaacaacaatgtggaccccagtgcctctgggaattgtgaccggctgacaggcaggtgtttgaagtgtatccacaacacagccggcatctactgcgaccagtgcaaagcaggctacttcggggacccattggctcccaacccagcagacaagtgtcgagcttgcaactgtaaccccatgggctcagagcctgtaggatgtcgaagtgatggcacctgtgtttgcaagccaggatttggtggccccaactgtgagcatggagcattcagctgtccagcttgctataatcaagtgaagattcagatggatcagtttatgcagcagcttcagagaatggaggccctgatttcaaaggctcagggtggtgatggagtagtacctgatacagagctggaaggcaggatgcagcaggctgagcaggcccttcaggacattctgagagatgcccagatttcagaaggtgctagcagatcccttggtctccagttggccaaggtgaggagccaagagaacagctaccagagccgcctggatgacctcaagatgactgtggaaagagttcgggctctgggaagtcagtaccagaaccgagttcgggatactcacaggctcatcactcagatgcagctgagcctggcagaaagtgaagcttccttgggaaacactaacattcctgcctcagaccactacgtggggccaaatggctttaaaagtctggctcaggaggccacaagattagcagaaagccacgttgagtcagccagtaacatggagcaactgacaagggaaactgaggactattccaaacaagccctctcactggtgcgcaaggccctgcatgaaggagtcggaagcggaagcggtagcccggacggtgctgtggtgcaagggcttgtggaaaaattggagaaaaccaagtccctggcccagcagttgacaagggaggccactcaagcggaaattgaagcagataggtcttatcagcacagtctccgcctcctggattcagtgtctcggcttcagggagtcagtgatcagtcctttcaggtggaagaagcaaagaggatcaaacaaaaagcggattcactctcaagcctggtaaccaggcatatggatgagttcaagcgtacacagaagaatctgggaaactggaaagaagaagcacagcagctcttacagaatggaaaaagtgggagagagggcccggcgcgctgcagcacgtcccggagcctggcctccgacagctccacgtggccgcgcaggtccttcaggaacatgcggtcca

SEQ ID NO: 447515 - DNA, 467 bp, Homo sapiens
atgttgatggctggaaggctgtccaacgaaatgggtctcctgcaaagctccaatggtcacagcgccatcaagatgtgtttagctcagcccaacgactagaccctgtctattttgtggctcctggtatgtgaggaataatgtctcctatagaggccagcttataggactaggaagtcaagatagagaaattgagttagaaattgtggaaaccatataactttgggttcagggtagcagcatctccgggtagtgcaaccccagaagagagatgggggctaagcctgatttgagagtcactaaggaatggcccaacagagcagaatgtggtgtcccagaggtcagaccctggttgagctacctcctttaatcaaatgggaagtttctacgtttaccaccaaggcaagaaaccaaggactgtggccaaacctatgggtctattgagaagtaggtggaaagcaaaaacaaag

SEQ ID NO: 447516 - DNA, 5208 bp, Homo sapiens
  misc_feature (5204)..(5208): n is a, c, g, or t
gaccacctgatcgaaggaaaaggaaggcacagcggagcgcagagtgagaaccaccaaccgaggcgccgggcagcgacccctgcagcggagacagagactgagcggcccggcaccgccatgcctgcgctctggctgggctgctgcctctgcttctcgctcctcctgcccgcagcccgggccacctccaggagggaagtctgtgattgcaatgggaagtccaggcagtgtatctttgatcgggaacttcacagacaaactggtaatggattccgctgcctcaactgcaatgacaacactgatggcattcactgcgagaagtgcaagaatggcttttaccggcacagagaaagggaccgctgtttgccctgcaattgtaactccaaaggttctcttagtgctcgatgtgacaactctggacggtgcagctgtaaaccaggtgtgacaggagccagatgcgaccgatgtctgccaggcttccacatgctcacggatgcggggtgcacccaagaccagagactgctagactccaagtgtgactgtgacccagctggcatcgcagggccctgtgacgcgggccgctgtgtctgcaagccagctgttactggagaacgctgtgataggtgtcgatcaggttactataatctggatggggggaaccctgagggctgtacccagtgtttctgctatgggcattcagccagctgccgcagctctgcagaatacagtgtccataagatcacctctacctttcatcaagatgttgatggctggaaggctgtccaacgaaatgggtctcctgcaaagctccaatggtcacagcgccatcaagatgtgtttagctcagcccaacgactagaccctgtctattttgtggctcctgccaaatttcttgggaatcaacaggtgagctatgggcaaagcctgtcctttgactaccgtgtggacagaggaggcagacacccatctgcccatgatgtgattctggaaggtgctggtctacggatcacagctcccttgatgccacttggcaagacactgccttgtgggctcaccaagacttacacattcaggttaaatgagcatccaagcaataattggagcccccagctgagttactttgagtatcgaaggttactgcggaatctcacagccctccgcatccgagctacatatggagaatacagtactgggtacattgacaatgtgaccctgatttcagcccgccctgtctctggagccccagcaccctgggttgaacagtgtatatgtcctgttgggtacaaggggcaattctgccaggattgtgcttctggctacaagagagattcagcgagactggggccttttggcacctgtattccttgtaactgtcaagggggaggggcctgtgatccagacacaggagattgttattcaggggatgagaatcctgacattgagtgtgctgactgcccaattggtttctacaacgatccgcacgacccccgcagctgcaagccatgtccctgtcataacgggttcagctgctcagtgatgccggagacggaggaggtggtgtgcaataactgccctcccggggtcaccggtgcccgctgtgagctctgtgctgatggctactttggggacccctttggtgaacatggcccagtgaggccttgtcagccctgtcaatgcaacaacaatgtggaccccagtgcctctgggaattgtgaccggctgacaggcaggtgtttgaagtgtatccacaacacagccggcatctactgcgaccagtgcaaagcaggctacttcggggacccattggctcccaacccagcagacaagtgtcgagcttgcaactgtaaccccatgggctcagagcctgtaggatgtcgaagtgatggcacctgtgtttgcaagccaggatttggtggccccaactgtgagcatggagcattcagctgtccagcttgctataatcaagtgaagattcagatggatcagtttatgcagcagcttcagagaatggaggccctgatttcaaaggctcagggtggtgatggagtagtacctgatacagagctggaaggcaggatgcagcaggctgagcaggcccttcaggacattctgagagatgcccagatttcagaaggtgctagcagatcccttggtctccagttggccaaggtgaggagccaagagaacagctaccagagccgcctggatgacctcaagatgactgtggaaagagttcgggctctgggaagtcagtaccagaaccgagttcgggatactcacaggctcatcactcagatgcagctgagcctggcagaaagtgaagcttccttgggaaacactaacattcctgcctcagaccactacgtggggccaaatggctttaaaagtctggctcaggaggccacaagattagcagaaagccacgttgagtcagccagtaacatggagcaactgacaagggaaactgaggactattccaaacaagccctctcactggtgcgcaaggccctgcatgaaggagtcggaagcggaagcggtagcccggacggtgctgtggtgcaagggcttgtggaaaaattggagaaaaccaagtccctggcccagcagttgacaagggaggccactcaagcggaaattgaagcagataggtcttatcagcacagtctccgcctcctggattcagtgtctcggcttcagggagtcagtgatcagtcctttcaggtggaagaagcaaagaggatcaaacaaaaagcggattcactctcaagcctggtaaccaggcatatggatgagttcaagcgtacacagaagaatctgggaaactggaaagaagaagcacagcagctcttacagaatggaaaaagtgggagagagaaatcagatcagctgctttcccgtgccaatcttgctaaaagcagagcacaagaagcactgagtatgggcaatgccactttttatgaagttgagagcatccttaaaaacctcagagagtttgacctgcaggtggacaacagaaaagcagaagctgaagaagccatgaagagactctcctacatcagccagaaggtttcagatgccagtgacaagacccagcaagcagaaagagccctggggagcgctgctgctgatgcacagagggcaaagaatggggccggggaggccctggaaatctccagtgagattgaacaggagattgggagtctgaacttggaagccaatgtgacagcagatggagccttggccatggaaaagggactggcctctctgaagagtgagatgagggaagtggaaggagagctggaaaggaaggagctggagtttgacacgaatatggatgcagtacagatggtgattacagaagcccagaaggttgataccagagccaagaacgctggggttacaatccaagacacactcaacacattagacggcctcctgcatctgatggaccagcctctcagtgtagatgaagaggggctggtcttactggagcagaagctttcccgagccaagacccagatcaacagccaactgcggcccatgatgtcagagctggaagagagggcacgtcagcagaggggccacctccatttgctggagacaagcatagatgggattctggctgatgtgaagaacttggagaacattagggacaacctgcccccaggctgctacaatacccaggctcttgagcaacagtgaagctgccataaatatttctcaactgaggttcttgggatacagatctcagggctcgggagccatgtcatgtgagtgggtgggatggggacatttgaacatgtttaatgggtatgctcaggtcaactgacctgaccccattcctgatcccatggccaggtggttgtcttattgcaccatactccttgcttcctgatgctgggcaatgaggcagatagcactgggtgtgagaatgatcaaggatctggaccccaaagaatagactggatggaaagacaaactgcacaggcagatgtttgcctcataatagtcgtaagtggagtcctggaatttggacaagtgctgttgggatatagtcaacttattctttgagtaatgtgactaaaggaaaaaactttgactttgcccaggcatgaaattcttcctaatgtcagaacagagtgcaacccagtcacactgtggccagtaaaatactattgcctcatattgtcctctgcaagcttcttgctgatcagagttcctcctacttacaacccagggtgtgaacatgttctccattttcaagctggaagaagtgagcagtgttggagtgaggacctgtaaggcaggcccattcagagctatggtgcttgctggtgcctgccaccttcaagttctggacctgggcatgacatcctttcttttaatgatgccatggcaacttagagattgcatttttattaaagcatttcctaccagcaaagcaaatgttgggaaagtatttactttttcggtttcaaagtgatagaaaagtgtggcttgggcattgaaagaggtaaaattctctagatttattagtcctaattcaatcctacttttcgaacaccaaaaatgatgcgcatcaatgtattttatcttattttctcaatctcctctctctttcctccacccataataagagaatgttcctactcacacttcagctgggtcacatccatccctccattcatccttccatccatctttccatccattacctccatccatccttccaacatatatttattgagtacctactgtgtgccaggggctggtgggacagtggtgacatagtctctgccctcatagagttgattgtctagtgaggaagacaagcatttttaaaaaataaatttaaacttacaaactttgtttgtcacaagtggtgtttattgcaataaccgcttggtttgcaacctctttgctcaacagaacatatgttgcaagaccctcccatgggggcacttgagttttggcaaggctgacagagctctgggttgtgcacatttctttgcattccagctgtcactctgtgcctttctacaactgattgcaacagactgttgagttatgataacaccagtgggaattgctggaggaaccagaggcacttccaccttggctgggaagactatggtgctgccttgcttctgtatttccttggattttcctgaaagtgtttttaaataaagaacaattgttagatgccnnnnn

SEQ ID NO: 447517 - DNA, 4859 bp, Homo sapiens
gaccacctgatcgaaggaaaaggaaggcacagcggagcgcagagtgagaaccaccaaccgaggcgccgggcagcgacccctgcagcggagacagagactgagcggcccggcaccgccatgcctgcgctctggctgggctgctgcctctgcttctcgctcctcctgcccgcagcccgggccacctccaggagggaagtctgtgattgcaatgggaagtccaggcagtgtatctttgatcgggaacttcacagacaaactggtaatggattccgctgcctcaactgcaatgacaacactgatggcattcactgcgagaagtgcaagaatggcttttaccggcacagagaaagggaccgctgtttgccctgcaattgtaactccaaaggttctcttagtgctcgatgtgacaactctggacggtgcagctgtaaaccaggtgtgacaggagccagatgcgaccgatgtctgccaggcttccacatgctcacggatgcggggtgcacccaagaccagagactgctagactccaagtgtgactgtgacccagctggcatcgcagggccctgtgacgcgggccgctgtgtctgcaagccagctgttactggagaacgctgtgataggtgtcgatcaggttactataatctggatggggggaaccctgagggctgtacccagtgtttctgctatgggcattcagccagctgccgcagctctgcagaatacagtgtccataagatcacctctacctttcatcaagatgttgatggctggaaggctgtccaacgaaatgggtctcctgcaaagctccaatggtcacagcgccatcaagatgtgtttagctcagcccaacgactagaccctgtctattttgtggctcctgccaaatttcttgggaatcaacaggtgagctatgggcaaagcctgtcctttgactaccgtgtggacagaggaggcagacacccatctgcccatgatgtgattctggaaggtgctggtctacggatcacagctcccttgatgccacttggcaagacactgccttgtgggctcaccaagacttacacattcaggttaaatgagcatccaagcaataattggagcccccagctgagttactttgagtatcgaaggttactgcggaatctcacagccctccgcatccgagctacatatggagaatacagtactgggtacattgacaatgtgaccctgatttcagcccgccctgtctctggagccccagcaccctgggttgaacagtgtatatgtcctgttgggtacaaggggcaattctgccaggattgtgcttctggctacaagagagattcagcgagactggggccttttggcacctgtattccttgtaactgtcaagggggaggggcctgtgatccagacacaggagattgttattcaggggatgagaatcctgacattgagtgtgctgactgcccaattggtttctacaacgatccgcacgacccccgcagctgcaagccatgtccctgtcataacgggttcagctgctcagtgatgccggagacggaggaggtggtgtgcaataactgccctcccggggtcaccggtgcccgctgtgagctctgtgctgatggctactttggggacccctttggtgaacatggcccagtgaggccttgtcagccctgtcaatgcaacaacaatgtggaccccagtgcctctgggaattgtgaccggctgacaggcaggtgtttgaagtgtatccacaacacagccggcatctactgcgaccagtgcaaagcaggctacttcggggacccattggctcccaacccagcagacaagtgtcgagcttgcaactgtaaccccatgggctcagagcctgtaggatgtcgaagtgatggcacctgtgtttgcaagccaggatttggtggccccaactgtgagcatggagcattcagctgtccagcttgctataatcaagtgaagattcagatggatcagtttatgcagcagcttcagagaatggaggccctgatttcaaaggctcagggtggtgatggagtagtacctgatacagagctggaaggcaggatgcagcaggctgagcaggcccttcaggacattctgagagatgcccagatttcagaaggtgctagcagatcccttggtctccagttggccaaggtgaggagccaagagaacagctaccagagccgcctggatgacctcaagatgactgtggaaagagttcgggctctgggaagtcagtaccagaaccgagttcgggatactcacaggctcatcactcagatgcagctgagcctggcagaaagtgaagcttccttgggaaacactaacattcctgcctcagaccactacgtggggccaaatggctttaaaagtctggctcaggaggccacaagattagcagaaagccacgttgagtcagccagtaacatggagcaactgacaagggaaactgaggactattccaaacaagccctctcactggtgcgcaaggccctgcatgaaggagtcggaagcggaagcggtagcccggacggtgctgtggtgcaagggcttgtggaaaaattggagaaaaccaagtccctggcccagcagttgacaagggaggccactcaagcggaaattgaagcagataggtcttatcagcacagtctccgcctcctggattcagtgtctcggcttcagggagtcagtgatcagtcctttcaggtggaagaagcaaagaggatcaaacaaaaagcggattcactctcaagcctggtaaccaggcatatggatgagttcaagcgtacacagaagaatctgggaaactggaaagaagaagcacagcagctcttacagaatggaaaaagtgggagagagaaatcagatcagctgctttcccgtgccaatcttgctaaaagcagagcacaagaagcactgagtatgggcaatgccactttttatgaagttgagagcatccttaaaaacctcagagagtttgacctgcaggtggacaacagaaaagcagaagctgaagaagccatgaagagactctcctacatcagccagaaggtttcagatgccagtgacaagacccagcaagcagaaagagccctggggagcgctgctgctgatgcacagagggcaaagaatggggccggggaggccctggaaatctccagtgagattgaacaggagattgggagtctgaacttggaagccaatgtgacagcagatggagccttggccatggaaaagggactggcctctctgaagagtgagatgagggaagtggaaggagagctggaaaggaaggagctggagtttgacacgaatatggatgcagtacagatggtgattacagaagcccagaaggttgataccagagccaagaacgctggggttacaatccaagacacactcaacacattagacggcctcctgcatctgatggaccagcctctcagtgtagatgaagaggggctggtcttactggagcagaagctttcccgagccaagacccagatcaacagccaactgcggcccatgatgtcagagctggaagagagggcacgtcagcagaggggccacctccatttgctggagacaagcatagatgggattctggctgatgtgaagaacttggagaacattagggacaacctgcccccaggctgctacaatacccaggctcttgagcaacagtgaagctgccataaatatttctcaactgaggttcttgggatacagatctcagggctcgggagccatgtcatgtgagtgggtgggatggggacatttgaacatgtttaatgggtatgctcaggtcaactgacctgaccccattcctgatcccatggccaggtggttgtcttattgcaccatactccttgcttcctgatgctgggcaatgaggcagatagcactgggtgtgagaatgatcaaggatctggaccccaaagaatagactggatggaaagacaaactgcacaggcagatgtttgcctcataatagtcgtaagtggagtcctggaatttggacaagtgctgttgggatatagtcaacttattctttgagtaatgtgactaaaggaaaaaactttgactttgcccaggcatgaaattcttcctaatgtcagaacagagtgcaacccagtcacactgtggccagtaaaatactattgcctcatattgtcctctgcaagcttcttgctgatcagagttcctcctacttacaacccagggtgtgaacatgttctccattttcaagctggaagaagtgagcagtgttggagtgaggacctgtaaggcaggcccattcagagctatggtgcttgctggtgcctgccaccttcaagttctggacctgggcatgacatcctttcttttaatgatgccatggcaacttagagattgcatttttattaaagcatttcctaccagcaaagcaaatgttgggaaagtatttactttttcggtttcaaagtgatagaaaagtgtggcttgggcattgaaagaggtaaaattctctagatttattagtcctaattcaatcctacttttcgaacaccaaaaatgatgcgcatcaatgtattttatcttattttctcaatctcctctctctttcctccacccataataagagaatgttcctactcacacttcagctgggtcacatccatccctccattcatccttccatccatctttccatccattacctccatccatccttccaacatatatttattgagtacctactgtgtgccaggggctggtgggacagtggtgacatagtctctgccctcatagagttgattgtctagtgaggaagacaagcatttttaaaaaataaatttaaacttaca

SEQ ID NO: 447518 - DNA, 4953 bp, Homo sapiens
  misc_feature (4949)..(4953): n is a, c, g, or t
gaccacctgatcgaaggaaaaggaaggcacagcggagcgcagagtgagaaccaccaaccgaggcgccgggcagcgacccctgcagcggagacagagactgagcggcccggcaccgccatgcctgcgctctggctgggctgctgcctctgcttctcgctcctcctgcccgcagcccgggccacctccaggagggaagtctgtgattgcaatgggaagtccaggcagtgtatctttgatcgggaacttcacagacaaactggtaatggattccgctgcctcaactgcaatgacaacactgatggcattcactgcgagaagtgcaagaatggcttttaccggcacagagaaagggaccgctgtttgccctgcaattgtaactccaaaggttctcttagtgctcgatgtgacaactctggacggtgcagctgtaaaccaggtgtgacaggagccagatgcgaccgatgtctgccaggcttccacatgctcacggatgcggggtgcacccaagaccagagactgctagactccaagtgtgactgtgacccagctggcatcgcagggccctgtgacgcgggccgctgtgtctgcaagccagctgttactggagaacgctgtgataggtgtcgatcaggttactataatctggatggggggaaccctgagggctgtacccagtgtttctgctatgggcattcagccagctgccgcagctctgcagaatacagtgtccataagatcacctctacctttcatcaagatgttgatggctggaaggctgtccaacgaaatgggtctcctgcaaagctccaatggtcacagcgccatcaagatgtgtttagctcagcccaacgactagaccctgtctattttgtggctcctgccaaatttcttgggaatcaacaggtgagctatgggcaaagcctgtcctttgactaccgtgtggacagaggaggcagacacccatctgcccatgatgtgattctggaaggtgctggtctacggatcacagctcccttgatgccacttggcaagacactgccttgtgggctcaccaagacttacacattcaggttaaatgagcatccaagcaataattggagcccccagctgagttactttgagtatcgaaggttactgcggaatctcacagccctccgcatccgagctacatatggagaatacagtactgggtacattgacaatgtgaccctgatttcagcccgccctgtctctggagccccagcaccctgggttgaacagtgtatatgtcctgttgggtacaaggggcaattctgccaggattgtgcttctggctacaagagagattcagcgagactggggccttttggcacctgtattccttgtaactgtcaagggggaggggcctgtgatccagacacaggagattgttattcaggggatgagaatcctgacattgagtgtgctgactgcccaattggtttctacaacgatccgcacgacccccgcagctgcaagccatgtccctgtcataacgggttcagctgctcagtgatgccggagacggaggaggtggtgtgcaataactgccctcccggggtcaccggtgcccgctgtgagctctgtgctgatggctactttggggacccctttggtgaacatggcccagtgaggccttgtcagccctgtcaatgcaacaacaatgtggaccccagtgcctctgggaattgtgaccggctgacaggcaggtgtttgaagtgtatccacaacacagccggcatctactgcgaccagtgcaaagcaggctacttcggggacccattggctcccaacccagcagacaagtgtcgagcttgcaactgtaaccccatgggctcagagcctgtaggatgtcgaagtgatggcacctgtgtttgcaagccaggatttggtggccccaactgtgagcatggagcattcagctgtccagcttgctataatcaagtgaagattcagatggatcagtttatgcagcagcttcagagaatggaggccctgatttcaaaggctcagggtggtgatggagtagtacctgatacagagctggaaggcaggatgcagcaggctgagcaggcccttcaggacattctgagagatgcccagatttcagaaggtgctagcagatcccttggtctccagttggccaaggtgaggagccaagagaacagctaccagagccgcctggatgacctcaagatgactgtggaaagagttcgggctctgggaagtcagtaccagaaccgagttcgggatactcacaggctcatcactcagatgcagctgagcctggcagaaagtgaagcttccttgggaaacactaacattcctgcctcagaccactacgtggggccaaatggctttaaaagtctggctcaggaggccacaagattagcagaaagccacgttgagtcagccagtaacatggagcaactgacaagggaaactgaggactattccaaacaagccctctcactggtgcgcaaggccctgcatgaaggagtcggaagcggaagcggtagcccggacggtgctgtggtgcaagggcttgtggaaaaattggagaaaaccaagtccctggcccagcagttgacaagggaggccactcaagcggaaattgaagcagataggtcttatcagcacagtctccgcctcctggattcagtgtctcggcttcagggagtcagtgatcagtcctttcaggtggaagaagcaaagaggatcaaacaaaaagcggattcactctcaagcctggtaaccaggcatatggatgagttcaagcgtacacagaagaatctgggaaactggaaagaagaagcacagcagctcttacagaatggaaaaagtgggagagagaaatcagatcagctgctttcccgtgccaatcttgctaaaagcagagcacaagaagcactgagtatgggcaatgccactttttatgaagttgagagcatccttaaaaacctcagagagtttgacctgcaggtggacaacagaaaagcagaagctgaagaagccatgaagagactctcctacatcagccagaaggtttcagatgccagtgacaagacccagcaagcagaaagagccctggggagcgctgctgctgatgcacagagggcaaagaatggggccggggaggccctggaaatctccagtgagattgaacaggagattgggagtctgaacttggaagccaatgtgacagcagatggagccttggccatggaaaagggactggcctctctgaagagtgagatgagggaagtggaaggagagctggaaaggagggcacgtcagcagaggggccacctccatttgctggagacaagcatagatgggattctggctgatgtgaagaacttggagaacattagggacaacctgcccccaggctgctacaatacccaggctcttgagcaacagtgaagctgccataaatatttctcaactgaggttcttgggatacagatctcagggctcgggagccatgtcatgtgagtgggtgggatggggacatttgaacatgtttaatgggtatgctcaggtcaactgacctgaccccattcctgatcccatggccaggtggttgtcttattgcaccatactccttgcttcctgatgctgggcaatgaggcagatagcactgggtgtgagaatgatcaaggatctggaccccaaagaatagactggatggaaagacaaactgcacaggcagatgtttgcctcataatagtcgtaagtggagtcctggaatttggacaagtgctgttgggatatagtcaacttattctttgagtaatgtgactaaaggaaaaaactttgactttgcccaggcatgaaattcttcctaatgtcagaacagagtgcaacccagtcacactgtggccagtaaaatactattgcctcatattgtcctctgcaagcttcttgctgatcagagttcctcctacttacaacccagggtgtgaacatgttctccattttcaagctggaagaagtgagcagtgttggagtgaggacctgtaaggcaggcccattcagagctatggtgcttgctggtgcctgccaccttcaagttctggacctgggcatgacatcctttcttttaatgatgccatggcaacttagagattgcatttttattaaagcatttcctaccagcaaagcaaatgttgggaaagtatttactttttcggtttcaaagtgatagaaaagtgtggcttgggcattgaaagaggtaaaattctctagatttattagtcctaattcaatcctacttttcgaacaccaaaaatgatgcgcatcaatgtattttatcttattttctcaatctcctctctctttcctccacccataataagagaatgttcctactcacacttcagctgggtcacatccatccctccattcatccttccatccatctttccatccattacctccatccatccttccaacatatatttattgagtacctactgtgtgccaggggctggtgggacagtggtgacatagtctctgccctcatagagttgattgtctagtgaggaagacaagcatttttaaaaaataaatttaaacttacaaactttgtttgtcacaagtggtgtttattgcaataaccgcttggtttgcaacctctttgctcaacagaacatatgttgcaagaccctcccatgggggcacttgagttttggcaaggctgacagagctctgggttgtgcacatttctttgcattccagctgtcactctgtgcctttctacaactgattgcaacagactgttgagttatgataacaccagtgggaattgctggaggaaccagaggcacttccaccttggctgggaagactatggtgctgccttgcttctgtatttccttggattttcctgaaagtgtttttaaataaagaacaattgttagatgccnnnnn

SEQ ID NO: 447519 - DNA, 2004 bp, Homo sapiens
  misc_feature (2000)..(2004): n is a, c, g, or t
ctcatctcactcttcagagaggccagtcccttggccatggaaaagggactggcctctctgaagagtgagatgagggaagtggaaggagagctggaaaggaaggagctggagtttgacacgaatatggatgcagtacagatggtgattacagaagcccagaaggttgataccagagccaagaacgctggggttacaatccaagacacactcaacacattagacggcctcctgcatctgatggaccagcctctcagtgtagatgaagaggggctggtcttactggagcagaagctttcccgagccaagacccagatcaacagccaactgcggcccatgatgtcagagctggaagagagggcacgtcagcagaggggccacctccatttgctggagacaagcatagatgggattctggctgatgtgaagaacttggagaacattagggacaacctgcccccaggctgctacaatacccaggctcttgagcaacagtgaagctgccataaatatttctcaactgaggttcttgggatacagatctcagggctcgggagccatgtcatgtgagtgggtgggatggggacatttgaacatgtttaatgggtatgctcaggtcaactgacctgaccccattcctgatcccatggccaggtggttgtcttattgcaccatactccttgcttcctgatgctgggcaatgaggcagatagcactgggtgtgagaatgatcaaggatctggaccccaaagaatagactggatggaaagacaaactgcacaggcagatgtttgcctcataatagtcgtaagtggagtcctggaatttggacaagtgctgttgggatatagtcaacttattctttgagtaatgtgactaaaggaaaaaactttgactttgcccaggcatgaaattcttcctaatgtcagaacagagtgcaacccagtcacactgtggccagtaaaatactattgcctcatattgtcctctgcaagcttcttgctgatcagagttcctcctacttacaacccagggtgtgaacatgttctccattttcaagctggaagaagtgagcagtgttggagtgaggacctgtaaggcaggcccattcagagctatggtgcttgctggtgcctgccaccttcaagttctggacctgggcatgacatcctttcttttaatgatgccatggcaacttagagattgcatttttattaaagcatttcctaccagcaaagcaaatgttgggaaagtatttactttttcggtttcaaagtgatagaaaagtgtggcttgggcattgaaagaggtaaaattctctagatttattagtcctaattcaatcctacttttcgaacaccaaaaatgatgcgcatcaatgtattttatcttattttctcaatctcctctctctttcctccacccataataagagaatgttcctactcacacttcagctgggtcacatccatccctccattcatccttccatccatctttccatccattacctccatccatccttccaacatatatttattgagtacctactgtgtgccaggggctggtgggacagtggtgacatagtctctgccctcatagagttgattgtctagtgaggaagacaagcatttttaaaaaataaatttaaacttacaaactttgtttgtcacaagtggtgtttattgcaataaccgcttggtttgcaacctctttgctcaacagaacatatgttgcaagaccctcccatgggggcacttgagttttggcaaggctgacagagctctgggttgtgcacatttctttgcattccagctgtcactctgtgcctttctacaactgattgcaacagactgttgagttatgataacaccagtgggaattgctggaggaaccagaggcacttccaccttggctgggaagactatggtgctgccttgcttctgtatttccttggattttcctgaaagtgtttttaaataaagaacaattgttagatgccnnnnn

SEQ ID NO: 447520 - DNA, 1888 bp, Homo sapiens
  misc_feature (1884)..(1888): n is a, c, g, or t
cggtcaatttgtctacacacagatggtgattacagaagcccagaaggttgataccagagccaagaacgctggggttacaatccaagacacactcaacacattagacggcctcctgcatctgatggaccagcctctcagtgtagatgaagaggggctggtcttactggagcagaagctttcccgagccaagacccagatcaacagccaactgcggcccatgatgtcagagctggaagagagggcacgtcagcagaggggccacctccatttgctggagacaagcatagatgggattctggctgatgtgaagaacttggagaacattagggacaacctgcccccaggctgctacaatacccaggctcttgagcaacagtgaagctgccataaatatttctcaactgaggttcttgggatacagatctcagggctcgggagccatgtcatgtgagtgggtgggatggggacatttgaacatgtttaatgggtatgctcaggtcaactgacctgaccccattcctgatcccatggccaggtggttgtcttattgcaccatactccttgcttcctgatgctgggcaatgaggcagatagcactgggtgtgagaatgatcaaggatctggaccccaaagaatagactggatggaaagacaaactgcacaggcagatgtttgcctcataatagtcgtaagtggagtcctggaatttggacaagtgctgttgggatatagtcaacttattctttgagtaatgtgactaaaggaaaaaactttgactttgcccaggcatgaaattcttcctaatgtcagaacagagtgcaacccagtcacactgtggccagtaaaatactattgcctcatattgtcctctgcaagcttcttgctgatcagagttcctcctacttacaacccagggtgtgaacatgttctccattttcaagctggaagaagtgagcagtgttggagtgaggacctgtaaggcaggcccattcagagctatggtgcttgctggtgcctgccaccttcaagttctggacctgggcatgacatcctttcttttaatgatgccatggcaacttagagattgcatttttattaaagcatttcctaccagcaaagcaaatgttgggaaagtatttactttttcggtttcaaagtgatagaaaagtgtggcttgggcattgaaagaggtaaaattctctagatttattagtcctaattcaatcctacttttcgaacaccaaaaatgatgcgcatcaatgtattttatcttattttctcaatctcctctctctttcctccacccataataagagaatgttcctactcacacttcagctgggtcacatccatccctccattcatccttccatccatctttccatccattacctccatccatccttccaacatatatttattgagtacctactgtgtgccaggggctggtgggacagtggtgacatagtctctgccctcatagagttgattgtctagtgaggaagacaagcatttttaaaaaataaatttaaacttacaaactttgtttgtcacaagtggtgtttattgcaataaccgcttggtttgcaacctctttgctcaacagaacatatgttgcaagaccctcccatgggggcacttgagttttggcaaggctgacagagctctgggttgtgcacatttctttgcattccagctgtcactctgtgcctttctacaactgattgcaacagactgttgagttatgataacaccagtgggaattgctggaggaaccagaggcacttccaccttggctgggaagactatggtgctgccttgcttctgtatttccttggattttcctgaaagtgtttttaaataaagaacaattgttagatgccnnnnn

SEQ ID NO: 447521 - DNA, 4460 bp, Homo sapiens
gaccacctgatcgaaggaaaaggaaggcacagcggagcgcagagtgagaaccaccaaccgaggcgccgggcagcgacccctgcagcggagacagagactgagcggcccggcaccgccatgcctgcgctctggctgggctgctgcctctgcttctcgctcctcctgcccgcagcccgggccacctccaggagggaagtctgtgattgcaatgggaagtccaggcagtgtatctttgatcgggaacttcacagacaaactggtaatggattccgctgcctcaactgcaatgacaacactgatggcattcactgcgagaagtgcaagaatggcttttaccggcacagagaaagggaccgctgtttgccctgcaattgtaactccaaaggttctcttagtgctcgatgtgacaactctggacggtgcagctgtaaaccaggtgtgacaggagccagatgcgaccgatgtctgccaggcttccacatgctcacggatgcggggtgcacccaagaccagagactgctagactccaagtgtgactgtgacccagctggcatcgcagggccctgtgacgcgggccgctgtgtctgcaagccagctgttactggagaacgctgtgataggtgtcgatcaggttactataatctggatggggggaaccctgagggctgtacccagtgtttctgctatgggcattcagccagctgccgcagctctgcagaatacagtgtccataagatcacctctacctttcatcaagatgttgatggctggaaggctgtccaacgaaatgggtctcctgcaaagctccaatggtcacagcgccatcaagatgtgtttagctcagcccaacgactagaccctgtctattttgtggctcctgccaaatttcttgggaatcaacaggtgagctatgggcaaagcctgtcctttgactaccgtgtggacagaggaggcagacacccatctgcccatgatgtgattctggaaggtgctggtctacggatcacagctcccttgatgccacttggcaagacactgccttgtgggctcaccaagacttacacattcaggttaaatgagcatccaagcaataattggagcccccagctgagttactttgagtatcgaaggttactgcggaatctcacagccctccgcatccgagctacatatggagaatacagtactgggtacattgacaatgtgaccctgatttcagcccgccctgtctctggagccccagcaccctgggttgaacagtgtatatgtcctgttgggtacaaggggcaattctgccaggattgtgcttctggctacaagagagattcagcgagactggggccttttggcacctgtattccttgtaactgtcaagggggaggggcctgtgatccagacacaggagattgttattcaggggatgagaatcctgacattgagtgtgctgactgcccaattggtttctacaacgatccgcacgacccccgcagctgcaagccatgtccctgtcataacgggttcagctgctcagtgatgccggagacggaggaggtggtgtgcaataactgccctcccggggtcaccggtgcccgctgtgagctctgtgctgatggctactttggggacccctttggtgaacatggcccagtgaggccttgtcagccctgtcaatgcaacaacaatgtggaccccagtgcctctgggaattgtgaccggctgacaggcaggtgtttgaagtgtatccacaacacagccggcatctactgcgaccagtgcaaagcaggctacttcggggacccattggctcccaacccagcagacaagtgtcgagcttgcaactgtaaccccatgggctcagagcctgtaggatgtcgaagtgatggcacctgtgtttgcaagccaggatttggtggccccaactgtgagcatggagcattcagctgtccagcttgctataatcaagtgaagattcagatggatcagtttatgcagcagcttcagagaatggaggccctgatttcaaaggctcagggtggtgatggagtagtacctgatacagagctggaaggcaggatgcagcaggctgagcaggcccttcaggacattctgagagatgcccagatttcagaaggtgctagcagatcccttggtctccagttggccaaggtgaggagccaagagaacagctaccagagccgcctggatgacctcaagatgactgtggaaagagttcgggctctgggaagtcagtaccagaaccgagttcgggatactcacaggctcatcactcagatgcagctgagcctggcagaaagtgaagcttccttgggaaacactaacattcctgcctcagaccactacgtggggccaaatggctttaaaagtctggctcaggaggccacaagattagcagaaagccacgttgagtcagccagtaacatggagcaactgacaagggaaactgaggactattccaaacaagccctctcactggtgcgcaaggccctgcatgaaggagtcggaagcggaagcggtagcccggacggtgctgtggtgcaagggcttgtggaaaaattggagaaaaccaagtccctggcccagcagttgacaagggaggccactcaagcggaaattgaagcagataggtcttatcagcacagtctccgcctcctggattcagtgtctcggcttcagggagtcagtgatcagtcctttcaggtggaagaagcaaagaggatcaaacaaaaagcggattcactctcaagcctggtaaccaggcatatggatgagttcaagcgtacacagaagaatctgggaaactggaaagaagaagcacagcagctcttacagaatggaaaaagtgggagagagaaatcagatcagctgctttcccgtgccaatcttgctaaaagcagagcacaagaagcactgagtatgggcaatgccactttttatgaagttgagagcatccttaaaaacctcagagagtttgacctgcaggtggacaacagaaaagcagaagctgaagaagccatgaagagactctcctacatcagccagaaggtttcagatgccagtgacaagacccagcaagcagaaagagccctggggagcgctgctgctgatgcacagagggcaaagaatggggccggggaggccctggaaatctccagtgagattgaacaggagattgggagtctgaacttggaagccaatgtgacagcagatggagccttggccatggaaaagggactggcctctctgaagagtgagatgagggaagtggaaggagagctggaaaggaaggagctggagtttgacacgaatatggatgcagtacagatggtgattacagaagcccagaaggttgataccagagccaagaacgctggggttacaatccaagacacactcaacacattagacggcctcctgcatctgatggaccagcctctcagtgtagatgaagaggggctggtcttactggagcagaagctttcccgagccaagacccagatcaacagccaactgcggcccatgatgtcagagctggaagagagggcacgtcagcagaggggccacctccatttgctggagacaagcatagatgggattctggctgatgtgaagaacttggagaacattagggacaacctgcccccaggctgctacaatacccaggctcttgagcaacagtgaagctgccataaatatttctcaactgaggttcttgggatacagatctcagggctcgggagccatgtcatgtgagtgggtgggatggggacatttgaacatgtttaatgggtatgctcaggtcaactgacctgaccccattcctgatcccatggccaggtggttgtcttattgcaccatactccttgcttcctgatgctgggcaatgaggcagatagcactgggtgtgagaatgatcaaggatctggaccccaaagaatagactggatggaaagacaaactgcacaggcagatgtttgcctcataatagtcgtaagtggagtcctggaatttggacaagtgctgttgggatatagtcaacttattctttgagtaatgtgactaaaggaaaaaactttgactttgcccaggcatgaaattcttcctaatgtcagaacagagtgcaacccagtcacactgtggccagtaaaatactattgcctcatattgtcctctgcaagcttcttgctgatcagagttcctcctacttacaacccagggtgtgaacatgttctccattttcaagctggaagaagtgagcagtgttggagtgaggacctgtaaggcaggcccattcagagctatggtgcttgctggtgcctgccaccttcaagttctggacctgggcatgacatcctttcttttaatgatgccatggcaacttagagattgcatttttattaaagcatttgctttgctggtaggaaatgctttaatagtcgacg

SEQ ID NO: 447522 - DNA, 4180 bp, Homo sapiens
gaccacctgatcgaaggaaaaggaaggcacagcggagcgcagagtgagaaccaccaaccgaggcgccgggcagcgacccctgcagcggagacagagactgagcggcccggcaccgccatgcctgcgctctggctgggctgctgcctctgcttctcgctcctcctgcccgcagcccgggccacctccaggagggaagtctgtgattgcaatgggaagtccaggcagtgtatctttgatcgggaacttcacagacaaactggtaatggattccgctgcctcaactgcaatgacaacactgatggcattcactgcgagaagtgcaagaatggcttttaccggcacagagaaagggaccgctgtttgccctgcaattgtaactccaaaggttctcttagtgctcgatgtgacaactctggacggtgcagctgtaaaccaggtgtgacaggagccagatgcgaccgatgtctgccaggcttccacatgctcacggatgcggggtgcacccaagaccagagactgctagactccaagtgtgactgtgacccagctggcatcgcagggccctgtgacgcgggccgctgtgtctgcaagccagctgttactggagaacgctgtgataggtgtcgatcaggttactataatctggatggggggaaccctgagggctgtacccagtgtttctgctatgggcattcagccagctgccgcagctctgcagaatacagtgtccataagatcacctctacctttcatcaagatgttgatggctggaaggctgtccaacgaaatgggtctcctgcaaagctccaatggtcacagcgccatcaagatgtgtttagctcagcccaacgactagaccctgtctattttgtggctcctgccaaatttcttgggaatcaacaggtgagctatgggcaaagcctgtcctttgactaccgtgtggacagaggaggcagacacccatctgcccatgatgtgattctggaaggtgctggtctacggatcacagctcccttgatgccacttggcaagacactgccttgtgggctcaccaagacttacacattcaggttaaatgagcatccaagcaataattggagcccccagctgagttactttgagtatcgaaggttactgcggaatctcacagccctccgcatccgagctacatatggagaatacagtactgggtacattgacaatgtgaccctgatttcagcccgccctgtctctggagccccagcaccctgggttgaacagtgtatatgtcctgttgggtacaaggggcaattctgccaggattgtgcttctggctacaagagagattcagcgagactggggccttttggcacctgtattccttgtaactgtcaagggggaggggcctgtgatccagacacaggagattgttattcaggggatgagaatcctgacattgagtgtgctgactgcccaattggtttctacaacgatccgcacgacccccgcagctgcaagccatgtccctgtcataacgggttcagctgctcagtgatgccggagacggaggaggtggtgtgcaataactgccctcccggggtcaccggtgcccgctgtgagctctgtgctgatggctactttggggacccctttggtgaacatggcccagtgaggccttgtcagccctgtcaatgcaacaacaatgtggaccccagtgcctctgggaattgtgaccggctgacaggcaggtgtttgaagtgtatccacaacacagccggcatctactgcgaccagtgcaaagcaggctacttcggggacccattggctcccaacccagcagacaagtgtcgagcttgcaactgtaaccccatgggctcagagcctgtaggatgtcgaagtgatggcacctgtgtttgcaagccaggatttggtggccccaactgtgagcatggagcattcagctgtccagcttgctataatcaagtgaagattcagatggatcagtttatgcagcagcttcagagaatggaggccctgatttcaaaggctcagggtggtgatggagtagtacctgatacagagctggaaggcaggatgcagcaggctgagcaggcccttcaggacattctgagagatgcccagatttcagaaggtgctagcagatcccttggtctccagttggccaaggtgaggagccaagagaacagctaccagagccgcctggatgacctcaagatgactgtggaaagagttcgggctctgggaagtcagtaccagaaccgagttcgggatactcacaggctcatcactcagatgcagctgagcctggcagaaagtgaagcttccttgggaaacactaacattcctgcctcagaccactacgtggggccaaatggctttaaaagtctggctcaggaggccacaagattagcagaaagccacgttgagtcagccagtaacatggagcaactgacaagggaaactgaggactattccaaacaagccctctcactggtgcgcaaggccctgcatgaaggagtcggaagcggaagcggtagcccggacggtgctgtggtgcaagggcttgtggaaaaattggagaaaaccaagtccctggcccagcagttgacaagggaggccactcaagcggaaattgaagcagataggtcttatcagcacagtctccgcctcctggattcagtgtctcggcttcagggagtcagtgatcagtcctttcaggtggaagaagcaaagaggatcaaacaaaaagcggattcactctcaagcctggtaaccaggcatatggatgagttcaagcgtacacagaagaatctgggaaactggaaagaagaagcacagcagctcttacagaatggaaaaagtgggagagagaaatcagatcagctgctttcccgtgccaatcttgctaaaagcagagcacaagaagcactgagtatgggcaatgccactttttatgaagttgagagcatccttaaaaacctcagagagtttgacctgcaggtggacaacagaaaagcagaagctgaagaagccatgaagagactctcctacatcagccagaaggtttcagatgccagtgacaagacccagcaagcagaaagagccctggggagcgctgctgctgatgcacagagggcaaagaatggggccggggaggccctggaaatctccagtgagattgaacaggagattgggagtctgaacttggaagccaatgtgacagcagatggagccttggccatggaaaagggactggcctctctgaagagtgagatgagggaagtggaaggagagctggaaaggaaggagctggagtttgacacgaatatggatgcagtacagatggtgattacagaagcccagaaggttgataccagagccaagaacgctggggttacaatccaagacacactcaacacattagacggcctcctgcatctgatggaccagcctctcagtgtagatgaagaggggctggtcttactggagcagaagctttcccgagccaagacccagatcaacagccaactgcggcccatgatgtcagagctggaagagagggcacgtcagcagaggggccacctccatttgctggagacaagcatagatgggattctggctgatgtgaagaacttggagaacattagggacaacctgcccccaggctgctacaatacccaggctcttgagcaacagtgaagctgccataaatatttctcaactgaggttcttgggatacagatctcagggctcgggagccatgtcatgtgagtgggtgggatggggacatttgaacatgtttaatgggtatgctcaggtcaactgacctgaccccattcctgatcccatggccaggtggttgtcttattgcaccatactccttgcttcctgatgctgggcaatgaggcagatagcactgggtgtgagaatgatcaaggatctggaccccaaagaatagactggatggaaagacaaactgcacaggcagatgtttgcctcataatagtcgtaagtggagtcctggaatttggacaagtgctgttgggatatagtcaacttattctttgagtaatgtgactaaaggaaaaaactttgactttgcccaggcatgaaattcttcctaatgtcagaacagagtgcaacccagtcacactgtggccagtaaaatactattgcctca

SEQ ID NO: 447523 - DNA, 3547 bp, Homo sapiens
gaccacctgatcgaaggaaaaggaaggcacagcggagcgcagagtgagaaccaccaaccgaggcgccgggcagcgacccctgcagcggagacagagactgagcggcccggcaccgccatgcctgcgctctggctgggctgctgcctctgcttctcgctcctcctgcccgcagcccgggccacctccaggagggaagtctgtgattgcaatgggaagtccaggcagtgtatctttgatcgggaacttcacagacaaactggtaatggattccgctgcctcaactgcaatgacaacactgatggcattcactgcgagaagtgcaagaatggcttttaccggcacagagaaagggaccgctgtttgccctgcaattgtaactccaaaggttctcttagtgctcgatgtgacaactctggacggtgcagctgtaaaccaggtgtgacaggagccagatgcgaccgatgtctgccaggcttccacatgctcacggatgcggggtgcacccaagaccagagactgctagactccaagtgtgactgtgacccagctggcatcgcagggccctgtgacgcgggccgctgtgtctgcaagccagctgttactggagaacgctgtgataggtgtcgatcaggttactataatctggatggggggaaccctgagggctgtacccagtgtttctgctatgggcattcagccagctgccgcagctctgcagaatacagtgtccataagatcacctctacctttcatcaagatgttgatggctggaaggctgtccaacgaaatgggtctcctgcaaagctccaatggtcacagcgccatcaagatgtgtttagctcagcccaacgactagaccctgtctattttgtggctcctgccaaatttcttgggaatcaacaggtgagctatgggcaaagcctgtcctttgactaccgtgtggacagaggaggcagacacccatctgcccatgatgtgattctggaaggtgctggtctacggatcacagctcccttgatgccacttggcaagacactgccttgtgggctcaccaagacttacacattcaggttaaatgagcatccaagcaataattggagcccccagctgagttactttgagtatcgaaggttactgcggaatctcacagccctccgcatccgagctacatatggagaatacagtactgggtacattgacaatgtgaccctgatttcagcccgccctgtctctggagccccagcaccctgggttgaacagtgtatatgtcctgttgggtacaaggggcaattctgccaggattgtgcttctggctacaagagagattcagcgagactggggccttttggcacctgtattccttgtaactgtcaagggggaggggcctgtgatccagacacaggagattgttattcaggggatgagaatcctgacattgagtgtgctgactgcccaattggtttctacaacgatccgcacgacccccgcagctgcaagccatgtccctgtcataacgggttcagctgctcagtgatgccggagacggaggaggtggtgtgcaataactgccctcccggggtcaccggtgcccgctgtgagctctgtgctgatggctactttggggacccctttggtgaacatggcccagtgaggccttgtcagccctgtcaatgcaacaacaatgtggaccccagtgcctctgggaattgtgaccggctgacaggcaggtgtttgaagtgtatccacaacacagccggcatctactgcgaccagtgcaaagcaggctacttcggggacccattggctcccaacccagcagacaagtgtcgagcttgcaactgtaaccccatgggctcagagcctgtaggatgtcgaagtgatggcacctgtgtttgcaagccaggatttggtggccccaactgtgagcatggagcattcagctgtccagcttgctataatcaagtgaagattcagatggatcagtttatgcagcagcttcagagaatggaggccctgatttcaaaggctcagggtggtgatggagtagtacctgatacagagctggaaggcaggatgcagcaggctgagcaggcccttcaggacattctgagagatgcccagatttcagaaggtgctagcagatcccttggtctccagttggccaaggtgaggagccaagagaacagctaccagagccgcctggatgacctcaagatgactgtggaaagagttcgggctctgggaagtcagtaccagaaccgagttcgggatactcacaggctcatcactcagatgcagctgagcctggcagaaagtgaagcttccttgggaaacactaacattcctgcctcagaccactacgtggggccaaatggctttaaaagtctggctcaggaggccacaagattagcagaaagccacgttgagtcagccagtaacatggagcaactgacaagggaaactgaggactattccaaacaagccctctcactggtgcgcaaggccctgcatgaaggagtcggaagcggaagcggtagcccggacggtgctgtggtgcaagggcttgtggaaaaattggagaaaaccaagtccctggcccagcagttgacaagggaggccactcaagcggaaattgaagcagataggtcttatcagcacagtctccgcctcctggattcagtgtctcggcttcagggagtcagtgatcagtcctttcaggtggaagaagcaaagaggatcaaacaaaaagcggattcactctcaagcctggtaaccaggcatatggatgagttcaagcgtacacagaagaatctgggaaactggaaagaagaagcacagcagctcttacagaatggaaaaagtgggagagagaaatcagatcagctgctttcccgtgccaatcttgctaaaagcagagcacaagaagcactgagtatgggcaatgccactttttatgaagttgagagcatccttaaaaacctcagagagtttgacctgcaggtggacaacagaaaagcagaagctgaagaagccatgaagagactctcctacatcagccagaaggtttcagatgccagtgacaagacccagcaagcagaaagagccctggggagcgctgctgctgatgcacagagggcaaagaatggggccggggaggccctggaaatctccagtgagattgaacaggagattgggagtctgaacttggaagccaatgtgacagcagatggagccttggccatggaaaagggactggcctctctgaagagtgagatgagggaagtggaaggagagctggaaaggaaggagctggagtttgacacgaatatggatgcagtacagatggtgattacagaagcccagaaggttgataccagagccaagaacgctggggttacaatccaagacacactcaacacattagacggcctcctgcatctgatggagcagcctctcagtgtagatgaagaggggctggtcttagctgaaacagacaactagcgctctgtccaagccacaacttcagacctgtccccaatgtcaagcc

SEQ ID NO: 447524 - DNA, 2002 bp, Homo sapiens
cttggatctagagcgtggtgcgtgaagggtaacccgtggacaagctggatgacgagagagcttgcgctagcgtgttctcttgctcacttcaccgttggggacccgagtatacttagtaggtactgccgtcactgatacaactcggaacgcagacctctagtaatcatcgctaccacaacataatacacctttcatattatgtattatcttgcttaatgggttttatcttgattatccagttacttccatcctcttcccaatgttaatttgcaatagttttaaaatgggaacaaatgaatcaatcatcagatagttaaaatgaaattaaatcagctgcctaataatttatggaattcattggaatgtgcttaaaatgctaaagtgtatgtcattgaacatgaaatcttttttcaggcacatacattgttggtattgatgactttttaaaacctgtgggataaacttgcactgcacacggaagttttattcttgtatatttagatttgtatgcttgtgagtaaaaatgtgcatttgtaaatactgtgtttttaggttgaatcaattaagtcttaaaactgtaaatttattaagcttgttgccagtaggtttaagaaaatcatgatctcacatgcctcactttgacatttatcatgccttttattaaaaatatcccttaggaacagtaagtttgccttaactctctgcatggtttaaaaagccattggttttgtgtgtgtttacagtaattatgcagatgactaaatgagttgacacagtaaaattacttccatatggtacagtaacaacctaactcccttctacctgatgtaaccatttacaaattatagttattgtaccagtctttcaacatttcagggttaatctgacctatgcagaattctagtgtgaatttattgtgaaaatgctaaatgaaacaatttgtcagaaattatgtacaattttcattaccttcaaaatggatcttttgcactgtctgagagtatatatttttgcaactcaagacttggtactagttttaatacttaacacttactgacccaacagaagtttggaattaccttgcatataaaaattgaggttgaataaaatgaaaaattgttgttttctgttacattaagcctcttgaaatctgtaatctttagaatcccaatattttgttttttccattccttcactcgtaacttgaactcaagttttcacttactgacgcgcttcccattaaaaaaaatctgtaaagatctctaccttgaaaactttagtctgctgctgccatttagatattgggactgatttcttgttataaatttttaaaggctttttccaatacccaccacagagagggtaccactaaaaatttacaagacaaaaacattattatggaaagatttagaagtacctggaatgacttgtagcactgtatgcaactttaatcctgataacttctaaaagcaatctttcaaattagtccagattactcagcagtaccttatattggtttggggttcgatagcgatttttttttcttccaacgaacgaattgtacaggttgatcacaacctgcatagttaacgacatgtcagaatgacttgcgtgtgtgtggagaactgggtatggtggctcacgcctgtagtaatctcaacactttgggatgccaaggcaggcggatcacttgagcccaggagttcaagagtagcctgggtaacatagcaaaactctacaaaaagcacaaaaactagccgcagtgcacacctgtagttcccaggcggtcaaggctgcagtgagccataccactgctcgccatccggggcgtaggagtgaaaccctgtgtcaaagaaaaaaaaaaatctaaggaaaaacagactgtccttattttgtggctgcactcaattttcagaaagcagggcggttctcatgttttgtgcatcataaacaagaactggttaatataaaactttggaccataacactggactcaccttgt

SEQ ID NO: 447525 - DNA, 1401 bp, Homo sapiens
tactactactaaattcgcggccgcgtcgactttttttttgacatttatcatgccttttattaaaaatatcccttaggaacagtaagtttgccttaactctctgcatggtttaaaaagccattggttttgtgtgtgtttacagtaattatgcagatgactaaatgagttgacacagtaaaattacttccatatggtacagtaacaacctaactcccttctacctgatgtaaccatttacaaattatagttattgtaccagtctttcaacatttcagggttaatctgacctatgcagaattctagtgtgaatttattgtgaaaatgctaaatgaaacaatttgtcagaaattatgtacaattttcattaccttcaaaatggatcttttgcactgtctgagagtatatatttttgcaactcaagacttggtactagttttaatacttaacacttactgacccaacagaagtttggaattaccttgcatataaaaattgaggttgaataaaatgaaaaattgttgttttctgttacattaagcctcttgaaatctgtaatctttagaatcccaatattttgttttttccattccttcactcgtaacttgaactcaagttttcacttactgacgcgcttcccattaaaaaaaatctgtaaagatctctaccttgaaaactttagtctgctgctgccatttagatattgggactgatttcttgttataaatttttaaaggctttttccaatacccaccacagagagggtaccactaaaaatttacaagacaaaaacattattatggaaagatttagaagtacctggaatgacttgtagcactgtatgcaactttaatcctgataacttctaaaagcaatctttcaaattagtccagattactcagcagtaccttatattggtttggggttcgatagcgatttttttttcttccaacgaacgaattgtacaggttgatcacaacctgcatagttaacgacatgtcagaatgacttgcgtgtgtgtggagaactgggtatggtggctcacgcctgtagtaatctcaacactttgggatgccaaggcaggcggatcacttgagcccaggagttcaagagtagcctgggtaacatagcaaaactctacaaaaagcacaaaaactagccgcagtgcacacctgtagttcccaggcggtcaaggctgcagtgagccataccactgctcgccatccggggcgtaggagtgaaaccctgtgtcaaagaaaaaaaaaaatctaaggaaaaacagactgtccttattttgtggctgcactcaattttcagaaagcagggcggttctcatgttttgtgcatcataaacaagaactggttaatataaaactttggaccataacactggactcaccttgt

SEQ ID NO: 447526 - DNA, 567 bp, Homo sapiens
ctaggctgggcaacatagtgggagcccatctctacaaaaaataaaaataaaaaattagctagatgtggtggcatgcccctgtagcctcagctactcgaggctgaagcaggaggattgcttgagcccaggaggtcaaggctgcagtgagctgtgattgcacgacttcactccagcctgggtgacggagtgaaaaactgtctaaaaagttatgaattacatcatgttgtacaccataagtaaatacaatttttacttattgattaaaaataaggctagacatggttggctcatgcttgtaattccagtgatttgggaggctgaggcaggaggactgcttgaggctgagttcaagactagtctgggcaacatagcaagaccctatctctacaaaaataaaataaattagccaactgtgatggtgcatgcctgtagtcctagctatttgggaggctgagcagggaggactgcttgagcccaggagttgaaggttacaatgatcagccactgcactccagccttggcaacagaatgcgatcctgtctccaaaaattaagtaaatacattttt

SEQ ID NO: 447527 - DNA, 5535 bp, Homo sapiens
cacaacctagtccagagcctcacagtcctactgaacctcctgcatggggcagcagtattgtgaaagttccgtctggtatatttgatgtcaacagcaggaaaagtagcactggtagtatatcaaatgtgctgttttctactcaagatccagttgaagatgcagtctttggcgaagctactaatctcaagaagaatggtgatagaggagaaaaaagacaaaagcattttcctaagacttctctacttcatattgcaagaacccatagctttgagaatgttagctgtcacctacctgatagtaggacttgtatgtctgaaagcacttggaatcctgagcacagatcatctccggtgccagagatgcttgaggaaagccaagaactccttgagcctgtggttgatgacgtacctaaaactactgcaacagtagatacatatgagagtctactaagtgatagtaacagtaatcagtccagagacttgaaaacagtatccaaagatctgaggaataagagaagtagtttatatggtattgctaaggtggttcagagggaagatgttgaaactggactagatcctttgtctcttttagccactgaatgtacaggaggaaaaactcctgattctgaagataagttgttttctccagttattgcacgtaatctggctgatgaaatagaaagctatatgaacctaaaaagtcccctaggtagtaaatcttctagtatggaattacacagagaggaaaacagagagtctggcatgactactgcatttattcatgctctagagaggagatcaagcctacctttagatcatggttcaccagcacaggaaaatcctgaaagtgaaaagagctcacctgcagtgtccaggtctaaaacttttactgggcgtttcaagcagcaaaccccctctcgaactcataaagaacgttcaacttctttgtcagcactggtgcgttcttcgccacatggctcgttgggttctgtagtaaattctttgtcagggctaaagctggataatatactctcagggcccaagatagatgtcctgaaatctggtatgaaacaagcagcgacagtagccagtaagatgtgggtagctgttgcgtctgcctacagctactcagatgatgaggaagaaactaatagagactacagcttcccagctggcctagaagaccatattttgggggagaatatatcgcctaacacaagtatctcagggttggtccccagtgaacttacccagagcaacacaagtcttggcagtagcagcagtagtggagatgtaggaaaactgcattatccaacaggtgaagttccatttccaagaggcatgaaagggcaagactttgaaaaatcagatcatggttcttctcaaaataccagcatgtctagcatctatcagaattgtgcaatggaggttttgatgtccagttgttcacagtgtagagcttgtggagctttagtttatgatgaagaaattatggctggatggacagcagatgactcaaatttgaatacagcttgtccattctgtaaaagcaacttcttgcctcttctcaatatagaattcaaagatttgagaggttctgcaagctttttcctgaaaccaagtacctctggtgacagtttacaaagtggaagcattccattggcaaatgaatccttggagcacaaacctgtatccagtttagcagaacctgacttgatcaactttatggacttcccaaaacataaccagatcataactgaagaaacaggctctgcagttgaaccaagtgatgaaataaagagagccagtggagatgtccaaactatgaaaatttcatctgtgcctaatagtttatcaaagcgaaatgtgtctttgactcgaagtcacagtgttggaggcccattgcagaatattgactttacccagcgaccgtttcatggcatctcaacagttagtcttccaaatagtctgcaggaagttgtggatcctttaggaaaaagacccaatcctccccctgtttctgtgccctacttgagtcctctagtactccgtaaagaacttgaatctttgctagaaaatgaaggtgatcaggtgattcatacatcttctttcatcaatcaacatccaatcattttctggaacctcgtttggtatttcagacgtttggaccttcctagtaacttgccaggacttatcctcacatctgaacattgtaatgaaggtgtacagcttcctctgtcatctctgtcccaggatagcaaacttgtgtatattcagctgttatgggataatatcaaccttcatcaggaaccaagagaacctctgtatgtctcatggaggaattttaattctgaaaagaaatcatctctcctgtcagaggaacaacaagaaacaagcactttagtagaaaccatcaggcagagtattcagcacaataatgttcttaaacccatcaacctactttcacagcaaatgaagccaggcatgaaaagacaaaggagtttatacagagaaatcctcttcttatcattagtgtctctaggaagagagaatattgatattgaggcatttgacaatgaatatggaattgcatacaatagtctgtcttcagagattcttgaaaggttgcagaaaattgatgctccaccaagtgccagtgtcgagtggtgcaggaagtgttttggagcgcctctcatttaaatagagattcactagaatgttgacacacaaggcttggggattagatttcatctggaaacattcaagtttttttttccaaatcgtaagaactggtgaatacggaattgaagtaactcttggggacaatatataatgaattatgattcatattgcattaccttgaaatatgaagtgccatttgaatgtcccagggcttattaatattgaagattttcaacccctgaactgcttttctgcctctgtggaaaactactttgggattcttcagtatttgtagtagtttgatagaaataatgaggaaccatattcattctaggcattgtttatatttgaagttactgagtttgaggaatggcaaattaaatttgcctaacccccaaaacaaatgaaatatctcaattataaaagcaacatggccgggcacggtggctcaggcctgtaatcccagcactttgggaggctgagcaaggtgggtggatcacttgaggccaggagttcgagaccagcctggccaacacggtgagaccctgtctttactaaaaatacaaaaattagccaggcgcaccactgtagtcccagctactcaggctgaggcaggagaatcgcttgaactgaggcagaggctacagtgagtggagatcacgccactgcaactccagcttgggtgacagagtgagaccgtctcaaaaaaaaaaaaaaaaaaaaaagagagcaacatatttgtgtaagtttgtatatgtgtagggctgtgtaggtatgtgtatatacagccatattctaagtgtatatttattaaaatagattgcatgttgcaatacggttttctgaaaggggtctcattgactattaaataaatgactactactaaacttgtctgtagtcattaatcttaaaattacctgaaaatctgatgacagctgccttccctaactttaatgtattaggttggcacaaaattaattgtagtttttgccactattaatggcaaaaaccgcaattatttttgtaccaacataatacacctttcatattatgtattatcttgcttaatgggttttatcttgattatccagttacttccatcctcttcccaatgttaatttgcaatagttttaaaatgggaacaaatgaatcaatcatcagatagttaaaatgaaattaaatcagctgcctaataatttatggaattcattggaatgtgcttaaaatgctaaagtgtatgtcattgaacatgaaatcttttttcaggcacatacattgttggtattgatgactttttaaaacctgtgggataaacttgcactgcacacggaagttttattcttgtatatttagatttgtatgcttgtgagtaaaaatgtgcatttgtaaatactgtgtttttaggttgaatcaattaagtcttaaaactgtaaatttattaagcttgttgccagtaggtttaagaaaatcatgatctcacatgcctcactttgacatttatcatgccttttattaaaaatatcccttaggaacagtaagtttgccttaactctctgcatggtttaaaaagccattggttttgtgtgtgtttacagtaattatgcagatgactaaatgagttgacacagtaaaattacttccatatggtacagtaacaacctaactcccttctacctgatgtaaccatttacaaattatagttattgtaccagtctttcaacatttcagggttaatctgacctatgcagaattctagtgtgaatttattgtgaaaatgctaaatgaaacaatttgtcagaaattatgtacaattttcattaccttcaaaatggatcttttgcactgtctgagagtatatatttttgcaactcaagacttggtactagttttaatacttaacacttactgacccaacagaagtttggaattaccttgcatataaaaattgaggttgaataaaatgaaaaattgttgttttctgttacattaagcctcttgaaatctgtaatctttagaatcccaatattttgttttttccattccttcactcgtaacttgaactcaagttttcacttactgacgcgcttcccattaaaaaaaatctgtaaagatctctaccttgaaaactttagtctgctgctgccatttagatattgggactgatttcttgttataaatttttaaaggctttttccaatacccaccacagagagggtaccactaaaaatttacaagacaaaaacattattatggaaagatttagaagtacctggaatgacttgtagcactgtatgcaactttaatcctgataacttctaaaagcaatctttcaaattagtccagattactcagcagtaccttatattggtttggggttcgatagcgatttttttttcttccaacgaacgaattgtacaggttgatcacaacctgcatagttaacgacatgtcagaatgacttgcgtgtgtgtggagaactgggtatggtggctcacgcctgtagtaatctcaacactttgggatgccaaggcaggcggatcacttgagcccaggagttcaagagtagcctgggtaacatagcaaaactctacaaaaagcacaaaaactagccgcagtgcacacctgtagttcccaggcggtcaaggctgcagtgagccataccactgctcgccatccggggcgtaggagtgaaaccctgtgtcaaagaaaaaaaaaaatctaaggaaaaacagactgtccttattttgtggctgcactcaattttcagaaagcagggcggttctcatgttttgtgcatcataaacaagaactggttaatataaaactttggaccataacactggactcaccttgt

SEQ ID NO: 447528 - DNA, 5751 bp, Homo sapiens
cacaacctagtccagagcctcacagtcctactgaacctcctgcatggggcagcagtattgtgaaagttccgtctggtatatttgatgtcaacagcaggaaaagtagcactggtagtatatcaaatgtgctgttttctactcaagatccagttgaagatgcagtctttggcgaagctactaatctcaagaagaatggtgatagaggagaaaaaagacaaaagcattttcctaagacttctctacttcatattgcaagaacccatagctttgagaatgttagctgtcacctacctgatagtaggacttgtatgtctgaaagcacttggaatcctgagcacagatcatctccggtgccagagatgcttgaggaaagccaagaactccttgagcctgtggttgatgacgtacctaaaactactgcaacagtagatacatatgagagtctactaagtgatagtaacagtaatcagtccagagacttgaaaacagtatccaaagatctgaggaataagagaagtagtttatatggtattgctaaggtggttcagagggaagatgttgaaactggactagatcctttgtctcttttagccactgaatgtacaggaggaaaaactcctgattctgaagataagttgttttctccagttattgcacgtaatctggctgatgaaatagaaagctatatgaacctaaaaagtcccctaggtagtaaatcttctagtatggaattacacagagaggaaaacagagagtctggcatgactactgcatttattcatgctctagagaggagatcaagcctacctttagatcatggttcaccagcacaggaaaatcctgaaagtgaaaagagctcacctgcagtgtccaggtctaaaacttttactgggcgtttcaagcagcaaaccccctctcgaactcataaagaacgttcaacttctttgtcagcactggtgcgttcttcgccacatggctcgttgggttctgtagtaaattctttgtcagggctaaagctggataatatactctcagggcccaagatagatgtcctgaaatctggtatgaaacaagcagcgacagtagccagtaagatgtgggtagctgttgcgtctgcctacagctactcagatgatgaggaagaaactaatagagactacagcttcccagctggcctagaagaccatattttgggggagaatatatcgcctaacacaagtatctcagggttggtccccagtgaacttacccagagcaacacaagtcttggcagtagcagcagtagtggagatgtaggaaaactgcattatccaacaggtgaagttccatttccaagaggcatgaaagggcaagactttgaaaaatcagatcatggttcttctcaaaataccagcatgtctagcatctatcagaattgtgcaatggaggttttgatgtccagttgttcacagtgtagagcttgtggagctttagtttatgatgaagaaattatggctggatggacagcagatgactcaaatttgaatacagcttgtccattctgtaaaagcaacttcttgcctcttctcaatatagaattcaaagatttgagaggttctgcaagctttttcctgaaaccaagtacctctggtgacagtttacaaagtggaagcattccattggcaaatgaatccttggagcacaaacctgtatccagtttagcagaacctgacttgatcaactttatggacttcccaaaacataaccagatcataactgaagaaacaggctctgcagttgaaccaagtgatgaaataaagagagccagtggagatgtccaaactatgaaaatttcatctgtgcctaatagtttatcaaagcgaaatgtgtctttgactcgaagtcacagtgttggaggcccattgcagaatattgactttacccagcgaccgtttcatggcatctcaacagttagtcttccaaatagtctgcaggaagttgtggatcctttaggaaaaagacccaatcctccccctgtttctgtgccctacttgagtcctctagtactccgtaaagaacttgaatctttgctagaaaatgaaggtgatcaggtgattcatacatcttctttcatcaatcaacatccaatcattttctggaacctcgtttggtatttcagacgtttggaccttcctagtaacttgccaggacttatcctcacatctgaacattgtaatgaaggtgtacagcttcctctgtcatctctgtcccaggatagcaaacttgtgtatattcagctgttatgggataatatcaaccttcatcaggaaccaagagaacctctgtatgtctcatggaggaattttaattctgaaaagaaatcatctctcctgtcagaggaacaacaagaaacaagcactttagtagaaaccatcaggcagagtattcagcacaataatgttcttaaacccatcaacctactttcacagcaaatgaagccaggcatgaaaagacaaaggagtttatacagagaaatcctcttcttatcattagtgtctctaggaagagagaatattgatattggtaagttggttaataaaagattatgaaaggaagttttacattttattttcaaaagtaatttttaaaaatgtagctggtatgtataaaagatttaaaagatttctacttctaaatatatagttcaaatacatataatttgactcaataccaatttgaaatgaacggctgttgtctttcttaacaaattacaacttcatttttgaaaatttctttcagaggcatttgacaatgaatatggaattgcatacaatagtctgtcttcagagattcttgaaaggttgcagaaaattgatgctccaccaagtgccagtgtcgagtggtgcaggaagtgttttggagcgcctctcatttaaatagagattcactagaatgttgacacacaaggcttggggattagatttcatctggaaacattcaagtttttttttccaaatcgtaagaactggtgaatacggaattgaagtaactcttggggacaatatataatgaattatgattcatattgcattaccttgaaatatgaagtgccatttgaatgtcccagggcttattaatattgaagattttcaacccctgaactgcttttctgcctctgtggaaaactactttgggattcttcagtatttgtagtagtttgatagaaataatgaggaaccatattcattctaggcattgtttatatttgaagttactgagtttgaggaatggcaaattaaatttgcctaacccccaaaacaaatgaaatatctcaattataaaagcaacatggccgggcacggtggctcaggcctgtaatcccagcactttgggaggctgagcaaggtgggtggatcacttgaggccaggagttcgagaccagcctggccaacacggtgagaccctgtctttactaaaaatacaaaaattagccaggcgcaccactgtagtcccagctactcaggctgaggcaggagaatcgcttgaactgaggcagaggctacagtgagtggagatcacgccactgcaactccagcttgggtgacagagtgagaccgtctcaaaaaaaaaaaaaaaaaaaaaagagagcaacatatttgtgtaagtttgtatatgtgtagggctgtgtaggtatgtgtatatacagccatattctaagtgtatatttattaaaatagattgcatgttgcaatacggttttctgaaaggggtctcattgactattaaataaatgactactactaaacttgtctgtagtcattaatcttaaaattacctgaaaatctgatgacagctgccttccctaactttaatgtattaggttggcacaaaattaattgtagtttttgccactattaatggcaaaaaccgcaattatttttgtaccaacataatacacctttcatattatgtattatcttgcttaatgggttttatcttgattatccagttacttccatcctcttcccaatgttaatttgcaatagttttaaaatgggaacaaatgaatcaatcatcagatagttaaaatgaaattaaatcagctgcctaataatttatggaattcattggaatgtgcttaaaatgctaaagtgtatgtcattgaacatgaaatcttttttcaggcacatacattgttggtattgatgactttttaaaacctgtgggataaacttgcactgcacacggaagttttattcttgtatatttagatttgtatgcttgtgagtaaaaatgtgcatttgtaaatactgtgtttttaggttgaatcaattaagtcttaaaactgtaaatttattaagcttgttgccagtaggtttaagaaaatcatgatctcacatgcctcactttgacatttatcatgccttttattaaaaatatcccttaggaacagtaagtttgccttaactctctgcatggtttaaaaagccattggttttgtgtgtgtttacagtaattatgcagatgactaaatgagttgacacagtaaaattacttccatatggtacagtaacaacctaactcccttctacctgatgtaaccatttacaaattatagttattgtaccagtctttcaacatttcagggttaatctgacctatgcagaattctagtgtgaatttattgtgaaaatgctaaatgaaacaatttgtcagaaattatgtacaattttcattaccttcaaaatggatcttttgcactgtctgagagtatatatttttgcaactcaagacttggtactagttttaatacttaacacttactgacccaacagaagtttggaattaccttgcatataaaaattgaggttgaataaaatgaaaaattgttgttttctgttacattaagcctcttgaaatctgtaatctttagaatcccaatattttgttttttccattccttcactcgtaacttgaactcaagttttcacttactgacgcgcttcccattaaaaaaaatctgtaaagatctctaccttgaaaactttagtctgctgctgccatttagatattgggactgatttcttgttataaatttttaaaggctttttccaatacccaccacagagagggtaccactaaaaatttacaagacaaaaacattattatggaaagatttagaagtacctggaatgacttgtagcactgtatgcaactttaatcctgataacttctaaaagcaatctttcaaattagtccagattactcagcagtaccttatattggtttggggttcgatagcgatttttttttcttccaacgaacgaattgtacaggttgatcacaacctgcatagttaacgacatgtcagaatgacttgcgtgtgtgtggagaactgggtatggtggctcacgcctgtagtaatctcaacactttgggatgccaaggcaggcggatcacttgagcccaggagttcaagagtagcctgggtaacatagcaaaactctacaaaaagcacaaaaactagccgcagtgcacacctgtagttcccaggcggtcaaggctgcagtgagccataccactgctcgccatccggggcgtaggagtgaaaccctgtgtcaaagaaaaaaaaaaatctaaggaaaaacagactgtccttattttgtggctgcactcaattttcagaaagcagggcggttctcatgttttgtgcatcataaacaagaactggttaatataaaactttggaccataacactggactcaccttgt

SEQ ID NO: 447529 - DNA, 3939 bp, Homo sapiens
agcttctaaagaaagtgataccaagtgtcactagaatcagccttacgtcttttttttctctgtacatcagtgcatttcttaagttttcctgtcatctttaacaactgagtcatgaagctcacttttagtgtttcatttgtaacattttaatgctcacaaaccaaataaaggtgaactgtcctttgctattgggttaaatagtaaagagaccacaccaccttttacattgtttgtgtcaagggttttagacccctaacttacttagaaattaatctgttactttgtcaagtgacaaaagatgagagaagactctgcttttgtaaattttatttagaaattagagttaaaacagttatgtattgttgaaatgtaataaagttaagccatttttgttactagtgtgaagctttatgcccattaactatgttttaactttaatttggaatagaaacctgcaggaagttacaaaaatagtacagaattcaatgtagccttcacacagcttcctccaaatgtgacacctcatataactaactgtaatgtaatattaaaaccaggacattgacatagttatattactattaactagatgacagaacttaatgtcttcaccattaaaaaaaatgcatctgtgtttttatgctatttgcccattgacttttaaaacatatttgttttataggaggagtttatacagagaaatcctcttcttatcattagtgtctctaggaagagagaatattgatattggtaagttggttaataaaagattatgaaaggaagttttacattttattttcaaaagtaatttttaaaaatgtagctggtatgtataaaagatttaaaagatttctacttctaaatatatagttcaaatacatataatttgactcaataccaatttgaaatgaacggctgttgtctttcttaacaaattacaacttcatttttgaaaatttctttcagaggcatttgacaatgaatatggaattgcatacaatagtctgtcttcagagattcttgaaaggttgcagaaaattgatgctccaccaagtgccagtgtcgagtggtgcaggaagtgttttggagcgcctctcatttaaatagagattcactagaatgttgacacacaaggcttggggattagatttcatctggaaacattcaagtttttttttccaaatcgtaagaactggtgaatacggaattgaagtaactcttggggacaatatataatgaattatgattcatattgcattaccttgaaatatgaagtgccatttgaatgtcccagggcttattaatattgaagattttcaacccctgaactgcttttctgcctctgtggaaaactactttgggattcttcagtatttgtagtagtttgatagaaataatgaggaaccatattcattctaggcattgtttatatttgaagttactgagtttgaggaatggcaaattaaatttgcctaacccccaaaacaaatgaaatatctcaattataaaagcaacatggccgggcacggtggctcaggcctgtaatcccagcactttgggaggctgagcaaggtgggtggatcacttgaggccaggagttcgagaccagcctggccaacacggtgagaccctgtctttactaaaaatacaaaaattagccaggcgcaccactgtagtcccagctactcaggctgaggcaggagaatcgcttgaactgaggcagaggctacagtgagtggagatcacgccactgcaactccagcttgggtgacagagtgagaccgtctcaaaaaaaaaaaaaaaaaaaaaagagagcaacatatttgtgtaagtttgtatatgtgtagggctgtgtaggtatgtgtatatacagccatattctaagtgtatatttattaaaatagattgcatgttgcaatacggttttctgaaaggggtctcattgactattaaataaatgactactactaaacttgtctgtagtcattaatcttaaaattacctgaaaatctgatgacagctgccttccctaactttaatgtattaggttggcacaaaattaattgtagtttttgccactattaatggcaaaaaccgcaattatttttgtaccaacataatacacctttcatattatgtattatcttgcttaatgggttttatcttgattatccagttacttccatcctcttcccaatgttaatttgcaatagttttaaaatgggaacaaatgaatcaatcatcagatagttaaaatgaaattaaatcagctgcctaataatttatggaattcattggaatgtgcttaaaatgctaaagtgtatgtcattgaacatgaaatcttttttcaggcacatacattgttggtattgatgactttttaaaacctgtgggataaacttgcactgcacacggaagttttattcttgtatatttagatttgtatgcttgtgagtaaaaatgtgcatttgtaaatactgtgtttttaggttgaatcaattaagtcttaaaactgtaaatttattaagcttgttgccagtaggtttaagaaaatcatgatctcacatgcctcactttgacatttatcatgccttttattaaaaatatcccttaggaacagtaagtttgccttaactctctgcatggtttaaaaagccattggttttgtgtgtgtttacagtaattatgcagatgactaaatgagttgacacagtaaaattacttccatatggtacagtaacaacctaactcccttctacctgatgtaaccatttacaaattatagttattgtaccagtctttcaacatttcagggttaatctgacctatgcagaattctagtgtgaatttattgtgaaaatgctaaatgaaacaatttgtcagaaattatgtacaattttcattaccttcaaaatggatcttttgcactgtctgagagtatatatttttgcaactcaagacttggtactagttttaatacttaacacttactgacccaacagaagtttggaattaccttgcatataaaaattgaggttgaataaaatgaaaaattgttgttttctgttacattaagcctcttgaaatctgtaatctttagaatcccaatattttgttttttccattccttcactcgtaacttgaactcaagttttcacttactgacgcgcttcccattaaaaaaaatctgtaaagatctctaccttgaaaactttagtctgctgctgccatttagatattgggactgatttcttgttataaatttttaaaggctttttccaatacccaccacagagagggtaccactaaaaatttacaagacaaaaacattattatggaaagatttagaagtacctggaatgacttgtagcactgtatgcaactttaatcctgataacttctaaaagcaatctttcaaattagtccagattactcagcagtaccttatattggtttggggttcgatagcgatttttttttcttccaacgaacgaattgtacaggttgatcacaacctgcatagttaacgacatgtcagaatgacttgcgtgtgtgtggagaactgggtatggtggctcacgcctgtagtaatctcaacactttgggatgccaaggcaggcggatcacttgagcccaggagttcaagagtagcctgggtaacatagcaaaactctacaaaaagcacaaaaactagccgcagtgcacacctgtagttcccaggcggtcaaggctgcagtgagccataccactgctcgccatccggggcgtaggagtgaaaccctgtgtcaaagaaaaaaaaaaatctaaggaaaaacagactgtccttattttgtggctgcactcaattttcagaaagcagggcggttctcatgttttgtgcatcataaacaagaactggttaatataaaactttggaccataacactggactcaccttgt

SEQ ID NO: 447530 - DNA, 2703 bp, Homo sapiens
ctaggctgggcaacatagtgggagcccatctctacaaaaaataaaaataaaaaattagctagatgtggtggcatgcccctgtagcctcagctactcgaggctgaagcaggaggattgcttgagcccaggaggtcaaggctgcagtgagctgtgattgcacgacttcactccagcctgggtgacggagtgaaaaactgtctaaaaagttatgaattacatcatgttgtacaccataagtaaatacaatttttacttattgattaaaaataaggctagacatggttggctcatgcttgtaattccagtgatttgggaggctgaggcaggaggactgcttgaggctgagttcaagactagtctgggcaacatagcaagaccctatctctacaaaaataaaataaattagccaactgtgatggtgcatgcctgtagtcctagctatttgggaggctgaggtgggaggatcacttgagcctgggagacgaaggttgcagtgagccatgatcacatcactgcactccagcctgggtaacagagtgagatgttcgtctcaaaaaaaaaaaaaaaaaaaaaagagagcaacatatttgtgtaagtttgtatatgtgtagggctgtgtaggtatgtgtatatacagccatattctaagtgtatatttattaaaatagattgcatgttgcaatacggttttctgaaaggggtctcattgactattaaataaatgactactactaaacttgtctgtagtcattaatcttaaaattacctgaaaatctgatgacagctgccttccctaactttaatgtattaggttggcacaaaattaattgtagtttttgccactattaatggcaaaaaccgcaattatttttgtaccaacataatacacctttcatattatgtattatcttgcttaatgggttttatcttgattatccagttacttccatcctcttcccaatgttaatttgcaatagttttaaaatgggaacaaatgaatcaatcatcagatagttaaaatgaaattaaatcagctgcctaataatttatggaattcattggaatgtgcttaaaatgctaaagtgtatgtcattgaacatgaaatcttttttcaggcacatacattgttggtattgatgactttttaaaacctgtgggataaacttgcactgcacacggaagttttattcttgtatatttagatttgtatgcttgtgagtaaaaatgtgcatttgtaaatactgtgtttttaggttgaatcaattaagtcttaaaactgtaaatttattaagcttgttgccagtaggtttaagaaaatcatgatctcacatgcctcactttgacatttatcatgccttttattaaaaatatcccttaggaacagtaagtttgccttaactctctgcatggtttaaaaagccattggttttgtgtgtgtttacagtaattatgcagatgactaaatgagttgacacagtaaaattacttccatatggtacagtaacaacctaactcccttctacctgatgtaaccatttacaaattatagttattgtaccagtctttcaacatttcagggttaatctgacctatgcagaattctagtgtgaatttattgtgaaaatgctaaatgaaacaatttgtcagaaattatgtacaattttcattaccttcaaaatggatcttttgcactgtctgagagtatatatttttgcaactcaagacttggtactagttttaatacttaacacttactgacccaacagaagtttggaattaccttgcatataaaaattgaggttgaataaaatgaaaaattgttgttttctgttacattaagcctcttgaaatctgtaatctttagaatcccaatattttgttttttccattccttcactcgtaacttgaactcaagttttcacttactgacgcgcttcccattaaaaaaaatctgtaaagatctctaccttgaaaactttagtctgctgctgccatttagatattgggactgatttcttgttataaatttttaaaggctttttccaatacccaccacagagagggtaccactaaaaatttacaagacaaaaacattattatggaaagatttagaagtacctggaatgacttgtagcactgtatgcaactttaatcctgataacttctaaaagcaatctttcaaattagtccagattactcagcagtaccttatattggtttggggttcgatagcgatttttttttcttccaacgaacgaattgtacaggttgatcacaacctgcatagttaacgacatgtcagaatgacttgcgtgtgtgtggagaactgggtatggtggctcacgcctgtagtaatctcaacactttgggatgccaaggcaggcggatcacttgagcccaggagttcaagagtagcctgggtaacatagcaaaactctacaaaaagcacaaaaactagccgcagtgcacacctgtagttcccaggcggtcaaggctgcagtgagccataccactgctcgccatccggggcgtaggagtgaaaccctgtgtcaaagaaaaaaaaaaatctaaggaaaaacagactgtccttattttgtggctgcactcaattttcagaaagcagggcggttctcatgttttgtgcatcataaacaagaactggttaatataaaactttggaccataacactggactcaccttgt

SEQ ID NO: 447531 - DNA, 1792 bp, Homo sapiens
ctccgaggatccccgacgagttgtccgagttacttccatcctcttcccaatgttaatttgcaatagttttaaaatgggaacaaatgaatcaatcatcagatagttaaaatgaaattaaatcagctgcctaataatttatggaattcattggaatgtgcttaaaatgctaaagtgtatgtcattgaacatgaaatcttttttcaggcacatacattgttggtattgatgactttttaaaacctgtgggataaacttgcactgcacacggaagttttattcttgtatatttagatttgtatgcttgtgagtaaaaatgtgcatttgtaaatactgtgtttttaggttgaatcaattaagtcttaaaactgtaaatttattaagcttgttgccagtaggtttaagaaaatcatgatctcacatgcctcactttgacatttatcatgccttttattaaaaatatcccttaggaacagtaagtttgccttaactctctgcatggtttaaaaagccattggttttgtgtgtgtttacagtaattatgcagatgactaaatgagttgacacagtaaaattacttccatatggtacagtaacaacctaactcccttctacctgatgtaaccatttacaaattatagttattgtaccagtctttcaacatttcagggttaatctgacctatgcagaattctagtgtgaatttattgtgaaaatgctaaatgaaacaatttgtcagaaattatgtacaattttcattaccttcaaaatggatcttttgcactgtctgagagtatatatttttgcaactcaagacttggtactagttttaatacttaacacttactgacccaacagaagtttggaattaccttgcatataaaaattgaggttgaataaaatgaaaaattgttgttttctgttacattaagcctcttgaaatctgtaatctttagaatcccaatattttgttttttccattccttcactcgtaacttgaactcaagttttcacttactgacgcgcttcccattaaaaaaaatctgtaaagatctctaccttgaaaactttagtctgctgctgccatttagatattgggactgatttcttgttataaatttttaaaggctttttccaatacccaccacagagagggtaccactaaaaatttacaagacaaaaacattattatggaaagatttagaagtacctggaatgacttgtagcactgtatgcaactttaatcctgataacttctaaaagcaatctttcaaattagtccagattactcagcagtaccttatattggtttggggttcgatagcgatttttttttcttccaacgaacgaattgtacaggttgatcacaacctgcatagttaacgacatgtcagaatgacttgcgtgtgtgtggagaactgggtatggtggctcacgcctgtagtaatctcaacactttgggatgccaaggcaggcggatcacttgagcccaggagttcaagagtagcctgggtaacatagcaaaactctacaaaaagcacaaaaactagccgcagtgcacacctgtagttcccaggcggtcaaggctgcagtgagccataccactgctcgccatccggggcgtaggagtgaaaccctgtgtcaaagaaaaaaaaaaatctaaggaaaaacagactgtccttattttgtggctgcactcaattttcagaaagcagggcggttctcatgttttgtgcatcataaacaagaactggttaatataaaactttggaccataacactggactcaccttgt

SEQ ID NO: 447532 - DNA, 2321 bp, Homo sapiens
  misc_feature (2276)..(2276): n is a, c, g, or t
cacaacctagtccagagcctcacagtcctactgaacctcctgcatggggcagcagtattgtgaaagttccgtctggtatatttgatgtcaacagcaggaaaagtagcactggtagtatatcaaatgtgctgttttctactcaagatccagttgaagatgcagtctttggcgaagctactaatctcaagaagaatggtgatagaggagaaaaaagacaaaagcattttcctaagacttctctacttcatattgcaagaacccatagctttgagaatgttagctgtcacctacctgatagtaggacttgtatgtctgaaagcacttggaatcctgagcacagatcatctccggtgccagagatgcttgaggaaagccaagaactccttgagcctgtggttgatgacgtacctaaaactactgcaacagtagatacatatgagagtctactaagtgatagtaacagtaatcagtccagagacttgaaaacagtatccaaagatctgaggaataagagaagtagtttatatggtattgctaaggtggttcagagggaagatgttgaaactggactagatcctttgtctcttttagccactgaatgtacaggaggaaaaactcctgattctgaagataagttgttttctccagttattgcacgtaatctggctgatgaaatagaaagctatatgaacctaaaaagtcccctaggtagtaaatcttctagtatggaattacacagagaggaaaacagagagtctggcatgactactgcatttattcatgctctagagaggagatcaagcctacctttagatcatggttcaccagcacaggaaaatcctgaaagtgaaaagagctcacctgcagtgtccaggtctaaaacttttactgggcgtttcaagcagcaaaccccctctcgaactcataaagaacgttcaacttctttgtcagcactggtgcgttcttcgccacatggctcgttgggttctgtagtaaattctttgtcagggctaaagctggataatatactctcagggcccaagatagatgtcctgaaatctggtatgaaacaagcagcgacagtagccagtaagatgtgggtagctgttgcgtctgcctacagctactcagatgatgaggaagaaactaatagagactacagcttcccagctggcctagaagaccatattttgggggagaatatatcgcctaacacaagtatctcagggttggtccccagtgaacttacccagagcaacacaagtcttggcagtagcagcagtagtggagatgtaggaaaactgcattatccaacaggtgaagttccatttccaagaggcatgaaagggcaagactttgaaaaatcagatcatggttcttctcaaaataccagcatgtctagcatctatcagaattgtgcaatggaggttttgatgtccagttgttcacagtgtagagcttgtggagctttagtttatgatgaagaaattatggctggatggacagcagatgactcaaatttgaatacagcttgtccattctgtaaaagcaacttcttgcctcttctcaatatagaattcaaagatttgagaggttctgcaagctttttcctgaaaccaagtacctctggtgacagtttacaaagtggaagcattccattggcaaatgaatccttggagcacaaacctgtatccagtttagcagaacctgacttgatcaactttatggacttcccaaaacataaccagatcataactgaagaaacaggctctgcagttgaaccaagtgatgaaataaagagagccagtggagatgtccaaactatgaaaatttcatctgtgcctaatagtttatcaaagcgaaatgtgtctttgactcgaagtcacagtgttggaggcccattgcagaatattgactttacccagcgaccgtttcatggcatctcaacagttagtcttccaaatagtctgcaggaagttgtggatcctttaggaaaaagacccaatcctccccctgtttctgtgccctacttgagtcctctagtactccgtaaagaacttgaatctttgctagaaaatgaaggtgatcaggtgattcatacatcttctttcatcaatcaacatccaatcattttctggaacctcgtttggtatttcagacgtttggaccttcctagtaacttgccaggacttatcctcacatctgaacattgtaatgaaggtgtacagcttcctctgtcatctctgtcccaggatagcaccggtgtgtatacccgngctgttgtaactggagctgttgaactggagctgtgtaaatggagg

SEQ ID NO: 447533 - DNA, 773 bp, Homo sapiens
  misc_feature (728)..(728): n is a, c, g, or t
agaagtctgtacctgcttcaaatgcaatagcatataaggctggtttaatttttagatatccagaagaggactatgagtcatttccactctcagaatcagatgtacctcttttctgccttcctatgggagctactattgagtgctgggatcctgaaaccaaatatccacttcccgttttttcaacttttgtcttgacaggttcttcagccaaaaaggtatatggagctgccattcagttttatgaaccttactctcgggaacttctatcagagaaacagcttatgcacctgggcttgttgacgcctgtggagagaaaaatggtctccaaatccatcaatacaaacaaatgcatttgtttactctcacactggcctttttttgaagcttttaggaaatttcttatgtttatctacaaactttctgtgtctggaccacatcctcttcccattgaaaagcacatttcacattttatgcaaaacatcccttttccttcaccacaaagaccgagaatccttgtccagctgtcagtccatgatgcattaatattatcacagccagtttctacacctttaccactaagtggagccaactttagcaccttgctaatgaatctgggtcctgagaattgtgcaacactgctgctctttgttttacttgagagtaaaattctgctgcattctcttaggccagctgtcttgactggggtagctgaagctgttgtagctggngctgttgtaactggagctgttgaactggagctgtgtaaatggagg

SEQ ID NO: 447534 - DNA, 412 bp, Homo sapiens
ggaggcagattgcttgagcccaggagtttgagaccaacctgggcaacctggtgagaccctatctctacaaaaaatacaaaaattagctgggcatggtggcatacatctgtagtcccagctatttgggagattgagggtgggaggatcacttgagcctgggagacgaaggttgcagtgagccatgatcacatcactgcactccagcctgggtaacagagtgagatgttgtctcaaaaaaaaaaaaataataataataataatagtaataattgaaaaaaaacttactgtgttcttattgttagattctgaaaagaaatcatctctcctgtcagaggaacaacaagaaacaagcactttagtagaaaccatcaggcagagtattcagcacaataatgttcttaaacccatcaac

SEQ ID NO: 447535 - DNA, 4855 bp, Homo sapiens
agaagtctgtacctgcttcaaatgcaatagcatataaggctggtttaatttttagatatccagaagaggactatgagtcatttccactctcagaatcagatgtacctcttttctgccttcctatgggagctactattgagtgctgggatcctgaaaccaaatatccacttcccgttttttcaacttttgtcttgacaggttcttcagccaaaaaggtatatggagctgccattcagttttatgaaccttactctcgggaacttctatcagagaaacagcttatgcacctgggcttgttgacgcctgtggagagaaaaatggtctccaaatccatcaatacaaacaaatgcatttgtttactctcacactggcctttttttgaagcttttaggaaatttcttatgtttatctacaaactttctgtgtctggaccacatcctcttcccattgaaaagcacatttcacattttatgcaaaacatcccttttccttcaccacaaagaccatattttgggggagaatatatcgcctaacacaagtatctcagggttggtccccagtgaacttacccagagcaacacaagtcttggcagtagcagcagtagtggagatgtaggaaaactgcattatccaacaggtgaagttccatttccaagaggcatgaaagggcaagactttgaaaaatcagatcatggttcttctcaaaataccagcatgtctagcatctatcagaattgtgcaatggaggttttgatgtccagttgttcacagtgtagagcttgtggagctttagtttatgatgaagaaattatggctggatggacagcagatgactcaaatttgaatacagcttgtccattctgtaaaagcaacttcttgcctcttctcaatatagaattcaaagatttgagaggttctgcaagctttttcctgaaaccaagtacctctggtgacagtttacaaagtggaagcattccattggcaaatgaatccttggagcacaaacctgtatccagtttagcagaacctgacttgatcaactttatggacttcccaaaacataaccagatcataactgaagaaacaggctctgcagttgaaccaagtgatgaaataaagagagccagtggagatgtccaaactatgaaaatttcatctgtgcctaatagtttatcaaagcgaaatgtgtctttgactcgaagtcacagtgttggaggcccattgcagaatattgactttacccagcgaccgtttcatggcatctcaacagttagtcttccaaatagtctgcaggaagttgtggatcctttaggaaaaagacccaatcctccccctgtttctgtgccctacttgagtcctctagtactccgtaaagaacttgaatctttgctagaaaatgaaggtgatcaggtgattcatacatcttctttcatcaatcaacatccaatcattttctggaacctcgtttggtatttcagacgtttggaccttcctagtaacttgccaggacttatcctcacatctgaacattgtaatgaaggtgtacagcttcctctgtcatctctgtcccaggatagcaaacttgtgtatattcagctgttatgggataatatcaaccttcatcaggaaccaagagaacctctgtatgtctcatggaggaattttaattctgaaaagaaatcatctctcctgtcagaggaacaacaagaaacaagcactttagtagaaaccatcaggcagagtattcagcacaataatgttcttaaacccatcaacctactttcacagcaaatgaagccaggcatgaaaagacaaaggagtttatacagagaaatcctcttcttatcattagtgtctctaggaagagagaatattgatattgaggcatttgacaatgaatatggaattgcatacaatagtctgtcttcagagattcttgaaaggttgcagaaaattgatgctccaccaagtgccagtgtcgagtggtgcaggaagtgttttggagcgcctctcatttaaatagagattcactagaatgttgacacacaaggcttggggattagatttcatctggaaacattcaagtttttttttccaaatcgtaagaactggtgaatacggaattgaagtaactcttggggacaatatataatgaattatgattcatattgcattaccttgaaatatgaagtgccatttgaatgtcccagggcttattaatattgaagattttcaacccctgaactgcttttctgcctctgtggaaaactactttgggattcttcagtatttgtagtagtttgatagaaataatgaggaaccatattcattctaggcattgtttatatttgaagttactgagtttgaggaatggcaaattaaatttgcctaacccccaaaacaaatgaaatatctcaattataaaagcaacatggccgggcacggtggctcaggcctgtaatcccagcactttgggaggctgagcaaggtgggtggatcacttgaggccaggagttcgagaccagcctggccaacacggtgagaccctgtctttactaaaaatacaaaaattagccaggcgcaccactgtagtcccagctactcaggctgaggcaggagaatcgcttgaactgaggcagaggctacagtgagtggagatcacgccactgcaactccagcttgggtgacagagtgagaccgtctcaaaaaaaaaaaaaaaaaaaaaagagagcaacatatttgtgtaagtttgtatatgtgtagggctgtgtaggtatgtgtatatacagccatattctaagtgtatatttattaaaatagattgcatgttgcaatacggttttctgaaaggggtctcattgactattaaataaatgactactactaaacttgtctgtagtcattaatcttaaaattacctgaaaatctgatgacagctgccttccctaactttaatgtattaggttggcacaaaattaattgtagtttttgccactattaatggcaaaaaccgcaattatttttgtaccaacataatacacctttcatattatgtattatcttgcttaatgggttttatcttgattatccagttacttccatcctcttcccaatgttaatttgcaatagttttaaaatgggaacaaatgaatcaatcatcagatagttaaaatgaaattaaatcagctgcctaataatttatggaattcattggaatgtgcttaaaatgctaaagtgtatgtcattgaacatgaaatcttttttcaggcacatacattgttggtattgatgactttttaaaacctgtgggataaacttgcactgcacacggaagttttattcttgtatatttagatttgtatgcttgtgagtaaaaatgtgcatttgtaaatactgtgtttttaggttgaatcaattaagtcttaaaactgtaaatttattaagcttgttgccagtaggtttaagaaaatcatgatctcacatgcctcactttgacatttatcatgccttttattaaaaatatcccttaggaacagtaagtttgccttaactctctgcatggtttaaaaagccattggttttgtgtgtgtttacagtaattatgcagatgactaaatgagttgacacagtaaaattacttccatatggtacagtaacaacctaactcccttctacctgatgtaaccatttacaaattatagttattgtaccagtctttcaacatttcagggttaatctgacctatgcagaattctagtgtgaatttattgtgaaaatgctaaatgaaacaatttgtcagaaattatgtacaattttcattaccttcaaaatggatcttttgcactgtctgagagtatatatttttgcaactcaagacttggtactagttttaatacttaacacttactgacccaacagaagtttggaattaccttgcatataaaaattgaggttgaataaaatgaaaaattgttgttttctgttacattaagcctcttgaaatctgtaatctttagaatcccaatattttgttttttccattccttcactcgtaacttgaactcaagttttcacttactgacgcgcttcccattaaaaaaaatctgtaaagatctctaccttgaaaactttagtctgctgctgccatttagatattgggactgatttcttgttataaatttttaaaggctttttccaatacccaccacagagagggtaccactaaaaatttacaagacaaaaacattattatggaaagatttagaagtacctggaatgacttgtagcactgtatgcaactttaatcctgataacttctaaaagcaatctttcaaattagtccagattactcagcagtaccttatattggtttggggttcgatagcgatttttttttcttccaacgaacgaattgtacaggttgatcacaacctgcatagttaacgacatgtcagaatgacttgcgtgtgtgtggagaactgggtatggtggctcacgcctgtagtaatctcaacactttgggatgccaaggcaggcggatcacttgagcccaggagttcaagagtagcctgggtaacatagcaaaactctacaaaaagcacaaaaactagccgcagtgcacacctgtagttcccaggcggtcaaggctgcagtgagccataccactgctcgccatccggggcgtaggagtgaaaccctgtgtcaaagaaaaaaaaaaatctaaggaaaaacagactgtccttattttgtggctgcactcaattttcagaaagcagggcggttctcatgttttgtgcatcataaacaagaactggttaatataaaactttggaccataacactggactcaccttgt

SEQ ID NO: 447536 - DNA, 5608 bp, Homo sapiens
cacaacctagtccagagcctcacagtcctactgaacctcctgcatggggcagcagtattgtgaaagttccgtctggtatatttgatgtcaacagcaggaaaagtagcactggtagtatatcaaatgtgctgttttctactcaagatccagttgaagatgcagtctttggcgaagctactaatctcaagaagaatggtgatagaggagaaaaaagacaaaagcattttcctgagaggagttgtagttttagttctgaaagtcgagcaggaatgttgcttaagaagagtagtttggattcgaattcaagtgaaatggctatcatgatgggagcagatgccaagattctcacagcagcattgacatgtcctaagacttctctacttcatattgcaagaacccatagctttgagaatgttagctgtcacctacctgatagtaggacttgtatgtctgaaagcacttggaatcctgagcacagatcatctccggtgccagagatgcttgaggaaagccaagaactccttgagcctgtggttgatgacgtacctaaaactactgcaacagtagatacatatgagagtctactaagtgatagtaacagtaatcagtccagagacttgaaaacagtatccaaagatctgaggaataagagaagtagtttatatggtattgctaaggtggttcagagggaagatgttgaaactggactagatcctttgtctcttttagccactgaatgtacaggaggaaaaactcctgattctgaagataagttgttttctccagttattgcacgtaatctggctgatgaaatagaaagctatatgaacctaaaaagtcccctaggtagtaaatcttctagtatggaattacacagagaggaaaacagagagtctggcatgactactgcatttattcatgctctagagaggagatcaagcctacctttagatcatggttcaccagcacaggaaaatcctgaaagtgaaaagagctcacctgcagtgtccaggtctaaaacttttactgggcgtttcaagcagcaaaccccctctcgaactcataaagaacgttcaacttctttgtcagcactggtgcgttcttcgccacatggctcgttgggttctgtagtaaattctttgtcagggctaaagctggataatatactctcagggcccaagatagatgtcctgaaatctggtatgaaacaagcagcgacagtagccagtaagatgtgggtagctgttgcgtctgcctacagctactcagatgatgaggaagaaactaatagagactacagcttcccagctggcctagaagaccatattttgggggagaatatatcgcctaacacaagtatctcagggttggtccccagtgaacttacccagagcaacacaagtcttggcagtagcagcagtagtggagatgtaggaaaactgcattatccaacaggtgaagttccatttccaagaggcatgaaagggcaagactttgaaaaatcagatcatggttcttctcaaaataccagcatgtctagcatctatcagaattgtgcaatggaggttttgatgtccagttgttcacagtgtagagcttgtggagctttagtttatgatgaagaaattatggctggatggacagcagatgactcaaatttgaatacagcttgtccattctgtaaaagcaacttcttgcctcttctcaatatagaattcaaagatttgagaggttctgcaagctttttcctgaaaccaagtacctctggtgacagtttacaaagtggaagcattccattggcaaatgaatccttggagcacaaacctgtatccagtttagcagaacctgacttgatcaactttatggacttcccaaaacataaccagatcataactgaagaaacaggctctgcagttgaaccaagtgatgaaataaagagagccagtggagatgtccaaactatgaaaatttcatctgtgcctaatagtttatcaaagcgaaatgtgtctttgactcgaagtcacagtgttggaggcccattgcagaatattgactttacccagcgaccgtttcatggcatctcaacagttagtcttccaaatagtctgcaggaagttgtggatcctttaggaaaaagacccaatcctccccctgtttctgtgccctacttgagtcctctagtactccgtaaagaacttgaatctttgctagaaaatgaaggtgatcaggtgattcatacatcttctttcatcaatcaacatccaatcattttctggaacctcgtttggtatttcagacgtttggaccttcctagtaacttgccaggacttatcctcacatctgaacattgtaatgaaggtgtacagcttcctctgtcatctctgtcccaggatagcaaacttgtgtatattcagctgttatgggataatatcaaccttcatcaggaaccaagagaacctctgtatgtctcatggaggaattttaattctgaaaagaaatcatctctcctgtcagaggaacaacaagaaacaagcactttagtagaaaccatcaggcagagtattcagcacaataatgttcttaaacccatcaacctactttcacagcaaatgaagccaggcatgaaaagacaaagaggcatttgacaatgaatatggaattgcatacaatagtctgtcttcagagattcttgaaaggttgcagaaaattgatgctccaccaagtgccagtgtcgagtggtgcaggaagtgttttggagcgcctctcatttaaatagagattcactagaatgttgacacacaaggcttggggattagatttcatctggaaacattcaagtttttttttccaaatcgtaagaactggtgaatacggaattgaagtaactcttggggacaatatataatgaattatgattcatattgcattaccttgaaatatgaagtgccatttgaatgtcccagggcttattaatattgaagattttcaacccctgaactgcttttctgcctctgtggaaaactactttgggattcttcagtatttgtagtagtttgatagaaataatgaggaaccatattcattctaggcattgtttatatttgaagttactgagtttgaggaatggcaaattaaatttgcctaacccccaaaacaaatgaaatatctcaattataaaagcaacatggccgggcacggtggctcaggcctgtaatcccagcactttgggaggctgagcaaggtgggtggatcacttgaggccaggagttcgagaccagcctggccaacacggtgagaccctgtctttactaaaaatacaaaaattagccaggcgcaccactgtagtcccagctactcaggctgaggcaggagaatcgcttgaactgaggcagaggctacagtgagtggagatcacgccactgcaactccagcttgggtgacagagtgagaccgtctcaaaaaaaaaaaaaaaaaaaaaagagagcaacatatttgtgtaagtttgtatatgtgtagggctgtgtaggtatgtgtatatacagccatattctaagtgtatatttattaaaatagattgcatgttgcaatacggttttctgaaaggggtctcattgactattaaataaatgactactactaaacttgtctgtagtcattaatcttaaaattacctgaaaatctgatgacagctgccttccctaactttaatgtattaggttggcacaaaattaattgtagtttttgccactattaatggcaaaaaccgcaattatttttgtaccaacataatacacctttcatattatgtattatcttgcttaatgggttttatcttgattatccagttacttccatcctcttcccaatgttaatttgcaatagttttaaaatgggaacaaatgaatcaatcatcagatagttaaaatgaaattaaatcagctgcctaataatttatggaattcattggaatgtgcttaaaatgctaaagtgtatgtcattgaacatgaaatcttttttcaggcacatacattgttggtattgatgactttttaaaacctgtgggataaacttgcactgcacacggaagttttattcttgtatatttagatttgtatgcttgtgagtaaaaatgtgcatttgtaaatactgtgtttttaggttgaatcaattaagtcttaaaactgtaaatttattaagcttgttgccagtaggtttaagaaaatcatgatctcacatgcctcactttgacatttatcatgccttttattaaaaatatcccttaggaacagtaagtttgccttaactctctgcatggtttaaaaagccattggttttgtgtgtgtttacagtaattatgcagatgactaaatgagttgacacagtaaaattacttccatatggtacagtaacaacctaactcccttctacctgatgtaaccatttacaaattatagttattgtaccagtctttcaacatttcagggttaatctgacctatgcagaattctagtgtgaatttattgtgaaaatgctaaatgaaacaatttgtcagaaattatgtacaattttcattaccttcaaaatggatcttttgcactgtctgagagtatatatttttgcaactcaagacttggtactagttttaatacttaacacttactgacccaacagaagtttggaattaccttgcatataaaaattgaggttgaataaaatgaaaaattgttgttttctgttacattaagcctcttgaaatctgtaatctttagaatcccaatattttgttttttccattccttcactcgtaacttgaactcaagttttcacttactgacgcgcttcccattaaaaaaaatctgtaaagatctctaccttgaaaactttagtctgctgctgccatttagatattgggactgatttcttgttataaatttttaaaggctttttccaatacccaccacagagagggtaccactaaaaatttacaagacaaaaacattattatggaaagatttagaagtacctggaatgacttgtagcactgtatgcaactttaatcctgataacttctaaaagcaatctttcaaattagtccagattactcagcagtaccttatattggtttggggttcgatagcgatttttttttcttccaacgaacgaattgtacaggttgatcacaacctgcatagttaacgacatgtcagaatgacttgcgtgtgtgtggagaactgggtatggtggctcacgcctgtagtaatctcaacactttgggatgccaaggcaggcggatcacttgagcccaggagttcaagagtagcctgggtaacatagcaaaactctacaaaaagcacaaaaactagccgcagtgcacacctgtagttcccaggcggtcaaggctgcagtgagccataccactgctcgccatccggggcgtaggagtgaaaccctgtgtcaaagaaaaaaaaaaatctaaggaaaaacagactgtccttattttgtggctgcactcaattttcagaaagcagggcggttctcatgttttgtgcatcataaacaagaactggttaatataaaactttggaccataacactggactcaccttgt

SEQ ID NO: 447537 - DNA, 2325 bp, Homo sapiens
cacaacctagtccagagcctcacagtcctactgaacctcctgcatggggcagcagtattgtgaaagttccgtctggtatatttgatgtcaacagcaggaaaagtagcactggtagtatatcaaatgtgctgttttctactcaagatccagttgaagatgcagtctttggcgaagctactaatctcaagaagaatggtgatagaggagaaaaaagacaaaagcattttcctaagacttctctacttcatattgcaagaacccatagctttgagaatgttagctgtcacctacctgatagtaggacttgtatgtctgaaagcacttggaatcctgagcacagatcatctccggtgccagagatgcttgaggaaagccaagaactccttgagcctgtggttgatgacgtacctaaaactactgcaacagtagatacatatgagagtctactaagtgatagtaacagtaatcagtccagagacttgaaaacagtatccaaagatctgaggaataagagaagtagtttatatggtattgctaaggtggttcagagggaagatgttgaaactggactagatcctttgtctcttttagccactgaatgtacaggaggaaaaactcctgattctgaagataagttgttttctccagttattgcacgtaatctggctgatgaaatagaaagctatatgaacctaaaaagtcccctaggtagtaaatcttctagtatggaattacacagagaggaaaacagagagtctggcatgactactgcatttattcatgctctagagaggagatcaagcctacctttagatcatggttcaccagcacaggaaaatcctgaaagtgaaaagagctcacctgcagtgtccaggtctaaaacttttactgggcgtttcaagcagcaaaccccctctcgaactcataaagaacgttcaacttctttgtcagcactggtgcgttcttcgccacatggctcgttgggttctgtagtaaattctttgtcagggctaaagctggataatatactctcagggcccaagatagatgtcctgaaatctggtatgaaacaagcagcgacagtagccagtaagatgtgggtagctgttgcgtctgcctacagctactcagatgatgaggaagaaactaatagagactacagcttcccagctggcctagaagaccatattttgggggagaatatatcgcctaacacaagtatctcagggttggtccccagtgaacttacccagagcaacacaagtcttggcagtagcagcagtagtggagatgtaggaaaactgcattatccaacaggtgaagttccatttccaagaggcatgaaagggcaagactttgaaaaatcagatcatggttcttctcaaaataccagcatgtctagcatctatcagaattgtgcaatggaggttttgatgtccagttgttcacagtgtagagcttgtggagctttagtttatgatgaagaaattatggctggatggacagcagatgactcaaatttgaatacagcttgtccattctgtaaaagcaacttcttgcctcttctcaatatagaattcaaagatttgagaggttctgcaagctttttcctgaaaccaagtacctctggtgacagtttacaaagtggaagcattccattggcaaatgaatccttggagcacaaacctgtatccagtttagcagaacctgacttgatcaactttatggacttcccaaaacataaccagatcataactgaagaaacaggctctgcagttgaaccaaggtatcaaagggtacagagacctctttatgtagtaataaatggggtacccttgtaaaaattctgtctctaaagacaacctgactcatataggcataagttctggcatttaagagtacatcttaacttattaccacatagtgtttaacgagctaatgaatgaatctgatgataaaccatttttgaactaagtttaatattttacagttgtcttttacaaaatgaacttctcaacagtaaaatatttcccttttaatatagtcattgccagtttccagaggcgaaatgttctctttctgtgaaatgtacacttggcccttaaatactaattgaatcaaacatttattgagactctattgtatgctaaatattatgctaagctctaaaaataaaaaagtaaatatgactgggtctctctccttaggtggatcgtggcctagtagagattaaatacttgtcagtgtctttattgtacttatttgcatatagcatacttctaggtaattttgtttaataaagatgaaataatatttgagtaaagc

SEQ ID NO: 447538 - DNA, 408 bp, Homo sapiens
aggagatcaagcctacctttagatcatggttcaccagcacaggaaaatcctgaaagtgaaaagagctcacctgcagtgtccaggtctaaaacttttactgggcgtttcaagcagcaaaccccctctcgaactcataaagaacgttcaacttctttgtcagcactggtgcgttcttcgccacatggctcgttgggttctgtagtaaattctttgtcagggctaaagctggataatatactctcagggcccaagatagatgtcctgaaatctggtatgaaacaagcagcgacagtagccagtaagatgtgggtagctgttgcgtctgcctacagctactcagatgatgaggtaagaaagctttatgtgtgtagtctgtctgctattggagtgtttatagtatctttctag

SEQ ID NO: 447539 - DNA, 4148 bp, Homo sapiens
ctttttagtggccgcgtcccaggatagctggaattcgcggccgcctcttgcggtcccagagtggagtggaaggtctggagctttgggaggagacggggaggacagactggaggcgtgttcctccggagttttctttttcgtgcgagccctcgcgcgcgcgtacagtcatcccgctggtctgacgattgtggagaggcggtggagaggcttcatccatcccacccggtcgtcgccggggattggggtcccagcgagacctccccgggagaagcagtgcccaggaagttttctgaagccggggaagctgtgcagccgaagccgccgccgcgccggagcccgggacaccggccaccctccgcgccacccaccctcgccggctccggcttcctctggcccaggcgccgcgcggacccggcagctgtctgcgcacgccgagctccacggtgaaaaaaaagtgaaggtgtaaaagcagcacaagtgcaataagagatatttcctcaaatttgcctcaagatggaaaccctttgcctcagggcatccttttggctggcactggttggatgtgtaatcagtgataatcctgagagatacagcacaaatctaagcaatcatgtggatgatttcaccacttttcgtggcacagagctcagcttcctggttaccactcatcaacccactaatttggtcctacccagcaatggctcaatgcacaactattgcccacagcagactaaaattacttcagctttcaaatacattaacactgtgatatcttgtactattttcatcgtgggaatggtggggaatgcaactctgctcaggatcatttaccagaacaaatgtatgaggaatggccccaacgcgctgatagccagtcttgcccttggagaccttatctatgtggtcattgatctccctatcaatgtatttaagctgctggctgggcgctggccttttgatcacaatgactttggcgtatttctttgcaagctgttcccctttttgcagaagtcctcggtggggatcaccgtcctcaacctctgcgctcttagtgttgacaggtacagagcagttgcctcctggagtcgtgttcagggaattgggattcctttggtaactgccattgaaattgtctccatctggatcctgtcctttatcctggccattcctgaagcgattggcttcgtcatggtaccctttgaatataggggtgaacagcataaaacctgtatgctcaatgccacatcaaaattcatggagttctaccaagatgtaaaggactggtggctcttcgggttctatttctgtatgcccttggtgtgcactgcgatcttctacaccctcatgacttgtgagatgttgaacagaaggaatggcagcttgagaattgccctcagtgaacatcttaagcagcgtcgagaagtggcaaaaacagttttctgcttggttgtaatttttgctctttgctggttccctcttcacttaagccgtatattgaagaaaactgtgtataacgaaatggacaagaaccgatgtgaattacttagtttcttactgctcatggattacatcggtattaacttggcaaccatgaattcatgtataaaccccatagctctgtattttgtgagcaagaaatttaaaaattgtttccagtcatgcctctgctgctgctgttaccagtccaaaagtctgatgacctcggtccccatgaacggaacaagcatccagtggaagaaccacgatcaaaacaaccacaacacagaccggagcagccataaggacagcatgaactgaccacccttagaagcactcctcggtactcccataatcctctcggagaaaaaaatcacaaggcaactgtgagtccgggaatctcttctctgatccttcttccttaattcactcccacacccaagaagaaatgctttccaaaaccgcaagggtagactggtttatccacccacaacatctacgaatcgtacttctttaattgatctaatttacatattctgcgtgttgtattcagcactaaaaaatggtgggagctgggggagaatgaagactgttaaatgaaaccagaaggatatttactacttttgcatgaaaatagagctttcaagtacatggctagcttttatggcagttctggtgaatgttcaatgggaactggtcaccatgaaactttagagattaacgacaagattttctactttttttaagtgatttttttgtccttcagccaaacacaatatgggctcaagtcacttttatttgaaatgtcatttggtgccagtattttttaactgcataatagcctaacatgattatttgaacttatttacacatagtttgaaaaaaaaaagacaaaaatagtattcaggtgagcaattagattagtattttccacgtcactgtttatttttttaaaacacaaattctaaagctacaacaaatactacaggcccttaaagcacagtctgatgacacatttggcagtttaatagatgttactcaaagaattttttaagaactgtattttattttttaaatggtgttttattacaagggaccttgaacatgttttgtatgttaaattcaaaagtaatgcttcaatcagatagttctttttcacaagttcaatctgtttttcatgtaaattttgtatgaaaaatcaatgtcaagtaccaaaatgttaatgtatgtgtcatttaactctgcctgagactttcagtgcactgtatatagaagtctaaaacacacctaagagaaaaagatcgaatttttcagatgattcagaaattttcattcaggtatttgtaatagtgacatatatatgtatatacatatcacctcctattctcttaatttttcttaaaatgttaactggcagtaagtcttttttgatcattcccttttccatataggaaacataattttgaagtggccagatgagtttatcatgtcagtgaaaaataattacccacaaatgccaccagaacttacgattcttcacttcttggggttttcagtatgaacctaactccccaccccaacatctccctcccacattgtcaccatttcaaagggcccacagtgacttttgctgggcattttcccagatgtttacagactgtgagtacagcagaaaatcttttactagtgtgtgtgtgtatatatataaacaattgtaaatttcttttagcccatttttctagactgtctctgtggaatatatttgtgtgtgtgatatatgcatgtgtgtgatggtatgtatggatttaatctaatctaataattgtgccccgcagttgtgccaaagtgcatagtctgagtaaaatctaggtgattgttcatcatgacaacctgcctcagtccattttaacctgtagcaaccttctgcattcataaatcttgtaatcatgttaccattacaaatgggatataagaggcagcgtgaaagcagatgagctgtggactagcaatatagggttttgtttggttggttggtttgataaagcagtatttggggtcatattgtttcctgtgctggagcaaaagtcattacactttgaagtattatattgttcttatcctcaattcaatgtggtgatgaaattgccaggttgtctgatatttctttcagacttcgccagacagattgctgataataaattaggtaagataatttgttgggccatattttaggacaggtaaaataacatcaggttccagttgcttgaattgcaaggctaagaagtactgcccttttgtgtgttagcagtcaaatctattattccactggcgcatcatatgcagtgatatatgcctataatataagccataggttcacaccattttgtttagacaattgtctttttttcaagatgctttgtttctttcatatgaaaaaaatgcattttataaattcagaaagtcatagatttctgaaggcgtcaacgtgcattttatttatggactggtaagtaactgtggtttactagcaggaatatttccaatttctacctttactacatcttttcaacaagtaactttgtagaaatgagccagaagccaaggccctgagttggcagtggcccataagtgtaaaataaaagtttacagaaaccttgcaagtgtctcttcat

SEQ ID NO: 447540 - DNA, 3777 bp, Homo sapiens
tataggcgaattgggtaccgggaaaaaaatcgaggtcgacggtatcggatgaagcttgatatcgaattcggggtgaaaaaaaagtgaaggtgtaaaagcagcacaagtgcaataagagatatttcctcaaatttgcctcaagatggaaaccctttgcctcagggcatccttttggctggcactggttggatgtgtaatcagtgataatcctgagagatacagcacaaatctaagcaatcatgtggatgatttcaccacttttcgtggcacagagctcagcttcctggttaccactcatcaacccactaatttggtcctacccagcaatggctcaatgcacaactattgcccacagcagactaaaattacttcagctttcaaatacattaacactgtgatatcttgtactattttcatcgtgggaatggtggggaatgcaactctgctcaggatcatttaccagaacaaatgtatgaggaatggccccaacgcgctgatagccagtcttgcccttggagaccttatctatgtggtcattgatctccctatcaatgtatttaagctgctggctgggcgctggccttttgatcacaatgactttggcgtatttctttgcaagctgttcccctttttgcagaagtcctcggtggggatcaccgtcctcaacctctgcgctcttagtgttgacaggtacagagcagttgcctcctggagtcgtgttcagggaattgggattcctttggtaactgccattgaaattgtctccatctggatcctgtcctttatcctggccattcctgaagcgattggcttcgtcatggtaccctttgaatataggggtgaacagcataaaacctgtatgctcaatgccacatcaaaattcatggagttctaccaagatgtaaaggactggtggctcttcgggttctatttctgtatgcccttggtgtgcactgcgatcttctacaccctcatgacttgtgagatgttgaacagaaggaatggcagcttgagaattgccctcagtgaacatcttaagcagcgtcgagaagtggcaaaaacagttttctgcttggttgtaatttttgctctttgctggttccctcttcacttaagccgtatattgaagaaaactgtgtataacgaaatggacaagaaccgatgtgaattacttagtttcttactgctcatggattacatcggtattaacttggcaaccatgaattcatgtataaaccccatagctctgtattttgtgagcaagaaatttaaaaattgtttccagtcatgcctctgctgctgctgttaccagtccaaaagtctgatgacctcggtccccatgaacggaacaagcatccagtggaagaaccacgatcaaaacaaccacaacacagaccggagcagccataaggacagcatgaactgaccacccttagaagcactcctcggtactcccataatcctctcggagaaaaaaatcacaaggcaactgtgagtccgggaatctcttctctgatccttcttccttaattcactcccacacccaagaagaaatgctttccaaaaccgcaagggtagactggtttatccacccacaacatctacgaatcgtacttctttaattgatctaatttacatattctgcgtgttgtattcagcactaaaaaatggtgggagctgggggagaatgaagactgttaaatgaaaccagaaggatatttactacttttgcatgaaaatagagctttcaagtacatggctagcttttatggcagttctggtgaatgttcaatgggaactggtcaccatgaaactttagagattaacgacaagattttctactttttttaagtgatttttttgtccttcagccaaacacaatatgggctcaagtcacttttatttgaaatgtcatttggtgccagtattttttaactgcataatagcctaacatgattatttgaacttatttacacatagtttgaaaaaaaaaagacaaaaatagtattcaggtgagcaattagattagtattttccacgtcactgtttatttttttaaaacacaaattctaaagctacaacaaatactacaggcccttaaagcacagtctgatgacacatttggcagtttaatagatgttactcaaagaattttttaagaactgtattttattttttaaatggtgttttattacaagggaccttgaacatgttttgtatgttaaattcaaaagtaatgcttcaatcagatagttctttttcacaagttcaatctgtttttcatgtaaattttgtatgaaaaatcaatgtcaagtaccaaaatgttaatgtatgtgtcatttaactctgcctgagactttcagtgcactgtatatagaagtctaaaacacacctaagagaaaaagatcgaatttttcagatgattcagaaattttcattcaggtatttgtaatagtgacatatatatgtatatacatatcacctcctattctcttaatttttcttaaaatgttaactggcagtaagtcttttttgatcattcccttttccatataggaaacataattttgaagtggccagatgagtttatcatgtcagtgaaaaataattacccacaaatgccaccagaacttacgattcttcacttcttggggttttcagtatgaacctaactccccaccccaacatctccctcccacattgtcaccatttcaaagggcccacagtgacttttgctgggcattttcccagatgtttacagactgtgagtacagcagaaaatcttttactagtgtgtgtgtgtatatatataaacaattgtaaatttcttttagcccatttttctagactgtctctgtggaatatatttgtgtgtgtgatatatgcatgtgtgtgatggtatgtatggatttaatctaatctaataattgtgccccgcagttgtgccaaagtgcatagtctgagtaaaatctaggtgattgttcatcatgacaacctgcctcagtccattttaacctgtagcaaccttctgcattcataaatcttgtaatcatgttaccattacaaatgggatataagaggcagcgtgaaagcagatgagctgtggactagcaatatagggttttgtttggttggttggtttgataaagcagtatttggggtcatattgtttcctgtgctggagcaaaagtcattacactttgaagtattatattgttcttatcctcaattcaatgtggtgatgaaattgccaggttgtctgatatttctttcagacttcgccagacagattgctgataataaattaggtaagataatttgttgggccatattttaggacaggtaaaataacatcaggttccagttgcttgaattgcaaggctaagaagtactgcccttttgtgtgttagcagtcaaatctattattccactggcgcatcatatgcagtgatatatgcctataatataagccataggttcacaccattttgtttagacaattgtctttttttcaagatgctttgtttctttcatatgaaaaaaatgcattttataaattcagaaagtcatagatttctgaaggcgtcaacgtgcattttatttatggactggtaagtaactgtggtttactagcaggaatatttccaatttctacctttactacatcttttcaacaagtaactttgtagaaatgagccagaagccaaggccctgagttggcagtggcccataagtgtaaaataaaagtttacagaaaccttgcaagtgtctcttcat

SEQ ID NO: 447541 - DNA, 3821 bp, Homo sapiens
ctttttagtggccgcgtcccaggatagctggaattcgcggccgcctcttgcggtcccagagtggagtggaaggtctggagctttgggaggagacggggaggacagactggaggcgtgttcctccggagttttctttttcgtgcgagccctcgcgcgcgcgtacagtcatcccgctggtctgacgattgtggagaggcggtggagaggcttcatccatcccacccggtcgtcgccggggattggggtcccagcgagacctccccgggagaagcagtgcccaggaagttttctgaagccggggaagctgtgcagccgaagccgccgccgcgccggagcccgggacaccggccaccctccgcgccacccaccctcgccggctccggcttcctctggcccaggcgccgcgcggacccggcagctgtctgcgcacgccgagctccacggtgaaaaaaaagtgaaggtgtaaaagcagcacaagtgcaataagagatatttcctcaaatttgcctcaagatggaaaccctttgcctcagggcatccttttggctggcactggttggatgtgtaatcagtgataatcctgagagatacagcacaaatctaagcaatcatgtggatgatttcaccacttttcgtggcacagagctcagcttcctggttaccactcatcaacccactaatttggtcctacccagcaatggctcaatgcacaactattgcccacagcagactaaaattacttcagctttcaaatacattaacactgtgatatcttgtactattttcatcgtgggaatggtggggaatgcaactctgctcaggatcatttaccagaacaaatgtatgaggaatggccccaacgcgctgatagccagtcttgcccttggagaccttatctatgtggtcattgatctccctatcaatgtatttaagttctaccaagatgtaaaggactggtggctcttcgggttctatttctgtatgcccttggtgtgcactgcgatcttctacaccctcatgacttgtgagatgttgaacagaaggaatggcagcttgagaattgccctcagtgaacatcttaagcagcgtcgagaagtggcaaaaacagttttctgcttggttgtaatttttgctctttgctggttccctcttcacttaagccgtatattgaagaaaactgtgtataacgaaatggacaagaaccgatgtgaattacttagtttcttactgctcatggattacatcggtattaacttggcaaccatgaattcatgtataaaccccatagctctgtattttgtgagcaagaaatttaaaaattgtttccagtcatgcctctgctgctgctgttaccagtccaaaagtctgatgacctcggtccccatgaacggaacaagcatccagtggaagaaccacgatcaaaacaaccacaacacagaccggagcagccataaggacagcatgaactgaccacccttagaagcactcctcggtactcccataatcctctcggagaaaaaaatcacaaggcaactgtgagtccgggaatctcttctctgatccttcttccttaattcactcccacacccaagaagaaatgctttccaaaaccgcaagggtagactggtttatccacccacaacatctacgaatcgtacttctttaattgatctaatttacatattctgcgtgttgtattcagcactaaaaaatggtgggagctgggggagaatgaagactgttaaatgaaaccagaaggatatttactacttttgcatgaaaatagagctttcaagtacatggctagcttttatggcagttctggtgaatgttcaatgggaactggtcaccatgaaactttagagattaacgacaagattttctactttttttaagtgatttttttgtccttcagccaaacacaatatgggctcaagtcacttttatttgaaatgtcatttggtgccagtattttttaactgcataatagcctaacatgattatttgaacttatttacacatagtttgaaaaaaaaaagacaaaaatagtattcaggtgagcaattagattagtattttccacgtcactgtttatttttttaaaacacaaattctaaagctacaacaaatactacaggcccttaaagcacagtctgatgacacatttggcagtttaatagatgttactcaaagaattttttaagaactgtattttattttttaaatggtgttttattacaagggaccttgaacatgttttgtatgttaaattcaaaagtaatgcttcaatcagatagttctttttcacaagttcaatctgtttttcatgtaaattttgtatgaaaaatcaatgtcaagtaccaaaatgttaatgtatgtgtcatttaactctgcctgagactttcagtgcactgtatatagaagtctaaaacacacctaagagaaaaagatcgaatttttcagatgattcagaaattttcattcaggtatttgtaatagtgacatatatatgtatatacatatcacctcctattctcttaatttttcttaaaatgttaactggcagtaagtcttttttgatcattcccttttccatataggaaacataattttgaagtggccagatgagtttatcatgtcagtgaaaaataattacccacaaatgccaccagaacttacgattcttcacttcttggggttttcagtatgaacctaactccccaccccaacatctccctcccacattgtcaccatttcaaagggcccacagtgacttttgctgggcattttcccagatgtttacagactgtgagtacagcagaaaatcttttactagtgtgtgtgtgtatatatataaacaattgtaaatttcttttagcccatttttctagactgtctctgtggaatatatttgtgtgtgtgatatatgcatgtgtgtgatggtatgtatggatttaatctaatctaataattgtgccccgcagttgtgccaaagtgcatagtctgagtaaaatctaggtgattgttcatcatgacaacctgcctcagtccattttaacctgtagcaaccttctgcattcataaatcttgtaatcatgttaccattacaaatgggatataagaggcagcgtgaaagcagatgagctgtggactagcaatatagggttttgtttggttggttggtttgataaagcagtatttggggtcatattgtttcctgtgctggagcaaaagtcattacactttgaagtattatattgttcttatcctcaattcaatgtggtgatgaaattgccaggttgtctgatatttctttcagacttcgccagacagattgctgataataaattaggtaagataatttgttgggccatattttaggacaggtaaaataacatcaggttccagttgcttgaattgcaaggctaagaagtactgcccttttgtgtgttagcagtcaaatctattattccactggcgcatcatatgcagtgatatatgcctataatataagccataggttcacaccattttgtttagacaattgtctttttttcaagatgctttgtttctttcatatgaaaaaaatgcattttataaattcagaaagtcatagatttctgaaggcgtcaacgtgcattttatttatggactggtaagtaactgtggtttactagcaggaatatttccaatttctacctttactacatcttttcaacaagtaactttgtagaaatgagccagaagccaaggccctgagttggcagtggcccataagtgtaaaataaaagtttacagaaaccttgcaagtgtctcttcat

SEQ ID NO: 447542 - DNA, 3459 bp, Homo sapiens
ctttttagtggccgcgtcccaggatagctggaattcgcggccgcctcttgcggtcccagagtggagtggaaggtctggagctttgggaggagacggggaggacagactggaggcgtgttcctccggagttttctttttcgtgcgagccctcgcgcgcgcgtacagtcatcccgctggtctgacgattgtggagaggcggtggagaggcttcatccatcccacccggtcgtcgccggggattggggtcccagcgagacctccccgggagaagcagtgcccaggaagttttctgaagccggggaagctgtgcagccgaagccgccgccgcgccggagcccgggacaccggccaccctccgcgccacccaccctcgccggctccggcttcctctggcccaggcgccgcgcggacccggcagctgtctgcgcacgccgagctccacgctgctggctgggcgctggccttttgatcacaatgactttggcgtatttctttgcaagctgttcccctttttgcagaagtcctcggtggggatcaccgtcctcaacctctgcgctcttagtgttgacagttctaccaagatgtaaaggactggtggctcttcgggttctatttctgtatgcccttggtgtgcactgcgatcttctacaccctcatgacttgtgagatgttgaacagaaggaatggcagcttgagaattgccctcagtgaacatcttaagcagcgtcgagaagtggcaaaaacagttttctgcttggttgtaatttttgctctttgctggttccctcttcacttaagccgtatattgaagaaaactgtgtataacgaaatggacaagaaccgatgtgaattacttagtttcttactgctcatggattacatcggtattaacttggcaaccatgaattcatgtataaaccccatagctctgtattttgtgagcaagaaatttaaaaattgtttccagtcatgcctctgctgctgctgttaccagtccaaaagtctgatgacctcggtccccatgaacggaacaagcatccagtggaagaaccacgatcaaaacaaccacaacacagaccggagcagccataaggacagcatgaactgaccacccttagaagcactcctcggtactcccataatcctctcggagaaaaaaatcacaaggcaactgtgagtccgggaatctcttctctgatccttcttccttaattcactcccacacccaagaagaaatgctttccaaaaccgcaagggtagactggtttatccacccacaacatctacgaatcgtacttctttaattgatctaatttacatattctgcgtgttgtattcagcactaaaaaatggtgggagctgggggagaatgaagactgttaaatgaaaccagaaggatatttactacttttgcatgaaaatagagctttcaagtacatggctagcttttatggcagttctggtgaatgttcaatgggaactggtcaccatgaaactttagagattaacgacaagattttctactttttttaagtgatttttttgtccttcagccaaacacaatatgggctcaagtcacttttatttgaaatgtcatttggtgccagtattttttaactgcataatagcctaacatgattatttgaacttatttacacatagtttgaaaaaaaaaagacaaaaatagtattcaggtgagcaattagattagtattttccacgtcactgtttatttttttaaaacacaaattctaaagctacaacaaatactacaggcccttaaagcacagtctgatgacacatttggcagtttaatagatgttactcaaagaattttttaagaactgtattttattttttaaatggtgttttattacaagggaccttgaacatgttttgtatgttaaattcaaaagtaatgcttcaatcagatagttctttttcacaagttcaatctgtttttcatgtaaattttgtatgaaaaatcaatgtcaagtaccaaaatgttaatgtatgtgtcatttaactctgcctgagactttcagtgcactgtatatagaagtctaaaacacacctaagagaaaaagatcgaatttttcagatgattcagaaattttcattcaggtatttgtaatagtgacatatatatgtatatacatatcacctcctattctcttaatttttcttaaaatgttaactggcagtaagtcttttttgatcattcccttttccatataggaaacataattttgaagtggccagatgagtttatcatgtcagtgaaaaataattacccacaaatgccaccagaacttacgattcttcacttcttggggttttcagtatgaacctaactccccaccccaacatctccctcccacattgtcaccatttcaaagggcccacagtgacttttgctgggcattttcccagatgtttacagactgtgagtacagcagaaaatcttttactagtgtgtgtgtgtatatatataaacaattgtaaatttcttttagcccatttttctagactgtctctgtggaatatatttgtgtgtgtgatatatgcatgtgtgtgatggtatgtatggatttaatctaatctaataattgtgccccgcagttgtgccaaagtgcatagtctgagtaaaatctaggtgattgttcatcatgacaacctgcctcagtccattttaacctgtagcaaccttctgcattcataaatcttgtaatcatgttaccattacaaatgggatataagaggcagcgtgaaagcagatgagctgtggactagcaatatagggttttgtttggttggttggtttgataaagcagtatttggggtcatattgtttcctgtgctggagcaaaagtcattacactttgaagtattatattgttcttatcctcaattcaatgtggtgatgaaattgccaggttgtctgatatttctttcagacttcgccagacagattgctgataataaattaggtaagataatttgttgggccatattttaggacaggtaaaataacatcaggttccagttgcttgaattgcaaggctaagaagtactgcccttttgtgtgttagcagtcaaatctattattccactggcgcatcatatgcagtgatatatgcctataatataagccataggttcacaccattttgtttagacaattgtctttttttcaagatgctttgtttctttcatatgaaaaaaatgcattttataaattcagaaagtcatagatttctgaaggcgtcaacgtgcattttatttatggactggtaagtaactgtggtttactagcaggaatatttccaatttctacctttactacatcttttcaacaagtaactttgtagaaatgagccagaagccaaggccctgagttggcagtggcccataagtgtaaaataaaagtttacagaaaccttgcaagtgtctcttcat

SEQ ID NO: 447543 - DNA, 3235 bp, Homo sapiens
ctttttagtggccgcgtcccaggatagctggaattcgcggccgcctcttgcggtcccagagtggagtggaaggtctggagctttgggaggagacggggaggacagactggaggcgtgttcctccggagttttctttttcgtgcgagccctcgcgcgcgcgtacagtcatcccgctggtctgacgattgtggagaggcggtggagaggcttcatccatcccacccggtcgtcgccggggattggggtcccagcgagacctccccgggagaagcagtgcccaggaagttttctgaagccggggaagctgtgcagccgaagccgccgccgcgccggagcccgggacaccggccaccctccgcgccacccaccctcgccggctccggcttcctctggcccaggcgccgcgcggacccggcagctgtctgcgcacgccgagctccacggtgaaaaaaaagtgaaggtgtaaaagcagcacaagtgcaataagagatatttcctcaaatttgcctcaagatggaaaccctttgcctcagggcatccttttggctggcactggttggatgtgtaatcagtgataatcctgagagatacagcacaaatctaagcaatcatgtggatgatttcaccacttttcgtggcacagagctcagcttcctggttaccactcatcaacccactaatttggtcctacccagcaatggctcaatgcacaactattgcccacagcagactaaaattacttcagctttcaaatacattaacactgtgatatcttgtactattttcatcgtgggaatggtggggaatgcaactctgctcaggatcatttaccagaacaaatgtatgaggaatggccccaacgcgctgatagccagtcttgcccttggagaccttatctatgtggtcattgatctccctatcaatgtatttaaggtaggaagtaaccacaaatgtatttgcaaatttaaacccatgctctgattccacgtggagagttgctgcagacttttctgacctttggaattttatctgtgtttttactgagagctatttctgctgtcttctaactactagttttaagatttacaaattttattatctgtcttatgttacacttagtttctaccttaattgtaacaaaatagtatttcagggatgatggttcaaaatcatggtgtttcatgacttggattctcatgccacccctgggcttgctggttggataggctgtcttggcaagatccctggatttttatgaaatgcaatttccagagtgagagctactaggcccagaaaatacttgaaacaaacatatccttgagtttagttaccgttgaatatgatgctgttcagaagccagatatctacagtccagcttgaaatgaattgtatttattttattttgactgtctagattaatgattaaagccaaagggcatcctggcttttctcagtgatatgggtgacttagagataatggggtccacatgatagcaggccactgttgaccttgctgagcagcattactaactaataccacttaaaatttgcctgctttactgtggtctccttcatttcttcagtctgcatttattgagcacccactgtgtgcccacccctgagctaggcagtaaggaaccaaaaagaaacacaacaaagtcagtgcctcagtgtgagaggaagataactaaccttgcttacagactgtattaggccatttctacattgctattaaaaaaaaaaaaaaaaggctgggtaatttataaagaaaagagatttgattggctcacagctctgtaggctgtacatgcatggctccagcatctgcttctggtgagggcctcaggaagcttccaaatatggcagagggagaaggggtgcaggcacgtaacatggcaagagcaggagcaagagagaagggggcaaggcaccacacttgcaaaccaccagatgtctcgagaatcactcactaatgcaaggacagcaccaagccattcatgggagatctgcccccatgagccagacacctcccaccagttcctacctccaacattggggattacatttcaacatgagatttggaggggacaaacatccaaactatatcagagactacttagacccaaaacaaactaaagccgaaggaattacatattccatatttggtctagttgttgggagggaaaaattgctgcaagaattcagatatactaaaattcaaatgaaatggcctgatctatgccagattttatgaaatgtgtttattctaaacccaagaagagtattttcctcagccttgttttttccttctatgtattatgcatagaaagcaactattctaagaggtaatattctgaaatattactttaaatggcaagttttgtcaattgaagatacaacacattttaagtaaaacagtaatctctcagtttccaataagtacacttaagctgtggttaaattatattaccctagcagaaaaatcagtggtctgataatatagatgaaaacaatggttacaattttgacattgcaaataaaaacttcccaaaattacaccagtacactgtttccaaaattgaagagattagagaacaaacaatcaaaaaattaccatctctttccacaggatagcataaatacatgtgttttctattagagcttaaaataggaatttagaactaaactatgatgcaaaattgaaaatgtgtaattgatttaaaatgtttagcatatgctacataactttaatcttttcttttaaaaagttttctctttatgatatactatgtgcacacaaccacttgactttctcctgacatttctccttaatgataaattggaaaattcaaattttgactcttcagccatcagagtgtggagtatcaaacattgattattcaaacttatgaactagtgaaccaacccatcatggctcaagaaaataattatccatctctgcatttataactccctgctgctgttcaccctgaagcacactatgtagacttgccatgtgcaaagcagcttcttagccaatcaatatccacaactgctgggaaggatacctgcttatctctttgcggtgctactgccaatcaccagactaaacatcatttctattccatggcaacgttttaagtcagaccatctggaatgtctccagatttggtaaaaatgcaaataaaactttgctttacattcacctagcaatgaataaaaattaacatattct

SEQ ID NO: 447544 - DNA, 362 bp, Homo sapiens
gaaatggcttctgggcaagaaaaatgcttattctaggaagaaatgctagtgagcagattttaaaacaatatattctaattattctacaccattttcttttgctctagtttcttactgctcatggattacatcggtattaacttggcaaccatgaattcatgtataaaccccatagctctgtattttgtgagcaagaaatttaaaaattgtttccaggtaagatgatttttcaagtattttttaaagacaacaaaatgagtatattaaacagtcaacagacacagccaattccagttgtaatattactttgatcagctatactactttttagcagtgaagtgaaaatcatgttttattaccca

SEQ ID NO: 447545 - DNA, 3969 bp, Homo sapiens
ctttttagtggccgcgtcccaggatagctggaattcgcggccgcctcttgcggtcccagagtggagtggaaggtctggagctttgggagaagcagtgcccaggaagttttctgaagccggggaagctgtgcagccgaagccgccgccgcgccggagcccgggacaccggccaccctccgcgccacccaccctcgccggctccggcttcctctggcccaggcgccgcgcggacccggcagctgtctgcgcacgccgagctccacggtgaaaaaaaagtgaaggtgtaaaagcagcacaagtgcaataagagatatttcctcaaatttgcctcaagatggaaaccctttgcctcagggcatccttttggctggcactggttggatgtgtaatcagtgataatcctgagagatacagcacaaatctaagcaatcatgtggatgatttcaccacttttcgtggcacagagctcagcttcctggttaccactcatcaacccactaatttggtcctacccagcaatggctcaatgcacaactattgcccacagcagactaaaattacttcagctttcaaatacattaacactgtgatatcttgtactattttcatcgtgggaatggtggggaatgcaactctgctcaggatcatttaccagaacaaatgtatgaggaatggccccaacgcgctgatagccagtcttgcccttggagaccttatctatgtggtcattgatctccctatcaatgtatttaagctgctggctgggcgctggccttttgatcacaatgactttggcgtatttctttgcaagctgttcccctttttgcagaagtcctcggtggggatcaccgtcctcaacctctgcgctcttagtgttgacaggtacagagcagttgcctcctggagtcgtgttcagggaattgggattcctttggtaactgccattgaaattgtctccatctggatcctgtcctttatcctggccattcctgaagcgattggcttcgtcatggtaccctttgaatataggggtgaacagcataaaacctgtatgctcaatgccacatcaaaattcatggagttctaccaagatgtaaaggactggtggctcttcgggttctatttctgtatgcccttggtgtgcactgcgatcttctacaccctcatgacttgtgagatgttgaacagaaggaatggcagcttgagaattgccctcagtgaacatcttaagcagcgtcgagaagtggcaaaaacagttttctgcttggttgtaatttttgctctttgctggttccctcttcacttaagccgtatattgaagaaaactgtgtataacgaaatggacaagaaccgatgtgaattacttagtttcttactgctcatggattacatcggtattaacttggcaaccatgaattcatgtataaaccccatagctctgtattttgtgagcaagaaatttaaaaattgtttccagtcatgcctctgctgctgctgttaccagtccaaaagtctgatgacctcggtccccatgaacggaacaagcatccagtggaagaaccacgatcaaaacaaccacaacacagaccggagcagccataaggacagcatgaactgaccacccttagaagcactcctcggtactcccataatcctctcggagaaaaaaatcacaaggcaactgtgagtccgggaatctcttctctgatccttcttccttaattcactcccacacccaagaagaaatgctttccaaaaccgcaagggtagactggtttatccacccacaacatctacgaatcgtacttctttaattgatctaatttacatattctgcgtgttgtattcagcactaaaaaatggtgggagctgggggagaatgaagactgttaaatgaaaccagaaggatatttactacttttgcatgaaaatagagctttcaagtacatggctagcttttatggcagttctggtgaatgttcaatgggaactggtcaccatgaaactttagagattaacgacaagattttctactttttttaagtgatttttttgtccttcagccaaacacaatatgggctcaagtcacttttatttgaaatgtcatttggtgccagtattttttaactgcataatagcctaacatgattatttgaacttatttacacatagtttgaaaaaaaaaagacaaaaatagtattcaggtgagcaattagattagtattttccacgtcactgtttatttttttaaaacacaaattctaaagctacaacaaatactacaggcccttaaagcacagtctgatgacacatttggcagtttaatagatgttactcaaagaattttttaagaactgtattttattttttaaatggtgttttattacaagggaccttgaacatgttttgtatgttaaattcaaaagtaatgcttcaatcagatagttctttttcacaagttcaatctgtttttcatgtaaattttgtatgaaaaatcaatgtcaagtaccaaaatgttaatgtatgtgtcatttaactctgcctgagactttcagtgcactgtatatagaagtctaaaacacacctaagagaaaaagatcgaatttttcagatgattcagaaattttcattcaggtatttgtaatagtgacatatatatgtatatacatatcacctcctattctcttaatttttcttaaaatgttaactggcagtaagtcttttttgatcattcccttttccatataggaaacataattttgaagtggccagatgagtttatcatgtcagtgaaaaataattacccacaaatgccaccagaacttacgattcttcacttcttggggttttcagtatgaacctaactccccaccccaacatctccctcccacattgtcaccatttcaaagggcccacagtgacttttgctgggcattttcccagatgtttacagactgtgagtacagcagaaaatcttttactagtgtgtgtgtgtatatatataaacaattgtaaatttcttttagcccatttttctagactgtctctgtggaatatatttgtgtgtgtgatatatgcatgtgtgtgatggtatgtatggatttaatctaatctaataattgtgccccgcagttgtgccaaagtgcatagtctgagtaaaatctaggtgattgttcatcatgacaacctgcctcagtccattttaacctgtagcaaccttctgcattcataaatcttgtaatcatgttaccattacaaatgggatataagaggcagcgtgaaagcagatgagctgtggactagcaatatagggttttgtttggttggttggtttgataaagcagtatttggggtcatattgtttcctgtgctggagcaaaagtcattacactttgaagtattatattgttcttatcctcaattcaatgtggtgatgaaattgccaggttgtctgatatttctttcagacttcgccagacagattgctgataataaattaggtaagataatttgttgggccatattttaggacaggtaaaataacatcaggttccagttgcttgaattgcaaggctaagaagtactgcccttttgtgtgttagcagtcaaatctattattccactggcgcatcatatgcagtgatatatgcctataatataagccataggttcacaccattttgtttagacaattgtctttttttcaagatgctttgtttctttcatatgaaaaaaatgcattttataaattcagaaagtcatagatttctgaaggcgtcaacgtgcattttatttatggactggtaagtaactgtggtttactagcaggaatatttccaatttctacctttactacatcttttcaacaagtaactttgtagaaatgagccagaagccaaggccctgagttggcagtggcccataagtgtaaaataaaagtttacagaaaccttgcaagtgtctcttcat

SEQ ID NO: 447546 - DNA, 3949 bp, Homo sapiens
ctttttagtggccgcgtcccaggatagctggaattcgcggccgcctcttgcggtcccagagtggagtggaaggtctggagctttgggaggagacggggaggacagactggaggcgtgttcctccggagttttctttttcgtgcgagccctcgcgcgcgcgtacagtcatcccgctggtctgacgattgtggagaggcggtggagaggcttcatccatcccacccggtcgtcgccggggattggggtcccagcgagacctccccgggagaagcagtgcccaggaagttttctgaagccggggaagctgtgcagccgaagccgccgccgcgccggagcccgggacaccggccaccctccgcgccacccaccctcgccggctccggcttcctctggcccaggcgccgcgcggacccggcagctgtctgcgcacgccgagctccacggtgaaaaaaaagtgaaggtgtaaaagcagcacaagtgcaataagagatatttcctcaaatttgcctcaagatggaaaccctttgcctcagggcatccttttggctggcactggttggatgtgtaatcagtgataatcctgagagatacagcacaaatctaagcaatcatgtggatgatttcaccacttttcgtggcacagagctcagcttcctggttaccactcatcaacccactaatttggtcctacccagcaatggctcaatgcacaactattgcccacagcagactaaaattacttcagctttcaaatacattaacactgtgatatcttgtactattttcatcgtgggaatggtggggaatgcaactctgctcaggatcatttaccagaacaaatgtatgaggaatggccccaacgcgctgatagccagtcttgcccttggagaccttatctatgtggtcattgatctccctatcaatgtatttaagctgctggctgggcgctggccttttgatcacaatgactttggcgtatttctttgcaagctgttcccctttttgcagaagtcctcggtggggatcaccgtcctcaacctctgcgctcttagtgttgacagttctaccaagatgtaaaggactggtggctcttcgggttctatttctgtatgcccttggtgtgcactgcgatcttctacaccctcatgacttgtgagatgttgaacagaaggaatggcagcttgagaattgccctcagtgaacatcttaagcagcgtcgagaagtggcaaaaacagttttctgcttggttgtaatttttgctctttgctggttccctcttcacttaagccgtatattgaagaaaactgtgtataacgaaatggacaagaaccgatgtgaattacttagtttcttactgctcatggattacatcggtattaacttggcaaccatgaattcatgtataaaccccatagctctgtattttgtgagcaagaaatttaaaaattgtttccagtcatgcctctgctgctgctgttaccagtccaaaagtctgatgacctcggtccccatgaacggaacaagcatccagtggaagaaccacgatcaaaacaaccacaacacagaccggagcagccataaggacagcatgaactgaccacccttagaagcactcctcggtactcccataatcctctcggagaaaaaaatcacaaggcaactgtgagtccgggaatctcttctctgatccttcttccttaattcactcccacacccaagaagaaatgctttccaaaaccgcaagggtagactggtttatccacccacaacatctacgaatcgtacttctttaattgatctaatttacatattctgcgtgttgtattcagcactaaaaaatggtgggagctgggggagaatgaagactgttaaatgaaaccagaaggatatttactacttttgcatgaaaatagagctttcaagtacatggctagcttttatggcagttctggtgaatgttcaatgggaactggtcaccatgaaactttagagattaacgacaagattttctactttttttaagtgatttttttgtccttcagccaaacacaatatgggctcaagtcacttttatttgaaatgtcatttggtgccagtattttttaactgcataatagcctaacatgattatttgaacttatttacacatagtttgaaaaaaaaaagacaaaaatagtattcaggtgagcaattagattagtattttccacgtcactgtttatttttttaaaacacaaattctaaagctacaacaaatactacaggcccttaaagcacagtctgatgacacatttggcagtttaatagatgttactcaaagaattttttaagaactgtattttattttttaaatggtgttttattacaagggaccttgaacatgttttgtatgttaaattcaaaagtaatgcttcaatcagatagttctttttcacaagttcaatctgtttttcatgtaaattttgtatgaaaaatcaatgtcaagtaccaaaatgttaatgtatgtgtcatttaactctgcctgagactttcagtgcactgtatatagaagtctaaaacacacctaagagaaaaagatcgaatttttcagatgattcagaaattttcattcaggtatttgtaatagtgacatatatatgtatatacatatcacctcctattctcttaatttttcttaaaatgttaactggcagtaagtcttttttgatcattcccttttccatataggaaacataattttgaagtggccagatgagtttatcatgtcagtgaaaaataattacccacaaatgccaccagaacttacgattcttcacttcttggggttttcagtatgaacctaactccccaccccaacatctccctcccacattgtcaccatttcaaagggcccacagtgacttttgctgggcattttcccagatgtttacagactgtgagtacagcagaaaatcttttactagtgtgtgtgtgtatatatataaacaattgtaaatttcttttagcccatttttctagactgtctctgtggaatatatttgtgtgtgtgatatatgcatgtgtgtgatggtatgtatggatttaatctaatctaataattgtgccccgcagttgtgccaaagtgcatagtctgagtaaaatctaggtgattgttcatcatgacaacctgcctcagtccattttaacctgtagcaaccttctgcattcataaatcttgtaatcatgttaccattacaaatgggatataagaggcagcgtgaaagcagatgagctgtggactagcaatatagggttttgtttggttggttggtttgataaagcagtatttggggtcatattgtttcctgtgctggagcaaaagtcattacactttgaagtattatattgttcttatcctcaattcaatgtggtgatgaaattgccaggttgtctgatatttctttcagacttcgccagacagattgctgataataaattaggtaagataatttgttgggccatattttaggacaggtaaaataacatcaggttccagttgcttgaattgcaaggctaagaagtactgcccttttgtgtgttagcagtcaaatctattattccactggcgcatcatatgcagtgatatatgcctataatataagccataggttcacaccattttgtttagacaattgtctttttttcaagatgctttgtttctttcatatgaaaaaaatgcattttataaattcagaaagtcatagatttctgaaggcgtcaacgtgcattttatttatggactggtaagtaactgtggtttactagcaggaatatttccaatttctacctttactacatcttttcaacaagtaactttgtagaaatgagccagaagccaaggccctgagttggcagtggcccataagtgtaaaataaaagtttacagaaaccttgcaagtgtctcttcat

SEQ ID NO: 447547 - DNA, 4020 bp, Homo sapiens
ctttttagtggccgcgtcccaggatagctggaattcgcggccgcctcttgcggtcccagagtggagtggaaggtctggagctttgggaggagacggggaggacagactggaggcgtgttcctccggagttttctttttcgtgcgagccctcgcgcgcgcgtacagtcatcccgctggtctgacgattgtggagaggcggtggagaggcttcatccatcccacccggtcgtcgccggggattggggtcccagcgagacctccccgggagaagcagtgcccaggaagttttctgaagccggggaagctgtgcagccgaagccgccgccgcgccggagcccgggacaccggccaccctccgcgccacccaccctcgccggctccggcttcctctggcccaggcgccgcgcggacccggcagctgtctgcgcacgccgagctccacggtgaaaaaaaagtgaaggtgtaaaagcagcacaagtgcaataagagatatttcctcaaatttgcctcaagatggaaaccctttgcctcagggcatccttttggctggcactggttggatgtgtaatcagtgataatcctgagagatacagcacaaatctaagcaatcatgtggatgatttcaccacttttcgtggcacagagctcagcttcctggttaccactcatcaacccactaatttggtcctacccagcaatggctcaatgcacaactattgcccacagcagactaaaattacttcagctttcaaatacattaacactgtgatatcttgtactattttcatcgtgggaatggtggggaatgcaactctgctcaggatcatttaccagaacaaatgtatgaggaatggccccaacgcgctgatagccagtcttgcccttggagaccttatctatgtggtcattgatctccctatcaatgtatttaaggtacagagcagttgcctcctggagtcgtgttcagggaattgggattcctttggtaactgccattgaaattgtctccatctggatcctgtcctttatcctggccattcctgaagcgattggcttcgtcatggtaccctttgaatataggggtgaacagcataaaacctgtatgctcaatgccacatcaaaattcatggagttctaccaagatgtaaaggactggtggctcttcgggttctatttctgtatgcccttggtgtgcactgcgatcttctacaccctcatgacttgtgagatgttgaacagaaggaatggcagcttgagaattgccctcagtgaacatcttaagcagcgtcgagaagtggcaaaaacagttttctgcttggttgtaatttttgctctttgctggttccctcttcacttaagccgtatattgaagaaaactgtgtataacgaaatggacaagaaccgatgtgaattacttagtttcttactgctcatggattacatcggtattaacttggcaaccatgaattcatgtataaaccccatagctctgtattttgtgagcaagaaatttaaaaattgtttccagtcatgcctctgctgctgctgttaccagtccaaaagtctgatgacctcggtccccatgaacggaacaagcatccagtggaagaaccacgatcaaaacaaccacaacacagaccggagcagccataaggacagcatgaactgaccacccttagaagcactcctcggtactcccataatcctctcggagaaaaaaatcacaaggcaactgtgagtccgggaatctcttctctgatccttcttccttaattcactcccacacccaagaagaaatgctttccaaaaccgcaagggtagactggtttatccacccacaacatctacgaatcgtacttctttaattgatctaatttacatattctgcgtgttgtattcagcactaaaaaatggtgggagctgggggagaatgaagactgttaaatgaaaccagaaggatatttactacttttgcatgaaaatagagctttcaagtacatggctagcttttatggcagttctggtgaatgttcaatgggaactggtcaccatgaaactttagagattaacgacaagattttctactttttttaagtgatttttttgtccttcagccaaacacaatatgggctcaagtcacttttatttgaaatgtcatttggtgccagtattttttaactgcataatagcctaacatgattatttgaacttatttacacatagtttgaaaaaaaaaagacaaaaatagtattcaggtgagcaattagattagtattttccacgtcactgtttatttttttaaaacacaaattctaaagctacaacaaatactacaggcccttaaagcacagtctgatgacacatttggcagtttaatagatgttactcaaagaattttttaagaactgtattttattttttaaatggtgttttattacaagggaccttgaacatgttttgtatgttaaattcaaaagtaatgcttcaatcagatagttctttttcacaagttcaatctgtttttcatgtaaattttgtatgaaaaatcaatgtcaagtaccaaaatgttaatgtatgtgtcatttaactctgcctgagactttcagtgcactgtatatagaagtctaaaacacacctaagagaaaaagatcgaatttttcagatgattcagaaattttcattcaggtatttgtaatagtgacatatatatgtatatacatatcacctcctattctcttaatttttcttaaaatgttaactggcagtaagtcttttttgatcattcccttttccatataggaaacataattttgaagtggccagatgagtttatcatgtcagtgaaaaataattacccacaaatgccaccagaacttacgattcttcacttcttggggttttcagtatgaacctaactccccaccccaacatctccctcccacattgtcaccatttcaaagggcccacagtgacttttgctgggcattttcccagatgtttacagactgtgagtacagcagaaaatcttttactagtgtgtgtgtgtatatatataaacaattgtaaatttcttttagcccatttttctagactgtctctgtggaatatatttgtgtgtgtgatatatgcatgtgtgtgatggtatgtatggatttaatctaatctaataattgtgccccgcagttgtgccaaagtgcatagtctgagtaaaatctaggtgattgttcatcatgacaacctgcctcagtccattttaacctgtagcaaccttctgcattcataaatcttgtaatcatgttaccattacaaatgggatataagaggcagcgtgaaagcagatgagctgtggactagcaatatagggttttgtttggttggttggtttgataaagcagtatttggggtcatattgtttcctgtgctggagcaaaagtcattacactttgaagtattatattgttcttatcctcaattcaatgtggtgatgaaattgccaggttgtctgatatttctttcagacttcgccagacagattgctgataataaattaggtaagataatttgttgggccatattttaggacaggtaaaataacatcaggttccagttgcttgaattgcaaggctaagaagtactgcccttttgtgtgttagcagtcaaatctattattccactggcgcatcatatgcagtgatatatgcctataatataagccataggttcacaccattttgtttagacaattgtctttttttcaagatgctttgtttctttcatatgaaaaaaatgcattttataaattcagaaagtcatagatttctgaaggcgtcaacgtgcattttatttatggactggtaagtaactgtggtttactagcaggaatatttccaatttctacctttactacatcttttcaacaagtaactttgtagaaatgagccagaagccaaggccctgagttggcagtggcccataagtgtaaaataaaagtttacagaaaccttgcaagtgtctcttcat

SEQ ID NO: 447548 - DNA, 3243 bp, Homo sapiens
agcggggcgggcggagggccgaaagtccagtatgtgggtccaggtcactcttctagagcttccgcaacggaaagtgtgagtttttcaggaattgttcagatggatgaagatacacattacgataaagtggaagatgtggttggaagtcacatagaagatgcagtaacattttgggcccagagtatcaatagaaataaggatatcatgaagattggttgctcactgtctgaagtttgcccccaggccagttcagttttggggaatcttgacccaaacaagatttatggtggattattttctgaagatcagtgttggtacagatgcaaagtactgaaaatcatcagcgttgaaaagtgtctggtgaggtacattgactatggaaatactgaaattctaaatcgatctgatatagttgaaattcctttggagctgcagttttctagtgttgccaaaaagtataaactttggggactacacattccttctgatcaagaagttacccagtttgatcagggcacaacctttttggggagcttgatttttgaaaaggaaataaaaatgagaattaaagcaacctctgaagatggaacagttattgctcaggctgagtatggcagtgtggatataggggaagaggtgcttaagaaaggatttgcagagaaatgcagacttgcttccagaactgacatctgtgaggaaaaaaaattggatcctggtcaacttgttctcaggaacctcaaaagccccattcctttgtgggggcatagatcaaaccagtcaaccttcagcaggcccaaggggcacttaagtgagaaaatgactcttgacttgaaggatgaaaatgatgcaggcaatcttataacatttccaaaggaaagtttggctgttggtgactttaatttagggtctaacgtcagcctggaaaaaattaagcaggaccagaaactgattgaagaaaatgaaaaacttaaaacagagaaggacgctcttcttgaaagttataaggcgttagaattgaaagtagagcagattgcccaggagctgcagcaagagaaggcagctgctgtggatttgactaaccacttagaatacactctgaagacctatatagataccagaatgaaaaatctggcagctaagatggaaatactgaaagaaatgaggcatgtcgacatcagtgtccgtttcggaaaagacctttcagatgctatacaagtgttggatgaagggtgctttactactccagcttctttgaatggattagagataatatgggcagaatacagtctggctcaggagaatattaaaacttgtgaatatgtgagtgaagggaatattttgattgcccaaagaaatgaaatgcagcagaagctgtacatgtcagtagaagattttattctggaagttgatgagtcatctcttaataaacgcttaaaaacattgcaggatttgtcagtctctttagaagcagtgtatggacaagccaaagaaggagcaaattctgatgaaatacttaaaaaattttatgactggaagtgtgataaaagagaggagttcaccagtgttagaagtgaaacagacgcttctctgcaccgtcttgtagcatggttccaaagaaccttaaaggtttttgacctatctgtggaaggatcactgatttcagaagacgcaatggataatattgatgaaatcctagagaagactgagtcaagtgtctgcaaagagctggagatagctctggttgatcaaggtgatgcagacaaggagataatttcaaatacatatagtcaagtactgcaaaagattcattcagaggaaaggctcattgccacagtacaagctaagtacaaggacagtattgagtttaaaaagcagcttattgaatatttaaataagagtcccagtgtggatcacttgctatccattaagaagacattgaaaagcttaaaagctctactcagatggaaattggttgaaaagagtaatttggaagagtcagatgatcctgatggctctcaaattgagaaaataaaagaagaaataactcagctgcgcaataatgtctttcaggaaatttatcatgagagagaggaatatgagatgctaactagtttggcacagaaatggttccctgagctgcctctgcttcatcctgaaataggattactcaaatacatgaactctggtggtctccttacaatgagcttggaacgagatcttcttgatgctgagcccatgaaggaacttagcagcaagcgtcctttggtacgttctgaggttaatgggcagataattctgttaaagggctattctgtggatgttgacacagaagccaaggtgattgagagagcagccacctaccatagagcttggagagaagctgaaggagactcagggttactgccattgatattcctgtttttatgtaagtctgatcctatggcttatctgatggtcccatactaccctagggcaaacctgaatgctgttcaagccaacatgcctttaaattcagaagaaactttaaaggtcatgaaaggtgttgcccagggtctgcatacattgcataaggctgacataattcatggatcacttcatcagaacaatgtatttgctttaaaccgtgaacaaggaattgttggagattttgacttcaccaaatctgtgagtcagcgagcctcggtgaacatgatggttggtgacttgagtttgatgtcacctgagttgaaaatgggaaaacctgcttctccaggttcagacttatatgcttatggctgcctcttattatggctttctgttcaaaatcaggagtttgagataaataaagatggaatccccaaagtggatcagtttcatctggatgataaagtcaaatccctcctctgtagcttgatatgttatagaagttcaatgactgctgaacaagttttaaatgctgaatgtttcttgatgccaaaggagcaatcagttccaaacccagaaaaagatactgaatacaccctatataaaaaggaagaagaaataaagacggagaacttggataaatgtatggagaagacaagaaatggtgaagccaactttgattgttaaattattattgttgttgttgcagaggttctttttaaaaactttgtttggtttggttaatacacagaaatatctagaaatgttctgggactagttgagttgtatctttagtattcaggttgtgaaaaataaagatgtttggctatgcacttaaaa

SEQ ID NO: 447549 - DNA, 569 bp, Homo sapiens
ctattgatatgcttcctattacctattgtgtactttctacaaattggcttgatgtatattttaggtatcatgctattgtcttggttctgttgaagtcaagattaacagtgaagatgattttgtcctacattaatctgaaagcagttcatgcatatatggaaaataaatgttaaataagccttgggtatattcctgcttccagtgtagaccaaatagctgtttctcatccatagtttaagaattaagaagttggatggagctggagaccattatcctaagcgaatttactgtggatcagaaagccaaatactgcatgttctcacttataagtgggagctaaacactgagtacatatggacacaaagaagggacactggggtctacttgagggtggaggttgggagaaaggtaaggattgaaaaactacctgttaggtattaggctgattacctgggtgacaaaattatctgtacaccaaactcccatgacacactgtttacccatgtaacaaacctgcacatgtaccccttgaacctaaaataaaagttggaagacaaaaaaataaaaag

SEQ ID NO: 447550 - DNA, 3126 bp, Homo sapiens
agcggggcgggcggagggccgaaagtccagtatgtgggtccaggtcactcttctagagcttccgcaacggaaagtgtgagtttttcaggaattgttcagatggatgaagatacacattacgataaagtggaagatgtggttggaagtcacatagaagatgcagtaacattttgggcccagagtatcaatagaaataaggatatcatgaagattggttgctcactgtctgaagtttgcccccaggccagttcagttttggggaatcttgacccaaacaagatttatggtggattattttctgaagatcagtgttggtacagatgcaaagtactgaaaatcatcagcgttgaaaagtgtctggtgaggtacattgactatggaaatactgaaattctaaatcgatctgatatagttgaaattcctttggagctgcagttttctagtgttgccaaaaagtataaactttggggactacacattccttctgatcaagaagttacccagtttgatcagggcacaacctttttggggagcttgatttttgaaaaggaaataaaaatgagaattaaagcaacctctgaagatggaacagttattgctcaggctgagtatggcagtgtggatataggggaagaggtgcttaagaaaggatttgcagagaaatgcagacttgcttccagaactgacatctgtgaggaaaaaaaattggatcctggtcaacttgttctcaggaacctcaaaagccccattcctttgtgggggcatagatcaaaccagtcaaccttcagcaggcccaaggggcacttaagtgagaaaatgactcttgacttgaaggatgaaaatgatgcaggcaatcttataacatttccaaaggaaagtttggctgttggtgactttaatttagggtctaacgtcagcctggaaaaaattaagcaggaccagaaactgattgaagaaaatgaaaaacttaaaacagagaaggacgctcttcttgaaagttataaggcgttagaattgaaagtagagcagattgcccaggagctgcagcaagagaaggcagctgctgtggatttgactaaccacttagaatacactctgaagacctatatagataccagaatgaaaaatctggcagctaagatggaaatactgaaagaaatgaggcatgtcgacatcagtgtccgtttcggaaaagacctttcagatgctatacaagtgttggatgaagggtgctttactactccagcttctttgaatggattagagataatatgggcagaatacagtctggctcaggagaatattaaaacttgtgaatatgtgagtgaagggaatattttgattgcccaaagaaatgaaatgcagcagaagctgtacatgtcagtagaagattttattctggaagttgatgagtcatctcttaataaacgcttaaaaacattgcaggatttgtcagtctctttagaagcagtgtatggacaagccaaagaaggagcaaattctgatgaaatacttaaaaaattttatgactggaagtgtgataaaagagaggagttcaccagtgttagaagtgaaacagacgcttctctgcaccgtcttgtagcatggttccaaagaaccttaaaggtttttgacctatctgtggaaggatcactgatttcagaagacgcaatggataatattgatgaaatcctagagaagactgagtcaagtgtctgcaaagagctggagatagctctggttgatcaaggtgatgcagacaaggagataatttcaaatacatatagtcaagtactgcaaaagattcattcagaggaaaggctcattgccacagtacaagctaagtacaaggacagtattgagtttaaaaagcagcttattgaatatttaaataagagtcccagtgtggatcacttgctatccattaagaagacattgaaaagcttaaaagctctactcagatggaaattggttgaaaagagtaatttggaagagtcagatgatcctgatggctctcaaattgagaaaataaaagaagaaataactcagctgcgcaataatgtctttcaggaaatttatcatgagagagaggaatatgagatgctaactagtttggcacagaaatggttccctgagctgcctctgcttcatcctgaaataggattactcaaatacatgaactctggtggtctccttacaatgagcttggaacgagatcttcttgatgctgagcccatgaaggaacttagcagcaagcgtcctttggtacgttctgaggttaatgggcagataattctgttaaagggctattctgtggatgttgacacagaagccaaggtgattgagagagcagccacctaccatagagcttggagagaagctgaaggagactcagggttactgccattgatattcctgtttttatgtaagtctgatcctatggcttatctgatggtcccatactaccctagggcaaacctgaatgctgttcaagccaacatgcctttaaattcagaagaaactttaaaggtcatgaaaggtgttgcccagggtctgcatacattgcataaggctgacataattcatggatcacttcatcagaacaatgtatttgctttaaaccgtgaacaaggaattgttggagattttgacttcaccaaatctgtgagtcagcgagcctcggtgaacatgatggttggtgacttgagtttgatgtcacctgagttgaaaatgggaaaacctgcttctccaggttcagacttatatgcttatggctgcctcttattatggtttaagaattaagaagttggatggagctggagaccattatcctaagcgaatttactgtggatcagaaagccaaatactgcatgttctcacttataagtgggagctaaacactgagtacatatggacacaaagaagggacactggggtctacttgagggtggaggttgggagaaaggtaaggattgaaaaactacctgttaggtattaggctgattacctgggtgacaaaattatctgtacaccaaactcccatgacacactgtttacccatgtaacaaacctgcacatgtaccccttgaacctaaaataaaagttggaagacaaaaaaataaaaag

SEQ ID NO: 447551 - DNA, 1835 bp, Homo sapiens
  misc_feature (24)..(24): n is a, c, g, or t
gatgctgagacgactctcttaatnctccaccgctacacgatttgtcagtctctttagaagcagtgtatggacaagccaaagaaggagcaaattctgatgaaatacttaaaaaattttatgactggaagtgtgataaaagagaggagttcaccagtgttagaagtgaaacagacgcttctctgcaccgtcttgtagcatggttccaaagaaccttaaaggtttttgacctatctgtggaaggatcactgatttcagaagacgcaatggataatattgatgaaatcctagagaagactgagtcaagtgtctgcaaagagctggagatagctctggttgatcaaggtgatgcagacaaggagataatttcaaatacatatagtcaagtactgcaaaagattcattcagaggaaaggctcattgccacagtacaagctaagtacaaggacagtattgagtttaaaaagcagcttattgaatatttaaataagagtcccagtgtggatcacttgctatccattaagaagacattgaaaagcttaaaagctctactcagatggaaattggttgaaaagagtaatttggaagagtcagatgatcctgatggctctcaaattgagaaaataaaagaagaaataactcagctgcgcaataatgtctttcaggaaatttatcatgagagagaggaatatgagatgctaactagtttggcacagaaatggttccctgagctgcctctgcttcatcctgaaataggattactcaaatacatgaactctggtggtctccttacaatgagcttggaacgagatcttcttgatgctgagcccatgaaggaacttagcagcaagcgtcctttggtacgttctgaggttaatgggcagataattctgttaaagggctattctgtggatgttgacacagaagccaaggtgattgagagagcagccacctaccatagagcttggagagaagctgaaggagactcagggttactgccattgatattcctgtttttatgtaagtctgatcctatggcttatctgatggtcccatactaccctagggcaaacctgaatgctgttcaagccaacatgcctttaaattcagaagaaactttaaaggtcatgaaaggtgttgcccagggtctgcatacattgcataaggctgacataattcatggatcacttcatcagaacaatgtatttgctttaaaccgtgaacaaggaattgttggagattttgacttcaccaaatctgtgagtcagcgagcctcggtgaacatgatggttggtgacttgagtttgatgtcacctgagttgaaaatgggaaaacctgcttctccaggttcagacttatatgcttatggctgcctcttattatggctttctgttcaaaatcaggagtttgagataaataaagatggaatccccaaagtggatcagtttcatctggatgataaagtcaaatccctcctctgtagcttgatatgttatagaagttcaatgactgctgaacaagttttaaatgctgaatgtttcttgatgccaaaggagcaatcagttccaaacccagaaaaagatactgaatacaccctatataaaaaggaagaagaaataaagacggagaacttggataaatgtatggagaagacaagaaatggtgaagccaactttgattgttaaattattattgttgttgttgcagaggttctttttaaaaactttgtttggtttggttaatacacagaaatatctagaaatgttctgggactagttgagttgtatctttagtattcaggttgtgaaaaataaagatgtttggctatgcacttaaaa

SEQ ID NO: 447552 - DNA, 380 bp, Homo sapiens
tctaaatcgatctgatatagttgaaattcctttggagctgcagttttctagtgttgccaaaaagtataaactttggggactacacattccttctgatcaagaagttacccagtttgatcaggcaagtcacgtattttaaatatttttgctaatgaaagtaaaactatgtgcttgaaacaaaatgtaggtatagttaaatcttactttaatataaaagtctgtataaattagtgaaaaataggaattataattagaaagcaattatatatttatgctcatctttgctaggtaaacattgaacagataagaatgacatacacatatataatatatgtaaatagtttccttctgatgtaaatgtttaaaaggatagtctcttt

SEQ ID NO: 447553 - DNA, 3678 bp, Homo sapiens
agcggggcgggcggagggccgaaagtccagtatgtgggtccaggtcactcttctagagcttccgcaacggaaagtgtgaggtcagtagtagtttttgtggtacgtgcagtggtggccgcttcaaggactattttcgtcgctgcttgcgttttaagtctccaatcctgggacgaggcccatttcagggttttctgtcaccttctagccgcccgccaccccagaggggtgccagatgccccagtttttgagtgcatgcaggcaggcgaaagtggctcgaaaagacctccggcctgaatgatctccatgaagacgcggtcacgcagcctccacactctcttccccttctcgaaaattctgtgccatttaagtttcaaaatcccttataaaataagtgtcagagagctacgtgtacccgtttcttccaaattttcatcacgaagtggagatttggacgtactattttgtgatctctgtttgcagaaagtgggtacggcatcagtgccttcataatcaggtttttcaggaattgttcagatggatgaagatacacattacgataaagtggaagatgtggttggaagtcacatagaagatgcagtaacattttgggcccagagtatcaatagaaataaggatatcatgaagattggttgctcactgtctgaagtttgcccccaggccagttcagttttggggaatcttgacccaaacaagatttatggtggattattttctgaagatcagtgttggtacagatgcaaagtactgaaaatcatcagcgttgaaaagtgtctggtgaggtacattgactatggaaatactgaaattctaaatcgatctgatatagttgaaattcctttggagctgcagttttctagtgttgccaaaaagtataaactttggggactacacattccttctgatcaagaagttacccagtttgatcagggcacaacctttttggggagcttgatttttgaaaaggaaataaaaatgagaattaaagcaacctctgaagatggaacagttattgctcaggctgagtatggcagtgtggatataggggaagaggtgcttaagaaaggatttgcagagaaatgcagacttgcttccagaactgacatctgtgaggaaaaaaaattggatcctggtcaacttgttctcaggaacctcaaaagccccattcctttgtgggggcatagatcaaaccagtcaaccttcagcaggcccaaggggcacttaagtgagaaaatgactcttgacttgaaggatgaaaatgatgcaggcaatcttataacatttccaaaggaaagtttggctgttggtgactttaatttagggtctaacgtcagcctggaaaaaattaagcaggaccagaaactgattgaagaaaatgaaaaacttaaaacagagaaggacgctcttcttgaaagttataaggcgttagaattgaaagtagagcagattgcccaggagctgcagcaagagaaggcagctgctgtggatttgactaaccacttagaatacactctgaagacctatatagataccagaatgaaaaatctggcagctaagatggaaatactgaaagaaatgaggcatgtcgacatcagtgtccgtttcggaaaagacctttcagatgctatacaagtgttggatgaagggtgctttactactccagcttctttgaatggattagagataatatgggcagaatacagtctggctcaggagaatattaaaacttgtgaatatgtgagtgaagggaatattttgattgcccaaagaaatgaaatgcagcagaagctgtacatgtcagtagaagattttattctggaagttgatgagtcatctcttaataaacgcttaaaaacattgcaggatttgtcagtctctttagaagcagtgtatggacaagccaaagaaggagcaaattctgatgaaatacttaaaaaattttatgactggaagtgtgataaaagagaggagttcaccagtgttagaagtgaaacagacgcttctctgcaccgtcttgtagcatggttccaaagaaccttaaaggtttttgacctatctgtggaaggatcactgatttcagaagacgcaatggataatattgatgaaatcctagagaagactgagtcaagtgtctgcaaagagctggagatagctctggttgatcaaggtgatgcagacaaggagataatttcaaatacatatagtcaagtactgcaaaagattcattcagaggaaaggctcattgccacagtacaagctaagtacaaggacagtattgagtttaaaaagcagcttattgaatatttaaataagagtcccagtgtggatcacttgctatccattaagaagacattgaaaagcttaaaagctctactcagatggaaattggttgaaaagagtaatttggaagagtcagatgatcctgatggctctcaaattgagaaaataaaagaagaaataactcagctgcgcaataatgtctttcaggaaatttatcatgagagagaggaatatgagatgctaactagtttggcacagaaatggttccctgagctgcctctgcttcatcctgaaataggattactcaaatacatgaactctggtggtctccttacaatgagcttggaacgagatcttcttgatgctgagcccatgaaggaacttagcagcaagcgtcctttggtacgttctgaggttaatgggcagataattctgttaaagggctattctgtggatgttgacacagaagccaaggtgattgagagagcagccacctaccatagagcttggagagaagctgaaggagactcagggttactgccattgatattcctgtttttatgtaagtctgatcctatggcttatctgatggtcccatactaccctagggcaaacctgaatgctgttcaagccaacatgcctttaaattcagaagaaactttaaaggtcatgaaaggtgttgcccagggtctgcatacattgcataaggctgacataattcatggatcacttcatcagaacaatgtatttgctttaaaccgtgaacaaggaattgttggagattttgacttcaccaaatctgtgagtcagcgagcctcggtgaacatgatggttggtgacttgagtttgatgtcacctgagttgaaaatgggaaaacctgcttctccaggttcagacttatatgcttatggctgcctcttattatggctttctgttcaaaatcaggagtttgagataaataaagatggaatccccaaagtggatcagtttcatctggatgataaagtcaaatccctcctctgtagcttgatatgttatagaagttcaatgactgctgaacaagttttaaatgctgaatgtttcttgatgccaaaggagcaatcagttccaaacccagaaaaagatactgaatacaccctatataaaaaggaagaagaaataaagacggagaacttggataaatgtatggagaagacaagaaatggtgaagccaactttgattgttaaattattattgttgttgttgcagaggttctttttaaaaactttgtttggtttggttaatacacagaaatatctagaaatgttctgggactagttgagttgtatctttagtattcaggttgtgaaaaataaagatgtttggctatgcacttaaaa

SEQ ID NO: 447554 - DNA, 2709 bp, Homo sapiens
agcggggcgggcggagggccgaaagtccagtatgtgggtccaggtcactcttctagagcttccgcaacggaaagtgtgagtttttcaggaattgttcagatggatgaagatacacattacgataaagtggaagatgtggttggaagtcacatagaagatgcagtaacattttgggcccagagtatcaatagaaataaggatatcatgaagattggttgctcactgtctgaagtttgcccccaggccagttcagttttggggaatcttgacccaaacaagatttatggtggattattttctgaagatcagtgttggtacagatgcaaagtactgaaaatcatcagcgttgaaaagtgtctggtgaggtacattgactatggaaatactgaaattctaaatcgatctgatatagttgaaattcctttggagctgcagttttctagtgttgccaaaaagtataaactttggggactacacattccttctgatcaagaagttacccagtttgatcagcaagagaaggcagctgctgtggatttgactaaccacttagaatacactctgaagacctatatagataccagaatgaaaaatctggcagctaagatggaaatactgaaagaaatgaggcatgtcgacatcagtgtccgtttcggaaaagacctttcagatgctatacaagtgttggatgaagggtgctttactactccagcttctttgaatggattagagataatatgggcagaatacagtctggctcaggagaatattaaaacttgtgaatatgtgagtgaagggaatattttgattgcccaaagaaatgaaatgcagcagaagctgtacatgtcagtagaagattttattctggaagttgatgagtcatctcttaataaacgcttaaaaacattgcaggatttgtcagtctctttagaagcagtgtatggacaagccaaagaaggagcaaattctgatgaaatacttaaaaaattttatgactggaagtgtgataaaagagaggagttcaccagtgttagaagtgaaacagacgcttctctgcaccgtcttgtagcatggttccaaagaaccttaaaggtttttgacctatctgtggaaggatcactgatttcagaagacgcaatggataatattgatgaaatcctagagaagactgagtcaagtgtctgcaaagagctggagatagctctggttgatcaaggtgatgcagacaaggagataatttcaaatacatatagtcaagtactgcaaaagattcattcagaggaaaggctcattgccacagtacaagctaagtacaaggacagtattgagtttaaaaagcagcttattgaatatttaaataagagtcccagtgtggatcacttgctatccattaagaagacattgaaaagcttaaaagctctactcagatggaaattggttgaaaagagtaatttggaagagtcagatgatcctgatggctctcaaattgagaaaataaaagaagaaataactcagctgcgcaataatgtctttcaggaaatttatcatgagagagaggaatatgagatgctaactagtttggcacagaaatggttccctgagctgcctctgcttcatcctgaaataggattactcaaatacatgaactctggtggtctccttacaatgagcttggaacgagatcttcttgatgctgagcccatgaaggaacttagcagcaagcgtcctttggtacgttctgaggttaatgggcagataattctgttaaagggctattctgtggatgttgacacagaagccaaggtgattgagagagcagccacctaccatagagcttggagagaagctgaaggagactcagggttactgccattgatattcctgtttttatgtaagtctgatcctatggcttatctgatggtcccatactaccctagggcaaacctgaatgctgttcaagccaacatgcctttaaattcagaagaaactttaaaggtcatgaaaggtgttgcccagggtctgcatacattgcataaggctgacataattcatggatcacttcatcagaacaatgtatttgctttaaaccgtgaacaaggaattgttggagattttgacttcaccaaatctgtgagtcagcgagcctcggtgaacatgatggttggtgacttgagtttgatgtcacctgagttgaaaatgggaaaacctgcttctccaggttcagacttatatgcttatggctgcctcttattatggctttctgttcaaaatcaggagtttgagataaataaagatggaatccccaaagtggatcagtttcatctggatgataaagtcaaatccctcctctgtagcttgatatgttatagaagttcaatgactgctgaacaagttttaaatgctgaatgtttcttgatgccaaaggagcaatcagttccaaacccagaaaaagatactgaatacaccctatataaaaaggaagaagaaataaagacggagaacttggataaatgtatggagaagacaagaaatggtgaagccaactttgattgttaaattattattgttgttgttgcagaggttctttttaaaaactttgtttggtttggttaatacacagaaatatctagaaatgttctgggactagttgagttgtatctttagtattcaggttgtgaaaaataaagatgtttggctatgcacttaaaa

SEQ ID NO: 447555 - DNA, 2255 bp, Homo sapiens
  misc_feature (13)..(13): n is a, c, g, or t
  misc_feature (18)..(18): n is a, c, g, or t
  misc_feature (22)..(22): n is a, c, g, or t
  misc_feature (36)..(36): n is a, c, g, or t
  misc_feature (48)..(48): n is a, c, g, or t
  misc_feature (51)..(51): n is a, c, g, or t
  misc_feature (57)..(57): n is a, c, g, or t
  misc_feature (63)..(63): n is a, c, g, or t
  misc_feature (2113)..(2113): n is a, c, g, or t
cgaattcgagccngggtncccncgtccatccctggntgtactgtaganttntccctntcctgntgtctcacccctaagctcttccctgatcatgccccctctggagacccaatcttccctagccccaccctctctgcagacacctcctgcttccctgaccacaccccctctggagaacctaccttctctagccccgcctcctctgcagacagcttctgctcccctgaccacaccccatctggagactccaccttgtccagccccatgccctctgcaagcaccaccttcgccattgaccacgccccctccggagacgccctcttccatagccacgcctcctccacaggccccacctgctctggcctcaccccctttgcagggcctgccctctccccctctgtctcctttggccacgccccctccacaggccccacctgccctggccttgcctcctctgcaggcccctccctctccccctgcctcaccccctctgtctcctttggccacaccctctccacaggccccaaatgctctggcagtgcaccttctgcaggcccctttctctccccctccctcacccccagtgcaggcccctttctctccccctgcctcacccccagtgtctccttcggccacgcccccttcacaggccccaccctctctagccgcacctcctctgcaggtcccaccctctccccctgcctctcccccaatgtctccttcagccacgccccctccacaggccccaccccctctcgctgcgcctcctctgcaggtcccaccctctccccctgcctctcccccaatgtctccttcggccacgccccctccacgggtcccaccccttcttgccgctcctcctctgcaggtcccgccctctccccctgcctcactcccaatgtctcctttggctaagccccctccacaggccccacctgctctggccacacctcctctgcaggcccttccctctccgcctgcctcattccctgggcaggcccctttctcaccctctgcctcactcccaatgtctcctttggccacgcctcctccacaggccccacctgttctggcagcgccccttctgcaggtccctccctctccccctgcctcacccaccctgcaggccccacgccgccccccgaccccgggtccggatacctccgtctcgggcccacggctgaccctggcgttggcccccggcccgccgccgccgccctcgcgcagcccgtccagcacgctgagcggcccagacctggccggccacagcagcagcgccacgagcacgccagaggagctgcgtggctacgacagcgggcccgagggcggtgccgcagcctccccgccccccgacgcagagctcgccgcttgccacccggctgcctggagtcgaggccccgctccgccgctggctttccgcggagccccaggtgcgcccctgccgtggcctcccgctaccggaccgggctctgctgacggtctgtgcaccatctacgagactgaagggcccgagtcggcgacccccgcccctggcgcactggatccggggcccagtcccggcacgagcggtgggaaggcggcggctggggccggggccggggcgtcctcgcggagcccgaagcaggcgcgcctgggcgagctgccactgggggcgctgcaggcgagcgtcgtgcagcacctgctgagccggacgctgctgctggcggctgccgagggtgccgcgggcggcagcggcgggggcccaggaggtgcggagggtggtggcgtcacagggggcgcccgggctgcactcagcgacgccgaactcggccgctgggccgaactactgtctcccctggacgagtcccgtgccagcatcacctcggtcaccagcttctctccggacgacgtggcctccccgcagggtgactggaccgtggtggaggtggagaccttccactgagccagaccacagccccgcctgctacaccccacccctgccttaggatccgcccctccgggtacgccgtttgttttagaccccgcctccactgccctggagccccgctgggtggattagtcttagctccctagagcctgagcctttggcctcggaggctcgggacctacccanagctttgacctaggcccgcccctcgagctccgcccctttggcctaggacacgccccgtttccccgagtcccgccccgtgtgcagtgtattgcccaccccgcacagcctgagtttgcaataaaactgggacactgggacttgc

SEQ ID NO: 447556 - DNA, 1789 bp, Homo sapiens
  misc_feature (1647)..(1647): n is a, c, g, or t
ctcgccgctggcggccaccgcgtcgctccggcccgggccccaccccaggcgactctgtgaggagcggccggaggccggaggcggaggtgcaagatggacaacaagagagacaaggcgaaggcaggggccgccgcgcggacgccggctgctcgcgctcctggacttctgacccccaggcccccaggctctcctcgaccccctcccccagtaactcccgcagccctccgagttctgggagctgcgggagcagtggggcgaaagcctctggcagagcgagcggggggcatcggcggggccactattcccgagtctgctccccgagcgggaccaacgcggagtgctgggacaagttcccgaaaccctgcctccaggcccccagcctctgggagaggggagagagctcctcctgccaagaacaccagcccaggccctgtttctagcccagggcgtgccagcgggaccaccaggccaggccctcttggccagaagggactccggatctcagcggaggaaactgtggccagaggaaaagctacagaggctcccaaaaggagtgccctcagcgctggggcacggagagcccgttctgggccctcagcccgcggaacacccagggctcctgcgcatccctcgcagcccaagccgaaaggactgcaggctctgcgaccccctcaggtcacacccccaaggaaggacgcagcccagcactaggaccgctttcttcctctcctttggccacaccctctccatcgggtaccaagcccgtccagcacgctgagcggcccagacctggccggccacagcagcagcgccacgagcacgccagaggagctgcgtggctacgacagcgggcccgagggcggtgccgcagcctccccgccccccgacgcagagctcgccgcttgccacccggctgcctggagtcgaggccccgctccgccgctggctttccgcggagccccaggtgcgcccctgccgtggcctcccgctaccggaccgggctctgctgacggtctgtgcaccatctacgagactgaagggcccgagtcggcgacccccgcccctggcgcactggatccggggcccagtcccggcacgagcggtgggaaggcggcggctggggccggggccggggcgtcctcgcggagcccgaagcaggcgcgcctgggcgagctgccactgggggcgctgcaggcgagcgtcgtgcagcacctgctgagccggacgctgctgctggcggctgccgagggtgccgcgggcggcagcggcgggggcccaggaggtgcggagggtggtggcgtcacagggggcgcccgggctgcactcagcgacgccgaactcggccgctgggccgaactactgtctcccctggacgagtcccgtgccagcatcacctcggtcaccagcttctctccggacgacgtggcctccccgcagggtgactggaccgtggtggaggtggagaccttccactgagccagaccacagccccgcctgctacaccccacccctgccttaggatccgcccctccgggtacgccgtttgttttagaccccgcctccactgccctggagccccgctgggtggattagtcttagctccctagagcctgagcctttggcctcggaggctcgggacctacccanagctttgacctaggcccgcccctcgagctccgcccctttggcctaggacacgccccgtttccccgagtcccgccccgtgtgcagtgtattgcccaccccgcacagcctgagtttgcaataaaactgggacactgggacttgc

SEQ ID NO: 447557 - DNA, 2348 bp, Homo sapiens
  misc_feature (2206)..(2206): n is a, c, g, or t
ggcctctactccccctgattcaccccctctgcaggcccctctttcccttcctgcctcaccccctctgcagacttctctctctcctgctgtctcacccctaagctcacccctgaccatacaccctctgcaggcgctatcttctctggcctcccactctcctcaggcacctctctcttccctgatcatgccccctctggagacccaatcttccctagccccaccctctctgcagacacctcctgcttccctgaccacaccccctctggagaacctaccttctctagccccgcctcctctgcagacagcttctgctcccctgaccacaccccatctggagactccaccttgtccagccccatgccctctgcaagcaccaccttcgccattgaccacgccccctccggagacgccctcttccatagccacgcctcctccacaggccccacctgctctggcctcaccccctttgcagggcctgccctctccccctctgtctcctttggccacgccccctccacaggccccacctgccctggccttgcctcctctgcaggcccctccctctccccctgcctcaccccctctgtctcctttggccacaccctctccacaggccccaaatgctctggcagtgcaccttctgcaggcccctttctctccccctccctcacccccagtgcaggcccctttctctccccctgcctcacccccagtgtctccttcggccacgcccccttcacaggccccaccctctctagccgcacctcctctgcaggtcccaccctctccccctgcctctcccccaatgtctccttcagccacgccccctccacaggccccaccccctctcgctgcgcctcctctgcaggtcccaccctctccccctgcctctcccccaatgtctccttcggccacgccccctccacgggtcccaccccttcttgccgctcctcctctgcaggtcccgccctctccccctgcctcactcccaatgtctcctttggctaagccccctccacaggccccacctgctctggccacacctcctctgcaggcccttccctctccgcctgcctcattccctgggcaggcccctttctcaccctctgcctcactcccaatgtctcctttggccacgcctcctccacaggccccacctgttctggcagcgccccttctgcaggtccctccctctccccctgcctcacccaccctgcaggccccacgccgccccccgaccccgggtccggatacctccgtctcgggcccacggctgaccctggcgttggcccccggcccgccgccgccgccctcgcgcagcccgtccagcacgctgagcggcccagacctggccggccacagcagcagcgccacgagcacgccagaggagctgcgtggctacgacagcgggcccgagggcggtgccgcagcctccccgccccccgacgcagagctcgccgcttgccacccggctgcctggagtcgaggccccgctccgccgctggctttccgcggagccccaggtgcgcccctgccgtggcctcccgctaccggaccgggctctgctgacggtctgtgcaccatctacgagactgaagggcccgagtcggcgacccccgcccctggcgcactggatccggggcccagtcccggcacgagcggtgggaaggcggcggctggggccggggccggggcgtcctcgcggagcccgaagcaggcgcgcctgggcgagctgccactgggggcgctgcaggcgagcgtcgtgcagcacctgctgagccggacgctgctgctggcggctgccgagggtgccgcgggcggcagcggcgggggcccaggaggtgcggagggtggtggcgtcacagggggcgcccgggctgcactcagcgacgccgaactcggccgctgggccgaactactgtctcccctggacgagtcccgtgccagcatcacctcggtcaccagcttctctccggacgacgtggcctccccgcagggtgactggaccgtggtggaggtggagaccttccactgagccagaccacagccccgcctgctacaccccacccctgccttaggatccgcccctccgggtacgccgtttgttttagaccccgcctccactgccctggagccccgctgggtggattagtcttagctccctagagcctgagcctttggcctcggaggctcgggacctacccanagctttgacctaggcccgcccctcgagctccgcccctttggcctaggacacgccccgtttccccgagtcccgccccgtgtgcagtgtattgcccaccccgcacagcctgagtttgcaataaaactgggacactgggacttgc

SEQ ID NO: 447558 - DNA, 2059 bp, Homo sapiens
  misc_feature (1917)..(1917): n is a, c, g, or t
ctcgccgctggcggccaccgcgtcgctccggcccgggccccaccccaggcgactctgtgaggagcggccggaggccggaggcggaggtgcaagatggacaacaagagagacaaggcgaaggcaggggccgccgcgcggacgccggctgctcgcgctcctggacttctgacccccaggcccccaggctctcctcgaccccctcccccagtaactcccgcagccctccgagttctgggagctgcgggagcagtggggcgaaagcctctggcagagcgagcggggggcatcggcggggccactattcccgagtctgctccccgagcgggaccaacgcggagtgctgggacaagttcccgaaaccctgcctccaggcccccagcctctgggagaggggagagagctcctcctgccaagaacaccagcccaggccctgtttctagcccagggcgtgccagcgggaccaccaggccaggccctcttggccagaagggactccggatctcagcggaggaaactgtggccagaggaaaagctacagaggctcccaaaaggagtgccctcagcgctggggcacggagagacacttccgggcctaccccaggaaccccgtccccggccatggcccgtcggtcccgggctgcgggcaccgaggtggggctcccccggccagctccgagtgcccggccacggcccccgacagagggcccccggaaatcagtgagcagcgcctcggagcacagtaccaccgagccaagcccggctgccaggaggcggcccagcgccggtgggggtctccagaggccggcctcgcgctccctgagctccagcgccacccctctctcctccccagcccgttctgggccctcagcccgcggaacacccagggctcctgcgcatccctcgcagcccaagccgaaaggactgcaggctctgcgaccccctcaggtcacacccccaaggaaggacgcagcccagcactaggaccgctttcttcctctcctttggccacaccctctccatcgggtaccaagcccgtccagcacgctgagcggcccagacctggccggccacagcagcagcgccacgagcacgccagaggagctgcgtggctacgacagcgggcccgagggcggtgccgcagcctccccgccccccgacgcagagctcgccgcttgccacccggctgcctggagtcgaggccccgctccgccgctggctttccgcggagccccaggtgcgcccctgccgtggcctcccgctaccggaccgggctctgctgacggtctgtgcaccatctacgagactgaagggcccgagtcggcgacccccgcccctggcgcactggatccggggcccagtcccggcacgagcggtgggaaggcggcggctggggccggggccggggcgtcctcgcggagcccgaagcaggcgcgcctgggcgagctgccactgggggcgctgcaggcgagcgtcgtgcagcacctgctgagccggacgctgctgctggcggctgccgagggtgccgcgggcggcagcggcgggggcccaggaggtgcggagggtggtggcgtcacagggggcgcccgggctgcactcagcgacgccgaactcggccgctgggccgaactactgtctcccctggacgagtcccgtgccagcatcacctcggtcaccagcttctctccggacgacgtggcctccccgcagggtgactggaccgtggtggaggtggagaccttccactgagccagaccacagccccgcctgctacaccccacccctgccttaggatccgcccctccgggtacgccgtttgttttagaccccgcctccactgccctggagccccgctgggtggattagtcttagctccctagagcctgagcctttggcctcggaggctcgggacctacccanagctttgacctaggcccgcccctcgagctccgcccctttggcctaggacacgccccgtttccccgagtcccgccccgtgtgcagtgtattgcccaccccgcacagcctgagtttgcaataaaactgggacactgggacttgc

SEQ ID NO: 447559 - DNA, 807 bp, Homo sapiens
agcgggcaggcgagggggcggagcaagagaagaaaacacaaagggccggaaggaagccggggagacaggtggggtactcgggaagctggagcgggccggcggtgcagtcacgggggagcgaggcctgctgggcttggcaacgagggactcggcctcggaggcgacccagaccacacagacactgggtcaaggagtaagcagaggataaacaactggaaggagagcaagcacaaagtcatcatggcttcagcgtctgctcgtggaaaccaagataaagatgcccattttccaccaccaagcaagcagagcctgttgttttgtccaaaatcaaaactgcacatccacagagcagagatctcaaagattatgcgagaatgtcaggaagaaagtttctggaagagagctctgcctttttctcttgtaagcatgcttgtcacccagggactagtctaccaaggttatttggcagctaattctagatttggatcattgcccaaagttgcacttgctggtctcttgggatttggccttggaaaggtatcatacataggagtatgccagagtaaattccatttttttgaagatcagctccgtggggctggttttggtccacagcataacaggcactgcctccttacctgtgaggaatgcaaaataaagcatggattaagtgagaagggagactctcagccttcagcttcctaaattctgtgtctgtgactttcgaagttttttaaacctctgaatttgtacacatttaaaatttcaagtgtactttaaaataaaatacttctaatggaacaaaaa

SEQ ID NO: 447560 - DNA, 712 bp, Homo sapiens
agcgggcaggcgagggggcggagcaagagaagaaaacacaaagggccggaaggaagccggggagacaggtggggtactcgggaagctggagcgggccggcggtgcagtcacgggggagcgaggcctgctgggcttggcaacgagggactcggcctcggaggcgacccagaccacacagtgattctcttctaccttccttagacactgggtcaaggagtaagcagaggataaacaactggaaggagagcaagcacaaagtcatcatggcttcagcgtctgctcgtggaaaccaagataaagatgcccattttccaccaccaagcaagcagagcctgttgttttgtccaaaatcaaaactgcacatccacagagcagagatctcaaagattatgcgagaatgtcaggaagaaagtttctggaagagagctctgcctttttctcttgtaagcatgcttgtcacccagggactagtctaccaaggttatttggcagctaattctagatttggatcattgcccaaagttgcacgcactgcctccttacctgtgaggaatgcaaaataaagcatggattaagtgagaagggagactctcagccttcagcttcctaaattctgtgtctgtgactttcgaagttttttaaacctctgaatttgtacacatttaaaatttcaagtgtactttaaaataaaatacttctaatggaacaaaaa

SEQ ID NO: 447561 - DNA, 400 bp, Homo sapiens
gtgcctttctctgtgccggagtcctgtgtctcccaaggcctctgtatatggttatttggcagctaattctagatttggatcattgcccaaagttgcacttgctggtctcttgggatttggccttggaaaggtatcatacataggagtatgccagagtaaattccatttttttgaagatcagctccgtggggctggttttggtccacagcataacaggcactgcctccttacctgtgaggaatgcaaaataaagcatggattaagtgagaagggagactctcagccttcagcttcctaaattctgtgtctgtgactttcgaagttttttaaacctctgaatttgtacacatttaaaatttcaagtgtactttaaaataaaatacttctaatggaacaaaaa

SEQ ID NO: 447562 - DNA, 494 bp, Homo sapiens
acctacagaatgggagaatactcctattatttctgaaaaaacaaggctagtgaactttagcatagactatatttctaatattgtgttaaagccaggtgcagtggttcatgcctgtagtctcagctactcaagagggttgggtgggaggatcccttgagccctcgagaccagcctgggcaacatagatagactccccccacatctctattaaaaagattatgttaaaataataagaataatatgttatgtaaagactagggcttccagtgtcaaagtacaaaccgctgtctatttttgcttctcttctagggcactgcctccttacctgtgaggaatgcaaaataaagcatggattaagtgagaagggagactctcagccttcagcttcctaaattctgtgtctgtgactttcgaagttttttaaacctctgaatttgtacacatttaaaatttcaagtgtactttaaaataaaatacttctaatggaacaaaaa

SEQ ID NO: 447563 - DNA, 474 bp, Homo sapiens
cgcgggtgtggtttttctaaattttggcggaaaaatgcaagaaaaaaatttttcgaaaagacccccccttctttttctatatacatcctcctcccccccggggatcaccccaccgatttttttgtgacacattattttagtattttgactcccccacaatatccctcctcgttccctcgtggagtttccccctaagaaaagtccccacacagtggtgtccccgcaggaaaaaacccttttttttagaaaaacccccccggtgggcgtgtttttgccccacagcataacaagcactgcctccttacctgtgaggaatgcaaaataaagcatggattaagtgagaagggagactctcagccttcagcttcctaaattctgtgtctgtgactttcgaagttttttaaacctctgaatttgtacacatttaaaatttcaagtgtactttaaaataaaatacttctaatggaacaaaaa

SEQ ID NO: 447564 - DNA, 710 bp, Homo sapiens
agcgggcaggcgagggggcggagcaagagaagaaaacacaaagggccggaaggaagccggggagacaggtggggtactcgggaagctggagcgggccggcggtgcagtcacgggggagcgaggcctgctgggcttggcaacgagggactcggcctcggaggcgacccagaccacacagacactgggtcaaggagtaagcagaggataaacaactggaaggagagcaagcacaaagtcatcatggcttcagcgtctgctcgtggaaaccaagataaagatgcccattttccaccaccaagcaagcagctctgcctttttctcttgtaagcatgcttgtcacccagggactagtctaccaaggttatttggcagctaattctagatttggatcattgcccaaagttgcacttgctggtctcttgggatttggccttggaaaggtatcatacataggagtatgccagagtaaattccatttttttgaagatcagctccgtggggctggttttggtccacagcataacaggcactgcctccttacctgtgaggaatgcaaaataaagcatggattaagtgagaagggagactctcagccttcagcttcctaaattctgtgtctgtgactttcgaagttttttaaacctctgaatttgtacacatttaaaatttcaagtgtactttaaaataaaatacttctaatggaacaaaaa

SEQ ID NO: 447565 - DNA, 785 bp, Homo sapiens
agcgggcaggcgagggggcggagcaagagaagaaaacacaaagggccggaaggaagccggggagacaggtggggtactcgggaagctggagcgggccggcggtgcagtcacgggggagcgaggcctgctgggcttggcaacgagggactcggcctcggaggcgacccagaccacacagacactgggtcaaggagtaagcagaggataaacaactggaaggagagcaagcacaaagtcatcatggcttcagcgtctgctcgtggaaaccaagataaagatgcccattttccaccaccaagcaagcagagcctgttgttttgtccaaaatcaaaactgcacatccacagagcagagatctcaaagattatgcgagaatgtcaggaagaaagtttctggaagagagcatgcttgtcacccagggactagtctaccaaggttatttggcagctaattctagatttggatcattgcccaaagttgcacttgctggtctcttgggatttggccttggaaaggtatcatacataggagtatgccagagtaaattccatttttttgaagatcagctccgtggggctggttttggtccacagcataacaggcactgcctccttacctgtgaggaatgcaaaataaagcatggattaagtgagaagggagactctcagccttcagcttcctaaattctgtgtctgtgactttcgaagttttttaaacctctgaatttgtacacatttaaaatttcaagtgtactttaaaataaaatacttctaatggaacaaaaa

SEQ ID NO: 447566 - DNA, 1923 bp, Homo sapiens
agcgggcaggcgagggggcggagcaagagaagaaaacacaaagggccggaaggaagccggggagacaggtggggtactcgggaagctggagcgggccggcggtgcagtcacgggggagcgaggcctgctgggcttggcaacgagggactcggcctcggaggcgacccagaccacacagacactgggtcaaggagtaagcagaggataaacaactggaaggagagcaagcacaaagtcatcatggcttcagcgtctgctcgtggaaaccaagataaagatgcccattttccaccaccaagcaagcagagcctgttgttttgtccaaaatcaaaactgcacatccacagagcagagatctcaaagattatgcgagaatgtcaggaagaaagtttctggaagagagctctgcctttttctcttgtaagcatgcttgtcacccagggactagtctaccaaggttatttggcagctaattctagatttggatcattgcccaaagttgcacgtaagtcatagaaataaaaaagcaagccaagtgtggtggctcacatctgtaatcccagcactttgggaggctgaggtgggtagattgcttgagtccaggagttcgagaccagcctgggcagcatggtgaaaccttgtatctatttttttaaaaagtaataaataaataaaaactttgaaaaaaagacattactagcaactggagatacgaatgtccagcctaactaaactgcctgtattgacttttggaaaaatcagcccctattttctgccactctgcatttcttagttcactcaacactttctgatatacagcttagcagttgggacttcttcttagaccatccttaaagcatggactaagagggactggcaggatatataatgagattatcaatagcagagcctctgcatgatagatcatttatggatttttattttcttcttttgccctggccagtcttttcaaaatgttttctacgatggatataaaaaatgagtaatttttaagaatcaggggatttctaataatagagtaaccacaaacttggggtttcatcttccttcacctggtatcaatagatcttttatgtacaaaaaggacacattttagttgatagtctgaaaccacattcattcctagcaggaggaacagattcgagatctcttccataggagggtccctctcctttgtgacctctctcctataggcaagatggactgaagctctccactactccaaggccataaggaagattaggggcatttctacccagtgatttggaagctacctatagccacaacccagccaccttcccctgcccccgtggcctcaaccgtttgcttgacaggtgggccctctctggccatctgtctccaggacagcactgtggcttgctctgtcctggcccttccaccaccagtgcaaagttgagatggggaagtctccagttcccaatcctgttctttttaaatagagacttcattctcagagtcttcattcattgatttagcgtggtccttttaattttaaaattaccagcgttgatttttaaagctctagaaaataactaatggagaagattctcaactaatctctcccaacctgcttttacagttgctggtctcttgggatttggccttggaaaggtatcatacataggagtatgccagagtaaattccatttttttgaagatcagctccgtggggctggttttggtccacagcataacaggcactgcctccttacctgtgaggaatgcaaaataaagcatggattaagtgagaagggagactctcagccttcagcttcctaaattctgtgtctgtgactttcgaagttttttaaacctctgaatttgtacacatttaaaatttcaagtgtactttaaaataaaatacttctaatggaacaaaaa

SEQ ID NO: 447567 - DNA, 1486 bp, Homo sapiens
tgggatgacaggtgcaggcccacatgcctggctaattttttttgtggttagacatgaggtctcactatattgcccaagctggtctcaaacacctggcctcaattaatctcacatctgtaatcccagcactttgggaggctgaggtgggtagattgcttgagtccaggagttcgagaccagcctgggcagcatggtgaaaccttgtatctatttttttaaaaagtaataaataaataaaaactttgaaaaaaagacattactagcaactggagatacgaatgtccagcctaactaaactgcctgtattgacttttggaaaaatcagcccctattttctgccactctgcatttcttagttcactcaacactttctgatatacagcttagcagttgggacttcttcttagaccatccttaaagcatggactaagagggactggcaggatatataatgagattatcaatagcagagcctctgcatgatagatcatttatggatttttattttcttcttttgccctggccagtcttttcaaaatgttttctacgatggatataaaaaatgagtaatttttaagaatcaggggatttctaataatagagtaaccacaaacttggggtttcatcttccttcacctggtatcaatagatcttttatgtacaaaaaggacacattttagttgatagtctgaaaccacattcattcctagcaggaggaacagattcgagatctcttccataggagggtccctctcctttgtgacctctctcctataggcaagatggactgaagctctccactactccaaggccataaggaagattaggggcatttctacccagtgatttggaagctacctatagccacaacccagccaccttcccctgcccccgtggcctcaaccgtttgcttgacaggtgggccctctctggccatctgtctccaggacagcactgtggcttgctctgtcctggcccttccaccaccagtgcaaagttgagatggggaagtctccagttcccaatcctgttctttttaaatagagacttcattctcagagtcttcattcattgatttagcgtggtccttttaattttaaaattaccagcgttgatttttaaagctctagaaaataactaatggagaagattctcaactaatctctcccaacctgcttttacagttgctggtctcttgggatttggccttggaaaggtatcatacataggagtatgccagagtaaattccatttttttgaagatcagctccgtggggctggttttggtccacagcataacaggcactgcctccttacctgtgaggaatgcaaaataaagcatggattaagtgagaagggagactctcagccttcagcttcctaaattctgtgtctgtgactttcgaagttttttaaacctctgaatttgtacacatttaaaatttcaagtgtactttaaaataaaatacttctaatggaacaaaaa

SEQ ID NO: 447568 - DNA, 321 bp, Homo sapiens
tctgctgcctgcgccagtcagtgaatcactcccactctccgactagaattcttctgttgcctaagtccatcagtgttcccagtgagaaagcactcttggaaactgataattgctttgggctgcctctggtagagaacacacactgtgtaacaagtgaagagacctccctgttctcttctgtagaaaacaaagtgggtgatttttcaatgacctcagttagctcaccatataactttccttacaagcctgttgttttgtccaaaatcaaaactgcacatccacagagcagagatctcaaagattatgcgagaatgtcaggaa

SEQ ID NO: 447569 - DNA, 689 bp, Homo sapiens
agcgggcaggcgagggggcggagcaagagaagaaaacacaaagggccggaaggaagccggggagacaggtggggtactcgggaagctggagcgggccggcggtgcagtcacgggggagcgaggcctgctgggcttggcaacgagggactcggcctcggaggcgacccagaccacacagacactgggtcaaggagtaagcagaggataaacaactggaaggagagcaagcacaaagtcatcatggcttcagcgtctgctcgtggaaaccaagataaagatgcccattttccaccaccaagcaagcagagcctgttgttttgtccaaaatcaaaactgcacatccacagagcagagatctcaaagattatgcgagaatgtcaggaagaaagtttctggaagagagctctgcctttttctcttgtaagcatgcttgtcacccagggactagtctaccaaggttatttggcagctaattctagatttggatcattgcccaaagttgcacgcactgcctccttacctgtgaggaatgcaaaataaagcatggattaagtgagaagggagactctcagccttcagcttcctaaattctgtgtctgtgactttcgaagttttttaaacctctgaatttgtacacatttaaaatttcaagtgtactttaaaataaaatacttctaatggaacaaaaa

SEQ ID NO: 447570 - DNA, 860 bp, Homo sapiens
agcgggcaggcgagggggcggagcaagagaagaaaacacaaagggccggaaggaagccggggagacaggtggggtactcgggaagctggagcgggccggcggtgcagtcacgggggagcgaggcctgctgggcttggcaacgagggactcggcctcggaggcgacccagaccacacagacactgggtcaaggagtaagcagaggataaacaactggaaggagagcaagcacaaagtcatcatggcttcagcgtctgctcgtggaaaccaagataaagatgcccattttccaccaccaagcaagcagagcctgttgttttgtccaaaatcaaaactgcacatccacagagcagagatctcaaagattatgcgagaatgtcaggaagaaagtttctggaagagagctctgcctttttctcttgtaagcatgcttgtcacccagggactagtctaccaaggttatttggcagctaattctagatttggatcattgcccaaagttgcacttgctggtctcttgggatttggccttggaaaggtatcatacataggagtatgccagagtaaattccatttttttgaagatcagctccgtggggctggttttggtccacagcataacaggcactgcctccttacctgtgaggaatgcaaaataaagcatggattaagtgagaagggagactctcagccttcagcttcctaaattctgtgtctgtgactttcgaagttttttaaacctctgaatttgtacacatttaaaatttcaagtgtactttaaaataaaatacttctaatggaacaaaaaaacgaaaaccacagacccacacaagacaccacgaaaacaaaacagcccccacg

SEQ ID NO: 447571 - DNA, 1435 bp, Homo sapiens
  misc_feature (1127)..(1127): n is a, c, g, or t
  misc_feature (1386)..(1386): n is a, c, g, or t
agcgggcaggcgagggggcggagcaagagaagaaaacacaaagggccggaaggaagccggggagacaggtggggtactcgggaagctggagcgggccggcggtgcagtcacgggggagcgaggcctgctgggcttggcaacgagggactcggcctcggaggcgacccagaccacacagacactgggtcaaggagtaagcagaggataaacaactggaaggagagcaagcacaaagtcatcatggcttcagcgtctgctcgtggaaaccaagataaagatgcccattttccaccaccaagcaagcagagcctgttgttttgtccaaaatcaaaactgcacatccacagagcagagatctcaaagattatgcgagaatgtcaggaagaaagtttctggaagagagctctgcctttttctcttgtaagcatgcttgtcacccagggactagtctaccaaggttatttggcagctaattctagatttggatcattgcccaaagttgcacttgctggtctcttgggatttggccttggaaaggtatcatacataggagtatgccagagtaaattccatttttttgaagatcagctccgtggggctggttttggtccacagcataacaggcactgcctccttacctgtgaggaatgcaaaataaagcatggattaagtgagaagggagactctcagccttcagcttcctaaattctgtgtctgtgactttcgaagttttttaaacctctgaatttgtacacatttaacacttcccccgtacttccccccccgcgcctcctcccggaacacataaacacccgcgctcgcccctctcccgcgcgccgctctgcgcccgttccgccccccgtcggcgtattctccccttccctcccgtattcctctccccgcccgcccgctcccgcacctccctccccttatttacccccgcgtctttccccccccccttttgtgccgcgattcccacactatgagcgcccgccgacacccaccgaccgcacctatttgccccccgttcgctctccctttgtactcgccccaccctcacatcccgcacccgactatcgctccccccaaaacccacgcaccaccgtccccgacctcttccgccaccntcactctccgcccccccccgcatccgcatcatactcatcttccgccgtcttatttcccgcgccgtcttcgtccgccgcccttctcttagtccccgcatcccccattcttttctcgcgttccgcgttgtccgcgcctatctcccccgtccccgctttctccattacacccgcttatctccgccctatgtatacatcgacgcgccaccaccgacgcgatgcacaccctatgtcgtcacgattgtcatccagccgcgtcgtntgaccccgtctcgccgtgttcgaatcacgtctcgccgttcccatcaccg

SEQ ID NO: 447572 - DNA, 592 bp, Homo sapiens
agcgggcaggcgagggggcggagcaagagaagaaaacacaaagggccggaaggaagccggggagacaggtggggtactcgggaagctggagcgggccggcggtgcagtcacgggggagcgaggcctgctgggcttggcaacgagggactcggcctcggaggcgacccagaccacacagacactgggtcaaggagtaagcagaggataaacaactggaaggagagcaagcacaaagtcatcatggcttcagcgtctgctcgtggaaaccaagataaagatgcccattttccaccaccaagcaagcagctctgcctttttctcttgtaagcatgcttgtcacccagggactagtctaccaaggttatttggcagctaattctagatttggatcattgcccaaagttgcacgcactgcctccttacctgtgaggaatgcaaaataaagcatggattaagtgagaagggagactctcagccttcagcttcctaaattctgtgtctgtgactttcgaagttttttaaacctctgaatttgtacacatttaaaatttcaagtgtactttaaaataaaatacttctaatggaacaaaaa

SEQ ID NO: 447573 - DNA, 1076 bp, Homo sapiens
gagttctccagcatctagctagttctaccataggattaatacccaaaaccacgtgggtggagctgaaaaacacgatgctgtggggggaagaacccaaaaagccatagtcggtctgatgtccatttataggacattctagaagaagcaacagtggcgatgcaaagcagttgcctgggaaaggagtggaacaggacagaatggaatgcacaggagcgggggaactttggggcagtggtgggacaatttcatatcttaataggagcggcggcaacatgacgtatacagtcgccccaaatcatcaaactgtagtttctaaatgggtacggtttattaacattcaaattataagaaaagtcatttcctcaaaagtttcggggttgggggaagagttaaagaaggtcgtggctaggtggttgttgaggaataagggagaaaatcacagtttacaaaatctgagagctgaatccgtgctgtttctcgattgagaagcagtggacatcagcagtaggaatggctcaggtccaagaaggctatgccctaccagacccggttgatgtgcttccccggatttactctgtcccaccgtccacctccaccccggcctgcacctctcgcttagggtagaggcctggcctccagtgccatctcccgacagcctcccccaggtgaaggtcatgcttcagcactgcctccctgacagaggctctgatgatgggatgctctgactcagactcaggtgagaaatttgaaggaacagaatgctcttgcctagcagttgccgggaggggtcaggtgctgcccccagagaagtgggagagttagaggtccgtgaggcatactttccccaaagggggcagaaagcatgaagtggtcagcatagaaactcgtctccctgccatccacacagtcccaaggcatgctggttctacatggcttgtctggaagctgtccttgaatgtaaagttgttttcagctcaataatgtatttgcctgccttcgcctttcctttcacccttaccaccttggaattgtaccgcctaataaaatcttcgcacttaaacttggaaacaggctct

SEQ ID NO: 447574 - DNA, 1888 bp, Homo sapiens
  misc_feature (1565)..(1565): n is a, c, g, or t
gatcaattccttaagcccagaccaaagcctgccccgctggctttggtctgggcttcagtgatcaaagccagcggggcaggcagcgagtttcaggaccagaccaggattcggtttatgctagagacgatgttggccctgaagaacaatgacatgcgcaaaattccaggctatgaccccgagcccgtggagaagctgaggaaactgcagagagctttggtccgcaacgccggctcaggttctgagacgcagcttcgcgtctcctgggacagtgtcttgagtgcggagcagacgggtcgctggtggattgtggggtccgcctggagtggggccccgatgatcgacaacagtcaccatacgcacctgcagaagcagcttgtggggacggtcagttcaaagatcctagaactcgcccggaagcagaggatgaacacagacatccggagaaacatattctgcacaataatgacaagtgaagattttttggatgcttttgaaaagcttctgaagcttggacttaaggatcagcaggagagagaaatcattcacgttctcatggattgctgccttcaagagaaaacttacaatcccttctatgctttcctggctagcaaattctgtgaatatgaaaggagatttcagatgactttccagttcagcatatgggacaaatttcgggacttggaaaacttgccagctacgaatttctctaatttggttcatctggtggcccacttgttgaagacaaaatcgctttccctttccatcttaaaggtagttgaattcagtgaattggacaaacccagagtccgttttttacgaaaagtattaagtatcctattaatggaaacagaagttgaagacctcagtttaattttcacaagagtatctgacaacccaaagctgggggtgttacgtgagggtttgaagcttttcatcagccacttcttgctaaagaacgcacaggcccacagaagcgccgacgaagccaacgtgctgagagagaaagctgaccttgcaacgaagtgtctgcaaggaaaagcttccctgagaatgtagtcagggaaggaaggagggcaggtggccctttgactgtaaaatgtccttggtaaacccaaaggcttattctgttgcctgcgtgtgaatgtttggtagagctatatcattgtctgttaatgtattatattttgagattttttttgatctaaggttttattgtttgtatttcaagccattttcaaataactatcttgggggtgagaggagaaggagggagggaaaaggggtcaggcacactggacagggttctctaagcagtgaggctggtgtgtatgattgtcttaaaattttttaatagatatggccgagcgtgatggctcacccctgtaatcccagcactttgtgaggccaaggtgggcggatcacttgaggccaggaatttgaaaccagcctgggcaaaaccctgtctctactaaaaatataaaaattagccaggcatgatggcacatgctggtaatagcagctactgaggtggctgaggcacaagaattgcttggaccctggaggtngaggctgcagtgagccaagattgtaccactgtactccagcctgggctggacagtgagacttttgacagtgagactgtcaaaaaaaaaaaaaaaattaatagataaaacaggccactagagggtgcagttataaagaaattgatgaggtttttacctttttaaaatattggttagaagttcaaaaaccatcccttaaaggtgattgtttttttgagacagagtcttgctctgtcacccagagtggagtgcagtgagccaagattgtaccactgtactccagcctgggctggacagtgagactttgacagtgagactgtcaaaaa

SEQ ID NO: 447575 - DNA, 3142 bp, Homo sapiens
  misc_feature (2819)..(2819): n is a, c, g, or t
gtccaggagcgcgggagaggccggcccgggcggctcccagggacgcgtggtccgcatgaagcgcagaggcgggcgcgggccgcgccgcggtcctgctggcggtggggagaaggccctgaagaggctgaagctagcggtggaggagttcgtgcacgcgacttcggaaggcgaggctcccgggggttgcgaggggcgcggcgccccggtgagctttcgcccgggagggagaaaaagccgtaaggaactgaggaaggagaagcggcacctgcggaaagcacgccggctgcagaggacggcgggccccgaacagggtcccggcctgggaggccgaagcggagccgaagaagccagcggtcaccggcaggacacggaggagcgcgcccgcccagcccctagtcgggacccctcgcctcccaggaagccgcggccgtcccgggtcaaggccaaggccacggccgccaccgcaaagaccagaccctccgcagccgccaccgccgctgcccggaaacgggcgcttttagcggcgaacgaggaggaggaccgagagatccgaaagctggagcgttgcctcggtttgaacaagcgcaaaaagaaggacggcagcagctccgtgccgctgagctttgcacgcgacggtcttgactatattctgggagccctggagtctgggaaaaatagcggcttgtacgacagcagtggtgaggaggaggaagatgccggacagacactccccgaaagtgacttagagagtgactcccaggacgaaagtgaggaggaggaggagggagacgtagaaaaggaaaagaaggcgcaggaagcagaagcgcagagcgaggacgacgacgaggatacagaagaggaacagggggaagaaaaggaaaagggagcgcaggagaaaaggagggggaagagagtccgttttgcagaagatgaagaaaagagtgaaaattcctcggaggacggtgacataacggataagagtctttgtggaagtggtgaaaagtacatcccacctcatgtgaggcaagctgaggagacagtggacttcaagaaaaaggaagaactagaaaggctgaagaaacatgtaaaaggtctacttaacaggttgagtgaacccaacatggcttccatcagtgggcagctggaggaactgtacatggcccacagcagaaaggacatgaatgacaccctgacctccgctctcatgggtgcctgcgtcactgcctcggccatgcccagcagactgatgatggagcatgttctcttagtcagcatccttcaccacacagttggaatcgaggtcggtgcccactttctggaggcagtggtgaggaagttcgatgccatctataaatacggaagcgaagggaaagagtgtgacaacctgttcaccgtcattgcccatttatacaacttccacgtggtacagtctctcctcatcttcgacattttgaaaaaactgattggaactttcaccgaaaaagatattgaactgatcttgttaatgctgaaaaacgtgggtttttcattgaggaaagatgatgctttatcacttaaggaattgatcactgaagcccagaccaaagccagcggggcaggcagcgagtttcaggaccagaccaggattcggtttatgctagagacgatgttggccctgaagaacaatgacatgcgcaaaattccaggctatgaccccgagcccgtggagaagctgaggaaactgcagagagctttggtccgcaacgccggctcaggttctgagacgcagcttcgcgtctcctgggacagtgtcttgagtgcggagcagacgggtcgctggtggattgtggggtccgcctggagtggggccccgatgatcgacaacagtcaccatacgcacctgcagaagcagcttgtggggacggtcagttcaaagatcctagaactcgcccggaagcagaggatgaacacagacatccggagaaacatattctgcacaataatgacaagtgaagattttttggatgcttttgaaaagcttctgaagtagttgaattcagtgaattggacaaacccagagtccgttttttacgaaaagtattaagtatcctattaatggaaacagaagttgaagacctcagtttaattttcacaagagtatctgacaacccaaagctgggggtgttacgtgagggtttgaagcttttcatcagccacttcttgctaaagaacgcacaggcccacagaagcgccgacgaagccaacgtgctgagagagaaagctgaccttgcaacgaagtgtctgcaaggaaaagcttccctgagaatgtagtcagggaaggaaggagggcaggtggccctttgactgtaaaatgtccttggtaaacccaaaggcttattctgttgcctgcgtgtgaatgtttggtagagctatatcattgtctgttaatgtattatattttgagattttttttgatctaaggttttattgtttgtatttcaagccattttcaaataactatcttgggggtgagaggagaaggagggagggaaaaggggtcaggcacactggacagggttctctaagcagtgaggctggtgtgtatgattgtcttaaaattttttaatagatatggccgagcgtgatggctcacccctgtaatcccagcactttgtgaggccaaggtgggcggatcacttgaggccaggaatttgaaaccagcctgggcaaaaccctgtctctactaaaaatataaaaattagccaggcatgatggcacatgctggtaatagcagctactgaggtggctgaggcacaagaattgcttggaccctggaggtngaggctgcagtgagccaagattgtaccactgtactccagcctgggctggacagtgagacttttgacagtgagactgtcaaaaaaaaaaaaaaaattaatagataaaacaggccactagagggtgcagttataaagaaattgatgaggtttttacctttttaaaatattggttagaagttcaaaaaccatcccttaaaggtgattgtttttttgagacagagtcttgctctgtcacccagagtggagtgcagtgagccaagattgtaccactgtactccagcctgggctggacagtgagactttgacagtgagactgtcaaaaa

SEQ ID NO: 447576 - DNA, 3368 bp, Homo sapiens
gtccaggagcgcgggagaggccggcccgggcggctcccagggacgcgtggtccgcatgaagcgcagaggcgggcgcgggccgcgccgcggtcctgctggcggtggggagaaggccctgaagaggctgaagctagcggtggaggagttcgtgcacgcgacttcggaaggcgaggctcccgggggttgcgaggggcgcggcgccccggtgagctttcgcccgggagggagaaaaagccgtaaggaactgaggaaggagaagcggcacctgcggaaagcacgccggctgcagaggacggcgggccccgaacagggtcccggcctgggaggccgaagcggagccgaagaagccagcggtcaccggcaggacacggaggagcgcgcccgcccagcccctagtcgggacccctcgcctcccaggaagccgcggccgtcccgggtcaaggccaaggccacggccgccaccgcaaagaccagaccctccgcagccgccaccgccgctgcccggaaacgggcgcttttagcggcgaacgaggaggaggaccgagagatccgaaagctggagcgttgcctcggtttgaacaagcgcaaaaagaaggacggcagcagctccgtgccgctgagctttgcacgcgacggtcttgactatattctgggagccctggagtctgggaaaaatagcggcttgtacgacagcagtggtgaggaggaggaagatgccggacagacactccccgaaagtgacttagagagtgactcccaggacgaaagtgaggaggaggaggagggagacgtagaaaaggaaaagaaggcgcaggaagcagaagcgcagagcgaggacgacgacgaggatacagaagaggaacagggggaagaaaaggaaaagggagcgcaggagaaaaggagggggaagagagtccgttttgcagaagatgaagaaaagagtgaaaattcctcggaggacggtgacataacggataagagtctttgtggaagtggtgaaaagtacatcccacctcatgtgaggcaagctgaggagacagtggacttcaagaaaaaggaagaactagaaaggctgaagaaacatgtaaaaggtctacttaacaggttgagtgaacccaacatggcttccatcagtgggcagctggaggaactgtacatggcccacagcagaaaggacatgaatgacaccctgacctccgctctcatgggtgcctgcgtcactgcctcggccatgcccagcagactgatgatggagcatgttctcttagtcagcatccttcaccacacagttggaatcgaggtcggtgcccactttctggaggcagtggtgaggaagttcgatgccatctataaatacggaagcgaagggaaagagtgtgacaacctgttcaccgtcattgcccatttatacaacttccacgtggtacagtctctcctcatcttcgacattttgaaaaaactgattggaactttcaccgaaaaagatattgaactgatcttgttaatgctgaaaaacgtgggtttttcattgaggaaagatgatgctttatcacttaaggaattgatcactgaagcccagaccaaagccagcggggcaggcagcgagtttcaggaccagaccaggattcggtttatgctagagacgatgttggccctgaagaacaatgacatgcgcaaaattccaggctatgaccccgagcccgtggagaagctgaggaaactgcagagagctttggtccgcaacgccggctcaggttctgagacgcagcttcgcgtctcctgggacagtgtcttgagtgcggagcagacgggtcgctggtggattgtggggtccgcctggagtggggccccgatgatcgacaacagtcaccatacgcacctgcagaagcagcttgtggggacggtcagttcaaagatcctagaactcgcccggaagcagaggatgaacacagacatccggagaaacatattctgcacaataatgacaagtgaagattttttggatgcttttgaaaagcttctgaagtaagcatttgtgtgcacattttgacctattaatgagatgctgtaaaataagtaagttgatttgctttttgagttttggacgactgagtctgatgctgcctagggaggactgggctgttctcatgaccatccgctcacgctgttggattcgtgcatctctgggttagtcgtcatgttcctattaatttgcctctagtagttcctcattagaacattttatgatatataaagattgggggtttggggttttttttttttgagacagggtcttgccatgttgctcaggctggagactggggagttttgactgaaagtatctgatgaccttgtcagtggctgttggttgtcacgaattgcttaaaaatacataaatcttcataataaagctattctgattcttcatttaaaacatcctggtatagtttgtataattagttgtaataagattttaaagatcctgtaatcccagctacttagaaggctgagacaggaggatcactttagcccagtagttcaagaccagcctgggcaacatactgagacccccatctcatttaaaaagaaaaaaaaaatctttaaatgtacctgtgtagttttatgaggtacttctaaacaatgtaatgttaatacatattcttttatttgcttcaaactaggatgaaatacagggagaacatggttccttttaggattctgataattagggttttattttctaaactagagtttctagttggagtggaagtcctgagttccctttgcctctctgtggccttgccgttttgccgaaaacctcccatctccctagtcacccttggtctctaaaagggctcttttgaggagaactcttattctctagtcagcgggtctagcttatcctttgtactcgaaggacttcgtttatttttcctctggttgacttcatgtgttgaaaattttggcctatcaaactacgtgtattaaacaatagtttttcccattcttattcctcaaaatcatgagttatgagtctaagcttttaatcaacatgaattgataatcaatgcagctgaaactcagttggttctttgggccgccttcgccgcctgcgctgccttcacctgagtgctctacgtggggctgtgctgtttgcagtggagctggtgctcctctcctgaggtacagagtgtctgcctctgtgcagaggtggcagcctcagccgtattcggatctcaccagaaactggaagcagcccacatacccctcagttggggaaaggataaaccatgagacgccgtctaagggatacttactacttggcatcacgaggggcaaactcccaaggccccaagagcatggtgact

SEQ ID NO: 447577 - DNA, 2499 bp, Homo sapiens
gtccaggagcgcgggagaggccggcccgggcggctcccagggacgcgtggtccgcatgaagcgcagaggcgggcgcgggccgcgccgcggtcctgctggcggtggggagaaggccctgaagaggctgaagctagcggtggaggagttcgtgcacgcgacttcggaaggcgaggctcccgggggttgcgaggggcgcggcgccccggtgagctttcgcccgggagggagaaaaagccgtaaggaactgaggaaggagaagcggcacctgcggaaagcacgccggctgcagaggacggcgggccccgaacagggtcccggcctgggaggccgaagcggagccgaagaagccagcggtcaccggcaggacacggaggagcgcgcccgcccagcccctagtcgggacccctcgcctcccaggaagccgcggccgtcccgggtcaaggccaaggccacggccgccaccgcaaagaccagaccctccgcagccgccaccgccgctgcccggaaacgggcgcttttagcggcgaacgaggaggaggaccgagagatccgaaagctggagcgttgcctcggtttgaacaagcgcaaaaagaaggacggcagcagctccgtgccgctgagctttgcacgcgacggtcttgactatattctgggagccctggagtctgggaaaaatagcggcttgtacgacagcagtggtgaggaggaggaagatgccggacagacactccccgaaagtgacttagagagtgactcccaggacgaaagtgaggaggaggaggagggagacgtagaaaaggaaaagaaggcgcaggaagcagaagcgcagagcgaggacgacgacgaggatacagaagaggaacagggggaagaaaaggaaaagggagcgcaggagaaaaggagggggaagagagtccgttttgcagaagatgaagaaaagagtgaaaattcctcggaggacggtgacataacggataagagtctttgtggaagtggtgaaaagtacatcccacctcatgtgaggcaagctgaggagacagtggacttcaagaaaaaggaagaactagaaaggctgaagaaacatgtaaaaggtctacttaacaggttgagtgaacccaacatggcttccatcagtgggcagctggaggaactgtacatggcccacagcagaaaggacatgaatgacaccctgacctccgctctcatgggtgcctgcgtcactgcctcggccatgcccagcagactgatgatggagcatgttctcttagtcagcatccttcaccacacagttggaatcgaggtcggtgcccactttctggaggcagtggtgaggaagttcgatgccatctataaatacggaagcgaagggaaagagtgtgacaacctgttcaccgtcattgcccatttatacaacttccacgtggtacagtctctcctcatcttcgacattttgaaaaaactgattggaactttcaccgaaaaagatattgaactgatcttgttaatgctgaaaaacgtgggtttttcattgaggaaagatgatgctttatcacttaaggaattgatcactgaagcccagaccaaagccagcggggcaggcagcgagtttcaggaccagaccaggattcggtttatgctagagacgatgttggccctgaagaacaatgacatgcgcaaaattccaggctatgaccccgagcccgtggagaagctgaggaaactgcagagagctttggtccgcaacgccggctcaggttctgagacgcagcttcgcgtctcctgggacagtgtcttgagtgcggagcagacgggtcgctggtggattgtggggtccgcctggagtggggccccgatgatcgacaacagtcaccatacgcacctgcagaagcagcttgtggggacggtcagttcaaagatcctagaactcgcccggaagcagaggatgaacacagacatccggagaaacatattctgcacaataatgacaagtgaagattttttggatgcttttgaaaagcttctgaagcttggacttaaggatcagcaggagagagaaatcattcacgttctcatggattgctgccttcaagagaaaacttacaatcccttctatgctttcctggctagcaaattctgtgaatatgaaaggagatttcagatgactttccagttcagcatatgggacaaatttcgggacttggaaaacttgccagctacgaatttctctaatttggttcatctggtggcccacttgttgaagacaaaatcgctttccctttccatcttaaagctttcctttaccttttaaagaaggctacttagctctatgatttaggaagaaagattcattctctccacccccagagagagagaacgcccaggaggtggaatgttaaccactggagaacttggagaggtttatgcgggtgaagtgtgttcttggaacttttctgtaagtgtataattgtttcaaaatagatgttttgaaagcattcataa

SEQ ID NO: 447578 - DNA, 1047 bp, Homo sapiens
  misc_feature (724)..(724): n is a, c, g, or t
cagctcagccctgacatgtgtttatacgattcctttccagagtatctgacaacccaaagctgggggtgttacgtgagggtttgaagcttttcatcagccacttcttgctaaagaacgcacaggcccacagaagcgccgacgaagccaacgtgctgagagagaaagctgaccttgcaacgaagtgtctgcaaggaaaagcttccctgagaatgtagtcagggaaggaaggagggcaggtggccctttgactgtaaaatgtccttggtaaacccaaaggcttattctgttgcctgcgtgtgaatgtttggtagagctatatcattgtctgttaatgtattatattttgagattttttttgatctaaggttttattgtttgtatttcaagccattttcaaataactatcttgggggtgagaggagaaggagggagggaaaaggggtcaggcacactggacagggttctctaagcagtgaggctggtgtgtatgattgtcttaaaattttttaatagatatggccgagcgtgatggctcacccctgtaatcccagcactttgtgaggccaaggtgggcggatcacttgaggccaggaatttgaaaccagcctgggcaaaaccctgtctctactaaaaatataaaaattagccaggcatgatggcacatgctggtaatagcagctactgaggtggctgaggcacaagaattgcttggaccctggaggtngaggctgcagtgagccaagattgtaccactgtactccagcctgggctggacagtgagacttttgacagtgagactgtcaaaaaaaaaaaaaaaattaatagataaaacaggccactagagggtgcagttataaagaaattgatgaggtttttacctttttaaaatattggttagaagttcaaaaaccatcccttaaaggtgattgtttttttgagacagagtcttgctctgtcacccagagtggagtgcagtgagccaagattgtaccactgtactccagcctgggctggacagtgagactttgacagtgagactgtcaaaaa

SEQ ID NO: 447579 - DNA, 222 bp, Homo sapiens
tctaatttggttcatctggtggcccacttgttgaagacaaaatcgctttccctttccatcttaaagtaaaggttcgtgtaacgtgtgaaaatattgaaagcaatggaaatgggagtgtaattgtttagtacctggtaaatcaggtcctgttttaccagcgtattttcttcgattctgattcatctgaaaagtgcttgcattatcctagccaggacagaaaac

SEQ ID NO: 447580 - DNA, 3407 bp, Homo sapiens
  misc_feature (3084)..(3084): n is a, c, g, or t
gtccaggagcgcgggagaggccggcccgggcggctcccagggacgcgtggtccgcatgaagcgcagaggcgggcgcgggccgcgccgcggtcctgctggcggtggggagaaggccctgaagaggctgaagctagcggtggaggagttcgtgcacgcgacttcggaaggcgaggctcccgggggttgcgaggggcgcggcgccccggtgagctttcgcccgggagggagaaaaagccgtaaggaactgaggaaggagaagcggcacctgcggaaagcacgccggctgcagaggacggcgggccccgaacagggtcccggcctgggaggccgaagcggagccgaagaagccagcggtcaccggcaggacacggaggagcgcgcccgcccagcccctagtcgggacccctcgcctcccaggaagccgcggccgtcccgggtcaaggccaaggccacggccgccaccgcaaagaccagaccctccgcagccgccaccgccgctgcccggaaacgggcgcttttagcggcgaacgaggaggaggaccgagagatccgaaagctggagcgttgcctcggtttgaacaagcgcaaaaagaaggacggcagcagctccgtgccgctgagctttgcacgcgacggtcttgactatattctgggagccctggagtctgggaaaaatagcggcttgtacgacagcagtggtgaggaggaggaagatgccggacagacactccccgaaagtgacttagagagtgactcccaggacgaaagtgaggaggaggaggagggagacgtagaaaaggaaaagaaggcgcaggaagcagaagcgcagagcgaggacgacgacgaggatacagaagaggaacagggggaagaaaaggaaaagggagcgcaggagaaaaggagggggaagagagtccgttttgcagaagatgaagaaaagagtgaaaattcctcggaggacggtgacataacggataagagtctttgtggaagtggtgaaaagtacatcccacctcatgtgaggcaagctgaggagacagtggacttcaagaaaaaggaagaactagaaaggctgaagaaacatgtaaaaggtctacttaacaggttgagtgaacccaacatggcttccatcagtgggcagctggaggaactgtacatggcccacagcagaaaggacatgaatgacaccctgacctccgctctcatgggtgcctgcgtcactgcctcggccatgcccagcagactgatgatggagcatgttctcttagtcagcatccttcaccacacagttggaatcgaggtcggtgcccactttctggaggcagtggtgaggaagttcgatgccatctataaatacggaagcgaagggaaagagtgtgacaacctgttcaccgtcattgcccatttatacaacttccacgtggtacagtctctcctcatcttcgacattttgaaaaaactgattggaactttcaccgaaaaagatattgaactgatcttgttaatgctgaaaaacgtgggtttttcattgaggaaagatgatgctttatcacttaaggaattgatcactgaagcccagaccaaagccagcggggcaggcagcgagtttcaggaccagaccaggattcggtttatgctagagacgatgttggccctgaagaacaatgacatgcgcaaaattccaggctatgaccccgagcccgtggagaagctgaggaaactgcagagagctttggtccgcaacgccggctcaggttctgagacgcagcttcgcgtctcctgggacagtgtcttgagtgcggagcagacgggtcgctggtggattgtggggtccgcctggagtggggccccgatgatcgacaacagtcaccatacgcacctgcagaagcagcttgtggggacggtcagttcaaagatcctagaactcgcccggaagcagaggatgaacacagacatccggagaaacatattctgcacaataatgacaagtgaagattttttggatgcttttgaaaagcttctgaagcttggacttaaggatcagcaggagagagaaatcattcacgttctcatggattgctgccttcaagagaaaacttacaatcccttctatgctttcctggctagcaaattctgtgaatatgaaaggagatttcagatgactttccagttcagcatatgggacaaatttcgggacttggaaaacttgccagctacgaatttctctaatttggttcatctggtggcccacttgttgaagacaaaatcgctttccctttccatcttaaaggtagttgaattcagtgaattggacaaacccagagtccgttttttacgaaaagtattaagtatcctattaatggaaacagaagttgaagacctcagtttaattttcacaagagtatctgacaacccaaagctgggggtgttacgtgagggtttgaagcttttcatcagccacttcttgctaaagaacgcacaggcccacagaagcgccgacgaagccaacgtgctgagagagaaagctgaccttgcaacgaagtgtctgcaaggaaaagcttccctgagaatgtagtcagggaaggaaggagggcaggtggccctttgactgtaaaatgtccttggtaaacccaaaggcttattctgttgcctgcgtgtgaatgtttggtagagctatatcattgtctgttaatgtattatattttgagattttttttgatctaaggttttattgtttgtatttcaagccattttcaaataactatcttgggggtgagaggagaaggagggagggaaaaggggtcaggcacactggacagggttctctaagcagtgaggctggtgtgtatgattgtcttaaaattttttaatagatatggccgagcgtgatggctcacccctgtaatcccagcactttgtgaggccaaggtgggcggatcacttgaggccaggaatttgaaaccagcctgggcaaaaccctgtctctactaaaaatataaaaattagccaggcatgatggcacatgctggtaatagcagctactgaggtggctgaggcacaagaattgcttggaccctggaggtngaggctgcagtgagccaagattgtaccactgtactccagcctgggctggacagtgagacttttgacagtgagactgtcaaaaaaaaaaaaaaaattaatagataaaacaggccactagagggtgcagttataaagaaattgatgaggtttttacctttttaaaatattggttagaagttcaaaaaccatcccttaaaggtgattgtttttttgagacagagtcttgctctgtcacccagagtggagtgcagtgagccaagattgtaccactgtactccagcctgggctggacagtgagactttgacagtgagactgtcaaaaa

SEQ ID NO: 447581 - DNA, 1799 bp, Homo sapiens
  misc_feature (1476)..(1476): n is a, c, g, or t
gtagtgagctgaagtcatgccactgcactccagcctgggtgacagagcaagactgtctcaaaaaaaaaagtaagaaaatgtgaagtcatcgccatagcaggaaccagctctaagggcacacacgattgagtcagtttattgtcagccgggcacagctgtcgacttttgcagcgacgggggaccccctagatggtcttgtctcctctgacattttgccacattgtaggagaacctgaggaccagagaggttgtgacagggctgggcccctagctggtgtctgccgctgcctccacctcctttacgtggctcgcctctaaccagacccttccaggcgggaagatgttcccctgaaaggtatcagccattaaactttggaagtcgagtgatgttccagtcattgctgttctgttttctaggcttggacttaaggatcagcaggagagagaaatcattcacgttctcatggattgctgccttcaagagaaaacttacaatcccttctatgctttcctggctagcaaattctgtgaatatgaaaggagatttcagatgactttccagttcagcatatgggacaaatttcgggacttggaaaacttgccagctacgaatttctctaatttggttcatctggtggcccacttgttgaagacaaaatcgctttccctttccatcttaaaggtagttgaattcagtgaattggacaaacccagagtccgttttttacgaaaagtattaagtatcctattaatggaaacagaagttgaagacctcagtttaattttcacaagagtatctgacaacccaaagctgggggtgttacgtgagggtttgaagcttttcatcagccacttcttgctaaagaacgcacaggcccacagaagcgccgacgaagccaacgtgctgagagagaaagctgaccttgcaacgaagtgtctgcaaggaaaagcttccctgagaatgtagtcagggaaggaaggagggcaggtggccctttgactgtaaaatgtccttggtaaacccaaaggcttattctgttgcctgcgtgtgaatgtttggtagagctatatcattgtctgttaatgtattatattttgagattttttttgatctaaggttttattgtttgtatttcaagccattttcaaataactatcttgggggtgagaggagaaggagggagggaaaaggggtcaggcacactggacagggttctctaagcagtgaggctggtgtgtatgattgtcttaaaattttttaatagatatggccgagcgtgatggctcacccctgtaatcccagcactttgtgaggccaaggtgggcggatcacttgaggccaggaatttgaaaccagcctgggcaaaaccctgtctctactaaaaatataaaaattagccaggcatgatggcacatgctggtaatagcagctactgaggtggctgaggcacaagaattgcttggaccctggaggtngaggctgcagtgagccaagattgtaccactgtactccagcctgggctggacagtgagacttttgacagtgagactgtcaaaaaaaaaaaaaaaattaatagataaaacaggccactagagggtgcagttataaagaaattgatgaggtttttacctttttaaaatattggttagaagttcaaaaaccatcccttaaaggtgattgtttttttgagacagagtcttgctctgtcacccagagtggagtgcagtgagccaagattgtaccactgtactccagcctgggctggacagtgagactttgacagtgagactgtcaaaaa

SEQ ID NO: 447582 - DNA, 2484 bp, Homo sapiens
  misc_feature (2413)..(2413): n is a, c, g, or t
gtccaggagcgcgggagaggccggcccgggcggctcccagggacgcgtggtccgcatgaagcgcagaggcgggcgcgggccgcgccgcggtcctgctggcggtggggagaaggccctgaagaggctgaagctagcggtggaggagttcgtgcacgcgacttcggaaggcgaggctcccgggggttgcgaggggcgcggcgccccggtgagctttcgcccgggagggagaaaaagccgtaaggaactgaggaaggagaagcggcacctgcggaaagcacgccggctgcagaggacggcgggccccgaacagggtcccggcctgggaggccgaagcggagccgaagaagccagcggtcaccggcaggacacggaggagcgcgcccgcccagcccctagtcgggacccctcgcctcccaggaagccgcggccgtcccgggtcaaggccaaggccacggccgccaccgcaaagaccagaccctccgcagccgccaccgccgctgcccggaaacgggcgcttttagcggcgaacgaggaggaggaccgagagatccgaaagctggagcgttgcctcggtttgaacaagcgcaaaaagaaggacggcagcagctccgtgccgctgagctttgcacgcgacggtcttgactatattctgggagccctggagtctgggaaaaatagcggcttgtacgacagcagtggtgaggaggaggaagatgccggacagacactccccgaaagtgacttagagagtgactcccaggacgaaagtgaggaggaggaggagggagacgtagaaaaggaaaagaaggcgcaggaagcagaagcgcagagcgaggacgacgacgaggatacagaagaggaacagggggaagaaaaggaaaagggagcgcaggagaaaaggagggggaagagagtccgttttgcagaagatgaagaaaagagtgaaaattcctcggaggacggtgacataacggataagagtctttgtggaagtggtgaaaagtacatcccacctcatgtgaggcaagctgaggagacagtggacttcaagaaaaaggaagaactagaaaggctgaagaaacatgtaaaaggtctacttaacaggttgagtgaacccaacatggcttccatcagtgggcagctggaggaactgtacatggcccacagcagaaaggacatgaatgacaccctgacctccgctctcatgggtgcctgcgtcactgcctcggccatgcccagcagactgatgatggagcatgttctcttagtcagcatccttcaccacacagttggaatcgaggtcggtgcccactttctggaggcagtggtgaggaagttcgatgccatctataaatacggaagcgaagggaaagagtgtgacaacctgttcaccgtcattgcccatttatacaacttccacgtggtacagtctctcctcatcttcgacattttgaaaaaactgattggaactttcaccgaaaaagatattgaactgatcttgttaatgctgaaaaacgtgggtttttcattgaggaaagatgatgctttatcacttaaggaattgatcactgaagcccagaccaaagccagcggggcaggcagcgagtttcaggaccagaccaggattcggtttatgctagagacgatgttggccctgaagaacaatgacatgcgcaaaattccaggctatgaccccgagcccgtggagaagctgaggaaactgcagagagctttggtccgcaacgccggctcaggttctgagacgcagcttcgcgtctcctgggacagtgtcttgagtgcggagcagacgggtcgctggtggattgtggggtccgcctggagtggggccccgatgatcgacaacagtcaccatacgcacctgcagaagcagcttgtggggacggtcagttcaaagatcctagaactcgcccggaagcagaggatgaacacagacatccggagaaacatattctgcacaataatgacaagtgaagattttttggatgcttttgaaaagcttctgaagcttggacttaaggatcagcaggagagagaaatcattcacgttctcatggattgctgccttcaagagaaaacttacaatcccttctatgctttcctggctagcaaattctgtgaatatgaaaggagatttcagatgactttccagttcagcatatgggacaaatttcgggacttggaaaacttgccagctacgaatttctctaatttggttcatctggtggcccacttgttgaagacaaaatcgctttccctttccatcttaaaggtagttgaattcagtgaattggacaaacccagagtccgttttttacgaaaagtattaagtatcctattaatggaaacagaagttgaagacctcagtttaattttcacaagagtatctgagaanccaaagctgggggtgttacgtgagggggctctggatcatctgggtacgagctcaatcgacgcggggaacaa

SEQ ID NO: 447583 - DNA, 2297 bp, Homo sapiens
gtccaggagcgcgggagaggccggcccgggcggctcccagggacgcgtggtccgcatgaagcgcagaggcgggcgcgggccgcgccgcggtcctgctggcggtggggagaaggccctgaagaggctgaagctagcggtggaggagttcgtgcacgcgacttcggaaggcgaggctcccgggggttgcgaggggcgcggcgccccggtgagctttcgcccgggagggagaaaaagccgtaaggaactgaggaaggagaagcggcacctgcggaaagcacgccggctgcagaggacggcgggccccgaacagggtcccggcctgggaggccgaagcggagccgaagaagccagcggtcaccggcaggacacggaggagcgcgcccgcccagcccctagtcgggacccctcgcctcccaggaagccgcggccgtcccgggtcaaggccaaggccacggccgccaccgcaaagaccagaccctccgcagccgccaccgccgctgcccggaaacgggcgcttttagcggcgaacgaggaggaggaccgagagatccgaaagctggagcgttgcctcggtttgaacaagcgcaaaaagaaggacggcagcagctccgtgccgctgagctttgcacgcgacggtcttgactatattctgggagccctggagtctgggaaaaatagcggcttgtacgacagcagtggtgaggaggaggaagatgccggacagacactccccgaaagtgacttagagagtgactcccaggacgaaagtgaggaggaggaggagggagacgtagaaaaggaaaagaaggcgcaggaagcagaagcgcagagcgaggacgacgacgaggatacagaagaggaacagggggaagaaaaggaaaagggagcgcaggagaaaaggagggggaagagagtccgttttgcagaagatgaagaaaagagtgaaaattcctcggaggacggtgacataacggataagagtctttgtggaagtggtgaaaagtacatcccacctcatgtgaggcaagctgaggagacagtggacttcaagaaaaaggaagaactagaaaggctgaagaaacatgtaaaaggtctacttaacaggttgagtgaacccaacatggcttccatcagtgggcagctggaggaactgtacatggcccacagcagaaaggacatgaatgacaccctgacctccgctctcatgggtgcctgcgtcactgcctcggccatgcccagcagactgatgatggagcatgttctcttagtcagcatccttcaccacacagttggaatcgaggtcggtgcccactttctggaggcagtggtgaggaagttcgatgccatctataaatacggaagcgaagggaaagagtgtgacaacctgttcaccgtcattgcccatttatacaacttccacgtggtacagtctctcctcatcttcgacattttgaaaaaactgattggaactttcaccgaaaaagatattgaactgatcttgttaatgctgaaaaacgtgggtttttcattgaggaaagatgatgctttatcacttaaggaattgatcactgaagcccagaccaaagccagcggggcaggcagcgagtttcaggaccagaccaggattcggtttatgctagagacgatgttggccctgaagaacaatgacatgcgcaaaattccaggctatgaccccgagcccgtggagaagctgaggaaactgcagagagctttggtccgcaacgccggctcaggttctgagacgcagcttcgcgtctcctgggacagtgtcttgagtgcggagcagacgggtcgctggtggattgtggggtccgcctggagtggggccccgatgatcgacaacagtcaccatacgcacctgcagaagcagcttgtggggacggtagggacacccatgctcaaggctgccaggcagaggcacccccctgtgtggtgtgtggtcctggctttacctggagcagctctcttactgttcttgaatggtcactgaaatgtacaaggtttatctggaggccttacagaaattgctattaatattacattgtgatataattattccatttctgttgtatctttttattggactttaaaagatctaaaagttgaatggcacggggcaggggagcgcatgaggacctgaacgctcacggggcaggagtccgttgctgagacccctcaggctgccccccgggctgtgcattctaggctacaggctatggatttcacattgtggaaattcaagcccatttttcatccagacttccctcgttatcccc

SEQ ID NO: 447584 - DNA, 3736 bp, Homo sapiens
gatgactggcatccttgctgtaaggaagagctttttccttgtgaatgggcctcttggctgtaccctagggtgtgggaatttgctagagttccctgacctgcaatccctgggccagtgccgccctctcctgggctcttccaggagcattgaacactgaggatgtcaatgcaagtatctgaccaacagggggagcctgcaggccgagcaaagtttaacccacttagccactgctacttaagcaaggaagctgaaaggtaaccttagccctgccttgtgttccaaaagctgcaaggatcatttgctggctgtccctaagttcaaggcctccctaccttccccttcttttccaagtcacaacccgccctgcccgggccagacagcccagaagaacacttttctgccatttaaaaatccctctttcatcccccccagtccagtattgagtggaagtgcgccggagttccactgacagggcagctgctcttggagcaaacaagcccacactccagttgtttagggcattatctgaagagtcagtgacccctgaatgtgtactggctcccaggcctcctcagacttggcccaggtctagtcagtgatcctggagaggaaactggggagggggcttccaactgccctgcatggaagaggagaggaaggtgcccctgtgtgggctggaagcctgcagaggttttgccgttgctgatcttgatagaatcctaaaccgatttatagctgataacagttccatggggagagaaatcctaagttatgattaatgtttttccccgctataatatcttgcctgtttttttggattattttccccattgtgatcctaagctcttaaaaaacttgagggaaaacattcatctaatttactaaaagagaaagctttccattgaaaggtagatactttgaggagtaaaaagacttctttgaatgctggtaaacaccgcatttattttgtgtatgcagtttgatttgcacatgtataaatggagatgcttttcatttttgtttggactgggtttgtgtcactgctcattacagtttgcttttttgtgtgtttgctgtgcgtttggagatattagtcagtttctttagtgatatttgtttccttgatgtgccttttcgtttttctttggggttttggaatccggatgctgttgaagggcaatagcagactcctccagctaagagacaggacatgttcttgagccactgtagctgttgaagctggacaccagacgctccctataacccccccgccaggccatagcgtgtatgcatgtgcacttccacccacagaggagggtgtgaagccttgagaacctcaagaaagggctggattctgccatacctttgggtctaccttgggactgctggttgccaacgtgtcaaccagcctgtgttccctgccacccacgcacttgctgaggtgtggctgaggcagaatcatgtgaatgggtgcatccaaggagttcagggccctgcttggagaagaaatactttagcatcatgaaagggaaagaacgtgcaccccttttttgtttctttagtgaatgcaagatttaataaaagtgaataatgagcttcccctttgggagtggagcccagtgcagctcactgacagggttgacatcagtatgatgtgttggactgaaactgtatgtctgtaggtaggtgtgtgccttttagggcagaccacggtggccaccccatttctccaaggtggtttacctagcttgtgtatattagacattgccaccctcacctctggccaaaaattcttgatttaaaaagaaaagtctattttgttaacgacaggctctgttgtatgtgttactatcccaagcctggattattttatttatttaaaagtattttaatttccatattggctttattctaatcccatccatccctgtggagctgcagagcatcttcatgtgagtagacggatggacataaatagattcatgctcatttaggaagctgggagtttcgtgaagctgagggtgagttcctgtgattcttgttcgcttcaacaaaaagtgggagaccaagtttttatagcaaaagaccaaattagctgtagagtcttgaatgcagaaaaaaattaccctagctttcttagcacttagggttttgtgaggattcagtgtttagcacagtgcttggcacatagtaagccctagtaaatgttaaatattgttattagtgtttcgtaaaacttgagaaatagagctgagctcattcccttcctgttgattcaaaaataatacctacatgaaaacatgattccaagttgattgaatgttgtaggaattactggtttagagtagcccagttctcggcctaccctgctggttgggatcttactgtattcttgaatgcactggtttgaaaatatgccagacttcagcccccaaggaaacaaggctgcaagaatttatgaactccagctggaaaaggtaaaggtgacctttggctagccacatactggaccttaccccactgacgtctttcagaacattccaagggttttcctcaaggaacatttttgagctagaaattaaaatgggttctctggcagactgcaccccttgagtcaaagttaacagtattcctttgaatgcaataatagaggcttttctgcgttaagggagaaggaatgaccaattgaacttacacattccccaggcaggtccctttgccggcccctacaggctggggtggcccctcctgtcctcagggatcagactcccagactggttagttctgcatgtttccatcaaattaaaggttattccctggccgcctcctggagaaaaccaaccccaccctgccagctgggggcaatggggcagggattttggcctctcagaacagctcctagaggctgctcatgactgaatgttttcccaaatcacctaaatatcggtttgctttttgttttgggggagaggatttagcctcttacttccctgatggattcaaagttttatctatctccttatctcctgccctgtcttggcacaactctggatagattgcaggtgtggaatttgctggagtttggtgacttcgtcaaattcctttggattctgttccgccaaatcagcagtctcgtcctgtggatgcagtgactggaatttcccatctgcaaagcatctctgtagcccagattttgtggagccttaagacactccctcaatgccaccctgaccccacggctggagaaccctgtgcttatgtggtgggcagggccactgttgatggaggatggcggggacggggtggtgctcaaaggatctgtggtgctggaggtctacacgcctctcaggacagcgtgtcaggaacctcagagcagcttcacatctgccaaagctgagagggagcgaacttgggaagcattttgctcattgtcctacccaagtattaatagcataatagttgatgccaaaggagatggtgacgtcccttccactgtagttgctgtcacaaccttgacgtctttaagctaatggccgtttgcatctgtgtcttcaaacagatcctggttacagccattttgtgtgattcacttcgggggttaagtaatgcaggattctgcaaacaaggtgtcgccgtccaaatgtactgtcctggcatagagagcactgctttgttttccactgttgtagagaaaactagggagaactttatttttcaataaacttttcttgtgtga

SEQ ID NO: 447585 - DNA, 3333 bp, Homo sapiens
aatcagtcggtcaccactaacatgaccagtccagtattgagtggaagtgcgccggagttccactgacagggcagctgctcttggagcaaacaagcccacactccagttgtttagggcattatctgaagagtcagtgacccctgaatgtgtactggctcccaggcctcctcagacttggcccaggtctagtcagtgatcctggagaggaaactggggagggggcttccaactgccctgcatggaagaggagaggaaggtgcccctgtgtgggctggaagcctgcagaggttttgccgttgctgatcttgatagaatcctaaaccgatttatagctgataacagttccatggggagagaaatcctaagttatgattaatgtttttccccgctataatatcttgcctgtttttttggattattttccccattgtgatcctaagctcttaaaaaacttgagggaaaacattcatctaatttactaaaagagaaagctttccattgaaaggtagatactttgaggagtaaaaagacttctttgaatgctggtaaacaccgcatttattttgtgtatgcagtttgatttgcacatgtataaatggagatgcttttcatttttgtttggactgggtttgtgtcactgctcattacagtttgcttttttgtgtgtttgctgtgcgtttggagatattagtcagtttctttagtgatatttgtttccttgatgtgccttttcgtttttctttggggttttggaatccggatgctgttgaagggcaatagcagactcctccagctaagagacaggacatgttcttgagccactgtagctgttgaagctggacaccagacgctccctataacccccccgccaggccatagcgtgtatgcatgtgcacttccacccacagaggagggtgtgaagccttgagaacctcaagaaagggctggattctgccatacctttgggtctaccttgggactgctggttgccaacgtgtcaaccagcctgtgttccctgccacccacgcacttgctgaggtgtggctgaggcagaatcatgtgaatgggtgcatccaaggagttcagggccctgcttggagaagaaatactttagcatcatgaaagggaaagaacgtgcaccccttttttgtttctttagtgaatgcaagatttaataaaagtgaataatgagcttcccctttgggagtggagcccagtgcagctcactgacagggttgacatcagtatgatgtgttggactgaaactgtatgtctgtaggtaggtgtgtgccttttagggcagaccacggtggccaccccatttctccaaggtggtttacctagcttgtgtatattagacattgccaccctcacctctggccaaaaattcttgatttaaaaagaaaagtctattttgttaacgacaggctctgttgtatgtgttactatcccaagcctggattattttatttatttaaaagtattttaatttccatattggctttattctaatcccatccatccctgtggagctgcagagcatcttcatgtgagtagacggatggacataaatagattcatgctcatttaggaagctgggagtttcgtgaagctgagggtgagttcctgtgattcttgttcgcttcaacaaaaagtgggagaccaagtttttatagcaaaagaccaaattagctgtagagtcttgaatgcagaaaaaaattaccctagctttcttagcacttagggttttgtgaggattcagtgtttagcacagtgcttggcacatagtaagccctagtaaatgttaaatattgttattagtgtttcgtaaaacttgagaaatagagctgagctcattcccttcctgttgattcaaaaataatacctacatgaaaacatgattccaagttgattgaatgttgtaggaattactggtttagagtagcccagttctcggcctaccctgctggttgggatcttactgtattcttgaatgcactggtttgaaaatatgccagacttcagcccccaaggaaacaaggctgcaagaatttatgaactccagctggaaaaggtaaaggtgacctttggctagccacatactggaccttaccccactgacgtctttcagaacattccaagggttttcctcaaggaacatttttgagctagaaattaaaatgggttctctggcagactgcaccccttgagtcaaagttaacagtattcctttgaatgcaataatagaggcttttctgcgttaagggagaaggaatgaccaattgaacttacacattccccaggcaggtccctttgccggcccctacaggctggggtggcccctcctgtcctcagggatcagactcccagactggttagttctgcatgtttccatcaaattaaaggttattccctggccgcctcctggagaaaaccaaccccaccctgccagctgggggcaatggggcagggattttggcctctcagaacagctcctagaggctgctcatgactgaatgttttcccaaatcacctaaatatcggtttgctttttgttttgggggagaggatttagcctcttacttccctgatggattcaaagttttatctatctccttatctcctgccctgtcttggcacaactctggatagattgcaggtgtggaatttgctggagtttggtgacttcgtcaaattcctttggattctgttccgccaaatcagcagtctcgtcctgtggatgcagtgactggaatttcccatctgcaaagcatctctgtagcccagattttgtggagccttaagacactccctcaatgccaccctgaccccacggctggagaaccctgtgcttatgtggtgggcagggccactgttgatggaggatggcggggacggggtggtgctcaaaggatctgtggtgctggaggtctacacgcctctcaggacagcgtgtcaggaacctcagagcagcttcacatctgccaaagctgagagggagcgaacttgggaagcattttgctcattgtcctacccaagtattaatagcataatagttgatgccaaaggagatggtgacgtcccttccactgtagttgctgtcacaaccttgacgtctttaagctaatggccgtttgcatctgtgtcttcaaacagatcctggttacagccattttgtgtgattcacttcgggggttaagtaatgcaggattctgcaaacaaggtgtcgccgtccaaatgtactgtcctggcatagagagcactgctttgttttccactgttgtagagaaaactagggagaactttatttttcaataaacttttcttgtgtga

SEQ ID NO: 447586 - DNA, 4150 bp, Homo sapiens
gatgactggcatccttgctgtaaggaagagctttttccttgtgaatgggcctcttggctgtaccctagggtgtgggaatttgctagagttccctgacctgcaatccctgggccagtgccgccctctcctgggctcttccaggagcattgaacactgaggatgtcaatgcaagtatctgaccaacagggggagcctgcaggccgagcaaagtttaacccacttagccactgctacttaagcaaggaagctgaaaggtaaccttagccctgccttgtgttccaaaagctgcaaggatcatttgctggctgtccctaagttcaaggcctccctaccttccccttcttttccaagtcacaacccgccctgcccgggccagacagcccagaagaacacttttctgccatttaaaaatccctctttcatcccccccagtccagtattgagtggaagtgcgccggagttccactgacagggcagctgctcttggagcaaacaagcccacactccagttgtttagggcattatctgaagagtcagtgacccctgaatgtgtactggctcccaggcctcctcagacttggcccaggtctagtcagtgatcctggagaggaaactggggagggggcttccaactgccctgcatggaagaggagaggaaggtgcccctgtgtgggctggaagcctgcagaggttttgccgttgctgatcttgatagaatcctaaaccgatttatagctgataacagttccatggggagagaaatcctaagttatgattaatgtttttccccgctataatatcttgcctgtttttttggattattttccccattgtgatcctaagctcttaaaaaacttgagggaaaacattcatctaatttactaaaagagaaagctttccattgaaaggtagatactttgaggagtaaaaagacttctttgaatgctggtaaacaccgcatttattttgtgtatgcagtttgatttgcacatgtataaatggagatgcttttcatttttgtttggactgggtttgtgtcactgctcattacagtttgcttttttgtgtgtttgctgtgcgtttggagatattagtcagtttctttagtgatatttgtttccttgatgtgccttttcgtttttctttggggttttggaatccggatgctgttgaagggcaatagcagactcctccagctaagagacaggacatgttcttgagccactgtagctgttgaagctggacaccagacgctccctataacccccccgccaggccatagcgtgtatgcatgtgcacttccacccacagaggagggtgtgaagccttgagaacctcaagaaagggctggattctgccatacctttgggtctaccttgggactgctggttgccaacgtgtcaaccagcctgtgttccctgccacccacgcacttgctgaggtgtggctgaggcagaatcatgtgaatgggtgcatccaaggagttcagggccctgcttggagaagaaatactttagcatcatgaaagggaaagaacgtgcaccccttttttgtttctttagtgaatgcaagatttaataaaagtgaataatgagcttcccctttgggagtggagcccagtgcagctcactgacagggttgacatcagtatgatgtgttggactgaaactgtatgtctgtaggtaggtgtgtgccttttagggcagaccacggtggccaccccatttctccaaggtggtttacctagcttgtgtatattagacattgccaccctcacctctggccaaaaattcttgatttaaaaagaaaagtctattttgttaacgacaggctctgttgtatgtgttactatcccaagcctggattattttatttatttaaaagtattttaatttccatattggctttattctaatcccatccatccctgtggagctgcagagcatcttcatgtgagtagacggatggacataaatagattcatgctcatttaggaagctgggagtttcgtgaagctgagggtgagttcctgtgattcttgttcgcttcaacaaaaagtgggagaccaagtttttatagcaaaagaccaaattagctgtagagtcttgaatgcagaaaaaaattaccctagctttcttagcacttagggttttgtgaggattcagtgtttagcacagtgcttggcacatagtaagccctagtaaatgttaaatattgttattagtgtttcgtaaaacttgagaaatagagctgagctcattcccttcctgttgattcaaaaataatacctacatgaaaacatgattccaagttgattgaatgttgtaggaattactggtttagagtagcccagttctcggcctaccctgctggttgggatcttactgtattcttgaatgcactggtttgaaaatatgccagacttcagcccccaaggaaacaaggctgcaagaatttatgaactccagctggaaaaggtaaaggtgacctttggctagccacatactggaccttaccccactgacgtctttcagaacattccaagggttttcctcaaggaacatttttgagctagaaattaaaatgggttctctggcagactgcaccccttgagtcaaagttaacagtattcctttgaatgcaataatagaggcttttctgcgttaagggagaaggaatgaccaattgaacttacacattccccaggcaggtccctttgccggcccctacaggctggggtggcccctcctgtcctcagggatcagactcccagactggttagttctgcatgtttccatcaaattaaaggttattccctggccgcctcctggagaaaaccaaccccaccctgccagctgggggcaatggggcagggattttggcctctcagaacagctcctagaggctgctcatgactgaatgttttcccaaatcacctaaatatcggtttgctttttgttttgggggagaggatttagcctcttacttccctgatggattcaaagttttatctatctccttatctcctgccctgtcttggcacaactctggatagattgcaggtgtggaatttgctggagtttggtgacttcgtcaaattcctttggattctgttccgccaaatcagcagtctcgtcctgtggatgcagtgactggaatttcccatctgcaaagcatctctgtagcccagattttgtggagccttaagacactccctcaatgccaccctgaccccacggctggagaaccctgtgcttatgtggtgggcagggccactgttgatggaggatggcggggacggggtggtgctcaaaggatctgtggtgctggaggtctacacgcctctcaggacagcgtgtcaggaacctcagagcagcttcacatctgccaaagctgagagggagcgaacttgggaagcattttgctcattgtcctacccaagtattaatagcataatagttgatgccaaaggagatggtgacgtcccttccactgtagttgctgtcacaaccttgacgtctttaagctaatggccgtttgcatctgtgtcttcaaacagatcctggttacagccattttgtgtgattcacttcgggggttaagtaatgcaggattctgcaaacaaggtgtcgccgtccaaatgtactgtcctggcatagagagcactgctttgttttccactgttgtagagaaaactagggagaactttatttttcaataaacttttcttgtgtgaaaaaaaaaaaaaaaaaaaaaaaaaaaaatgtgtgtgtgggggggcctggggccctgggagaaagttttttgagaaccatggggtgtggggcgccgggggcccagttgaggttaaggtgaccgtggggccaaagggggttcccaagggaaacccggggccaggacaaggggcggggatttctcaccaattaaaaaaggccggggggaaacgcggagggtccgggaacaattcccgaggaggggagtccgggagggccaaacacaggggggagctctattaacccggggaggtccaagggagaagcccagatataaaattagcccgggcgcgcggggcgggcaccaacaccgccacacacacaagaaacaagaacaaaagaaaaacaaacaaaaccaacagaagaaagaaaaaggg

SEQ ID NO: 447587 - DNA, 2719 bp, Homo sapiens
gatgactggcatccttgctgtaaggaagagctttttccttgtgaatgggcctcttggctgtaccctagggtgtgggaatttgctagagttccctgacctgcaatccctgggccagtgccgccctctcctgggctcttccaggagcattgaacactgaggatgtcaatgcaagtatctgaccaacagggggagcctgcaggccgagcaaagtttaacccacttagccactgctacttaagcaaggaagctgaaaggtaaccttagccctgccttgtgttccaaaagctgcaaggatcatttgctggctgtccctaagttcaaggcctccctaccttccccttcttttccaagtcacaacccgccctgcccgggccagacagcccagaagaacacttttctgccatttaaaaatccctctttcatcccccccagtccagtattgagtggaagtgcgccggagttccactgacagggcagctgctcttggagcaaacaagcccacactccagttgtttagggcattatctgaagagtcagtgacccctgaatgtgtactggctcccaggcctcctcagacttggcccaggtctagtcagtgatcctggagaggaaactggggagggggcttccaactgccctgcatggaagaggagaggaaggtgcccctgtgtgggctggaagcctgcagaggttttgccgttgctgatcttgatagaatcctaaaccgatttatagctgataacagttccatggggagagaaatcctaagttatgattaatgtttttccccgctataatatcttgcctgtttttttggattattttccccattgtgatcctaagctcttaaaaaacttgagggaaaacattcatctaatttactaaaagagaaagctttccattgaaaggtagatactttgaggagtaaaaagacttctttgaatgctggtaaacaccgcatttattttgtgtatgcagtttgatttgcacatgtataaatggagatgcttttcatttttgtttggactgggtttgtgtcactgctcattacagtttgcttttttgtgtgtttgctgtgcgtttggagatattagtcagtttctttagtgatatttgtttccttgatgtgccttttcgtttttctttggggttttggaatccggatgctgttgaagggcaatagcagactcctccagctaagagacaggacatgttcttgagccactgtagctgttgaagctggacaccagacgctccctataacccccccgccaggccatagcgtgtatgcatgtgcacttccacccacagaggagggtgtgaagccttgagaacctcaagaaagggctggattctgccatacctttgggtctaccttgggactgctggttgccaacgtgtcaaccagcctgtgttccctgccacccacgcacttgctgaggtgtggctgaggcagaatcatgtgaatgggtgcatccaaggagttcagggccctgcttggagaagaaatacttcagaacattccaagggttttcctcaaggaacatttttgagctagaaattaaaatgggttctctggcagactgcaccccttgagtcaaagttaacagtattcctttgaatgcaataatagaggcttttctgcgttaagggagaaggaatgaccaattgaacttacacattccccaggcaggtccctttgccggcccctacaggctggggtggcccctcctgtcctcagggatcagactcccagactggttagttctgcatgtttccatcaaattaaaggttattccctggccgcctcctggagaaaaccaaccccaccctgccagctgggggcaatggggcagggattttggcctctcagaacagctcctagaggctgctcatgactgaatgttttcccaaatcacctaaatatcggtttgctttttgttttgggggagaggatttagcctcttacttccctgatggattcaaagttttatctatctccttatctcctgccctgtcttggcacaactctggatagattgcaggtgtggaatttgctggagtttggtgacttcgtcaaattcctttggattctgttccgccaaatcagcagtctcgtcctgtggatgcagtgactggaatttcccatctgcaaagcatctctgtagcccagattttgtggagccttaagacactccctcaatgccaccctgaccccacggctggagaaccctgtgcttatgtggtgggcagggccactgttgatggaggatggcggggacggggtggtgctcaaaggatctgtggtgctggaggtctacacgcctctcaggacagcgtgtcaggaacctcagagcagcttcacatctgccaaagctgagagggagcgaacttgggaagcattttgctcattgtcctacccaagtattaatagcataatagttgatgccaaaggagatggtgacgtcccttccactgtagttgctgtcacaaccttgacgtctttaagctaatggccgtttgcatctgtgtcttcaaacagatcctggttacagccattttgtgtgattcacttcgggggttaagtaatgcaggattctgcaaacaaggtgtcgccgtccaaatgtactgtcctggcatagagagcactgctttgttttccactgttgtagagaaaactagggagaactttatttttcaataaacttttcttgtgtga

SEQ ID NO: 447588 - DNA, 4159 bp, Homo sapiens
gatgactggcatccttgctgtaaggaagagctttttccttgtgaatgggcctcttggctgtaccctagggtgtgggaatttgctagagttccctgacctgcaatccctgggccagtgccgccctctcctgggctcttccaggagcattgaacactgaggatgtcaatgcaagtatctgaccaacagggggagcctgcaggccgagcaaagtttaacccacttagccactgctacttaagcaaggaagctgaaaggtaaccttagccctgccttgtgttccaaaagctgcaaggatcatttgctggctgtccctaagttcaaggcctccctaccttccccttcttttccaagtcacaacccgccctgcccgggccagacagcccagaagaacacttttctgccatttaaaaatccctctttcatcccccccagtccagtattgagtggaagtgcgccggagttccactgacagggcagctgctcttggagcaaacaagcccacactccagttgtttagggcattatctgaagagtcagtgacccctgaatgtgtactggctcccaggcctcctcagacttggcccaggtctagtcagtgatcctggagaggaaactggggagggggcttccaactgccctgcatggaagaggagaggaaggtgcccctgtgtgggctggaagcctgcagaggttttgccgttgctgatcttgatagaatcctaaaccgatttatagctgataacagttccatggggagagaaatcctaagttatgattaatgtttttccccgctataatatcttgcctgtttttttggattattttccccattgtgatcctaagctcttaaaaaacttgagggaaaacattcatctaatttactaaaagagaaagctttccattgaaaggtagatactttgaggagtaaaaagacttctttgaatgctggtaaacaccgcatttattttgtgtatgcagtttgatttgcacatgtataaatggagatgcttttcatttttgtttggactgggtttgtgtcactgctcattacagtttgcttttttgtgtgtttgctgtgcgtttggagatattagtcagtttctttagtgatatttgtttccttgatgtgccttttcgtttttctttggggttttggaatccggatgctgttgaagggcaatagcagactcctccagctaagagacaggacatgttcttgagccactgtagctgttgaagctggacaccagacgctccctataacccccccgccaggccatagcgtgtatgcatgtgcacttccacccacagaggagggtgtgaagccttgagaacctcaagaaagggctggattctgccatacctttgggtctaccttgggactgctggttgccaacgtgtcaaccagcctgtgttccctgccacccacgcacttgctgaggtgtggctgaggcagaatcatgtgaatgggtgcatccaaggagttcagggccctgcttggagaagaaatactttagcatcatgaaagggaaagaacgtgcaccccttttttgtttctttagtgaatgcaagatttaataaaagtgaataatgagcttcccctttgggagtggagcccagtgcagctcactgacagggttgacatcagtatgatgtgttggactgaaactgtatgtctgtaggtaggtgtgtgccttttagggcagaccacggtggccaccccatttctccaaggtggtttacctagcttgtgtatattagacattgccaccctcacctctggccaaaaattcttgatttaaaaagaaaagtctattttgttaacgacaggctctgttgtatgtgttactatcccaagcctggattattttatttatttaaaagtattttaatttccatattggctttattctaatcccatccatccctgtggagctgcagagcatcttcatgtgagtagacggatggacataaatagattcatgctcatttaggaagctgggagtttcgtgaagctgagggtgagttcctgtgattcttgttcgcttcaacaaaaagtgggagaccaagtttttatagcaaaagaccaaattagctgtagagtcttgaatgcagaaaaaaattaccctagctttcttagcacttagggttttgtgaggattcagtgtttagcacagtgcttggcacatagtaagccctagtaaatgttaaatattgttattagtgtttcgtaaaacttgagaaatagagctgagctcattcccttcctgttgattcaaaaataatacctacatgaaaacatgattccaagttgattgaatgttgtaggaattactggtttagagtagcccagttctcggcctaccctgctggttgggatcttactgtattcttgaatgcactggtttgaaaatatgccagacttcagcccccaaggaaacaaggctgcaagaatttatgaactccagctggaaaaggtaaaggtgacctttggctagccacatactggaccttaccccactgacgtctttcagaacattccaagggttttcctcaaggaacatttttgagctagaaattaaaatgggttctctggcagactgcaccccttgagtcaaagttaacagtattcctttgaatgcaataatagaggcttttctgcgttaagggagaaggaatgaccaattgaacttacacattccccaggcaggtccctttgccggcccctacaggctggggtggcccctcctgtcctcagggatcagactcccagactggttagttctgcatgtttccatcaaattaaaggttattccctggccgcctcctggagaaaaccaaccccaccctgccagctgggggcaatggggcagggattttggcctctcagaacagctcctagaggctgctcatgactgaatgttttcccaaatcacctaaatatcggtttgctttttgttttgggggagaggatttagcctcttacttccctgatggattcaaagttttatctatctccttatctcctgccctgtcttggcacaactctggatagattgcaggtgtggaatttgctggagtttggtgacttcgtcaaattcctttggattctgttccgccaaatcagcagtctcgtcctgtggatgcagtgactggaatttcccatctgcaaagcatctctgtagcccagattttgtggagccttaagacactccctcaatgccaccctgaccccacggctggagaaccctgtgcttatgtggtgggcagggccactgttgatggaggatggcggggacggggtggtgctcaaaggatctgtggtgctggaggtctacacgcctctcaggacagcgtgtcaggaacctcagagcagcttcacatctgccaaagctgagagggagcgaacttgggaagcattttgctcattgtcctacccaagtattaatagcataatagttgatgccaaaggagatggtgacgtcccttccactgtagttgctgtcacaaccttgacgtctttaagctaatggccgtttgcatctgtgtcttcaaacagatcctggttacagccattttgtgtgattcacttcgggggttaagtaatgcaggattctgcaaacaaggtgtcgccgtccaaatgtactgtcctggcatagagagcactgctttgttttccactgttgtagagaaaactagggagaactttatttttcaataaacttttcttgtgtgaaaaaaaaaaaaaaaaaaaaaaaaaaaagaaaaaaaaaaaaaaaaaaaaaaaaaaaaaaaaaaaaaaaaaaaaaaaaaaaaaaaaaaaaaaaaaaaaaaaaaaaagagggggcgggcgccggcacgcgcgcacacgcaagaaagaaaatatatcaaaacacaaaaggagggtgggggacgggcgggcgagaagaagaggagaatcagacaacgccggggggagtacatgatgctcatgacaacaaaacaggtggaggaaacaaaaaagcaagagcagggagagaaaccacgaaacgaaagacagcagggcggagagaagacacgacgaggagtgaggcagaaacaacacgaacagagaaggagacgacaacagacaaaaaaaggaggtaaaacacaagaagagagaccagaacgagaagaacag

SEQ ID NO: 447589 - DNA, 3681 bp, Homo sapiens
gatgactggcatccttgctgtaaggaagagctttttccttgtgaatgggcctcttggctgtaccctagggtgtgggaatttgctagagttccctgacctgcaatccctgggccagtgccgccctctcctgggctcttccaggagcattgaacactgaggatgtcaatgcaagtatctgaccaacagggggagcctgcaggccgagcaaagtttaacccacttagccactgctacttaagcaaggaagctgaaaggtaaccttagccctgccttgtgttccaaaagctgcaaggatcatttgctggctgtccctaagttcaaggcctccctaccttccccttcttttccaagtcacaacccgccctgcccgggccagacagcccagaagaacacttttctgccatttaaaaatccctctttcatcccccccagtccagtattgagtggaagtgcgccggagttccactgacagggcagctgctcttggagcaaacaagcccacactccagttgtttagggcattatctgaagagtcagtgacccctgaatgtgtactggctcccaggcctcctcagacttggcccaggtctagtcagtgatcctggagaggaaactggggagggggcttccaactgccctgcatggaagaggagaggaaggtgcccctgtgtgggctggaagcctgcagaggttttgccgttgctgatcttgatagaatcctaaaccgatttatagctgataacagttccatggggagagaaatcctaagttatgattaatgtttttccccgctataatatcttgcctgtttttttggattattttccccattgtgatcctaagctcttaaaaaacttgagggaaaacattcatctaatttactaaaagagaaagctttccattgaaaggtagatactttgaggagtaaaaagacttctttgaatgctggtaaacaccgcatttattttgtgtatgcagtttgatttgcacatgtataaatggagatgcttttcatttttgtttggactgggtttgtgtcactgctcattacagtttgcttttttgtgtgtttgctgtgcgtttggagatattagtcagtttctttagtgatatttgtttccttgatgtgccttttcgtttttctttggggttttggaatccggatgctgttgaagggcaatagcagactcctccagctaagagacaggacatgttcttgagccactgtagctgttgaagctggacaccagacgctccctataacccccccgccaggccatagcgtgtatgcatgtgcacttccacccacagaggagggtgtgaagccttgagaacctcaagaaagggctggattctgccatacctttgggtctaccttgggactgctggttgccaacgtgtcaaccagcctgtgttccctgccacccacgcacttgctgaggtgtggctgaggcagaatcatgtgaatgggtgcatccaaggagttcagggccctgcttggagaagaaatactttagcatcatgaaagggaaagaacgtgcaccccttttttgtttctttagtgaatgcaagatttaataaaagtgaataatgagcttcccctttgggagtggagcccagtgcagctcactgacagggttgacatcagtatgatgtgttggactgaaactgtatgtctgtaggtaggtgtgtgccttttagggcagaccacggtggccaccccatttctccaaggtggtttacctagcttgtgtatattagacattgccaccctcacctctggccaaaaattcttgatttaaaaagaaaagtctattttgttaacgacaggctctgttgtatgtgttactatcccaagcctggattattttatttatttaaaagtattttaatttccatattggctttattctaatcccatccatccctgtggagctgcagagcatcttcatgtgagtagacggatggacataaatagattcatgctcatttaggaagctgggagtttcgtgaagctgagggtgagttcctgtgattcttgttcgcttcaacaaaaagtgggagaccaagtttttatagcaaaagaccaaattagctgtagagtcttgaatgcagaaaaaaattaccctagctttcttagcacttagggttttgtgaggattcagtgtttagcacagtgcttggcacatagtaagccctagtaaatgttaaatattgttattagtgtttcgtaaaacttgagaaatagagctgagctcattcccttcctgttgattcaaaaataatacctacatgaaaacatgattccaagttgattgaatgttgtaggaattactggtttagagtagcccagttctcggcctaccctgctggttgggatcttactgtattcttgaatgcactggtttgaaaatatgccagacttcagcccccaaggaaacaaggctgcaagaatttatgaactccagctggaaaaggtaaaggtgacctttggctagccacatactggaccttaccccactgacgtctttcagaacattccaagggttttcctcaaggaacatttttgagctagaaattaaaatgggttctctggcagactgcaccccttgagtcaaagttaacagtattcctttgaatgcaataatagaggcttttctgcgttaagggagaaggaatgaccaattgaacttacacattccccaggcaggtccctttgccggcccctacaggctggggtggcccctcctgtcctcagggatcagactcccagactggttagttctgcatgtttccatcaaattaaaggttattccctggccgcctcctggagaaaaccaaccccaccctgccagctgggggcaatggggcagggattttggcctctcagaacagctcctagaggctgctcatgactgaatgttttcccaaatcacctaaatatcggtttgctttttgttttgggggagaggatttagcctcttacttccctgatggattcaaagttttatctatctccttatctcctgccctgtcttggcacaactctggatagattgcaggtgtggaatttgctggagtttggtgacttcgtcaaattcctttggattctgttccgccaaatcagcagtctcgtcctgtggatgcagtgactggaatttcccatctgcaaagcatctctgtagcccagattttgtggagccttaagacactccctcaatgccaccctgaccccacggctggagaaccctgtgtcaaaggatctgtggtgctggaggtctacacgcctctcaggacagcgtgtcaggaacctcagagcagcttcacatctgccaaagctgagagggagcgaacttgggaagcattttgctcattgtcctacccaagtattaatagcataatagttgatgccaaaggagatggtgacgtcccttccactgtagttgctgtcacaaccttgacgtctttaagctaatggccgtttgcatctgtgtcttcaaacagatcctggttacagccattttgtgtgattcacttcgggggttaagtaatgcaggattctgcaaacaaggtgtcgccgtccaaatgtactgtcctggcatagagagcactgctttgttttccactgttgtagagaaaactagggagaactttatttttcaataaacttttcttgtgtga

SEQ ID NO: 447590 - DNA, 1217 bp, Homo sapiens
ttgcgtcaatcatggtcatacgctgggtctgctgcgaggttgatatccgcgataccaaattaaaatgggttctctggcagactgcaccccttgagtcaaagttaacagtattcctttgaatgcaataatagaggcttttctgcgttaagggagaaggaatgaccaattgaacttacacattccccaggcaggtccctttgccggcccctacaggctggggtggcccctcctgtcctcagggatcagactcccagactggttagttctgcatgtttccatcaaattaaaggttattccctggccgcctcctggagaaaaccaaccccaccctgccagctgggggcaatggggcagggattttggcctctcagaacagctcctagaggctgctcatgactgaatgttttcccaaatcacctaaatatcggtttgctttttgttttgggggagaggatttagcctcttacttccctgatggattcaaagttttatctatctccttatctcctgccctgtcttggcacaactctggatagattgcaggtgtggaatttgctggagtttggtgacttcgtcaaattcctttggattctgttccgccaaatcagcagtctcgtcctgtggatgcagtgactggaatttcccatctgcaaagcatctctgtagcccagattttgtggagccttaagacactccctcaatgccaccctgaccccacggctggagaaccctgtgcttatgtggtgggcagggccactgttgatggaggatggcggggacggggtggtgctcaaaggatctgtggtgctggaggtctacacgcctctcaggacagcgtgtcaggaacctcagagcagcttcacatctgccaaagctgagagggagcgaacttgggaagcattttgctcattgtcctacccaagtattaatagcataatagttgatgccaaaggagatggtgacgtcccttccactgtagttgctgtcacaaccttgacgtctttaagctaatggccgtttgcatctgtgtcttcaaacagatcctggttacagccattttgtgtgattcacttcgggggttaagtaatgcaggattctgcaaacaaggtgtcgccgtccaaatgtactgtcctggcatagagagcactgctttgttttccactgttgtagagaaaactagggagaactttatttttcaataaacttttcttgtgtga

SEQ ID NO: 447591 - DNA, 1286 bp, Homo sapiens
gatgactggcatccttgctgtaaggaagagctttttccttgtgaatgggcctcttggctgtaccctagggtgtgggaatttgctagagttccctgacctgcaatccctgggccagtgccgccctctcctgggctcttccaggagcattgaacactgaggatgtcaatgcaagtatctgaccaacagggggagcctgcaggccgagcaaagtttaacccacttagccactgctacttaagcaaggaagctgaaaggtaaccttagccctgccttgtgttccaaaagctgcaaggatcatttgctggctgtccctaagttcaaggcctccctaccttccccttcttttccaagtcacaacccgccctgcccgggccagacagcccagaagaacacttttctgccatttaaaaatccctctttcatcccccccagtccagtattgagtggaagtgcgccggagttccactgacagggcagctgctcttggagcaaacaagcccacactccagttgtttagggcattatctgaagagtcagtgacccctgaatgtgtactggctcccaggcctcctcagacttggcccaggtctagtcagtgatcctggagaggaaactggggagggggcttccaactgccctgcatggaagaggagaggaaggtgcccctgtgtgggctggaagcctgcagaggttttgccgttgctgatcttgatagaatcctaaaccgatttatagctgataacagttccatggggagagaaatcctaagttatgattaatgtttttccccgctataatatcttgcctgtttttttggattattttccccattgtgatcctaagctcttaaaaaacttgagggaaaacattcatctaatttactaaaagagaaagctttccattgaaaggtagatactttgaggagtaaaaagacttctttgaatgctggtaaacaccgcatttattttgtgtatgcagtttgatttgcacatgtataaatggagatgcttttcatttttgtttggactgggtttgtgtcactgctcattacagtttgcttttttgtgtgtttgctgtgcgtttggagatattagtcagtttctttagtgatatttgtttccttgatgtgccttttcgtttttctttggggttttggaatccggatgctgttgaagggcaatagcagactcctccagctaagagacaggacatgttcttgagccactgtagctgttgaagctggacaccagacgctcccaatctgaagtgggagcggccgcaagctt

SEQ ID NO: 447592 - DNA, 389 bp, Homo sapiens
  misc_feature (45)..(45): n is a, c, g, or t
ggcagaaccagtcccttgtgtatggcaaagtggatagcttctggnagaataagaagatctacttgggaagcattttgctcattgtcctacccaagtattaatagcataatagttgatgccaaaggagatggtgacgtcccttccactgtagttgctgtcacaaccttgacgtctttaagctaatggccgtttgcatctgtgtcttcaaacagatcctggttacagccattttgtgtgattcacttcgggggttaagtaatgcaggattctgcaaacaaggtgtcgccgtccaaatgtactgtcctggcatagagagcactgctttgttttccactgttgtagagaaaactagggagaactttatttttcaataaacttttcttgtgtga

SEQ ID NO: 447593 - DNA, 549 bp, Homo sapiens
agcggccgcctactactactaaattcgcggccgcgtcgacccttctacccagcctacgaggggcagttttctctggaggagaagagcctgtcgctgaaaatcatgcagtacttttcccacttcatcagatcaggaaatcccaactacccttatgagttctcacggaaagtacccacatttgcaaccccctggcctgactttgtaccccgtgctggtggagagaactacaaggagttcagtgagctgctccccaatcgacagggcctgaagaaagccgactgctccttctggtccaagtacatctcgtctctgaagacatctgcagatggagccaagggcgggcagtcagcagagagtgaagaggaggagttgacggctggatctgggctaagagaagatctcctaagcctccaggaaccaggctctaagacctacagcaagtgaccagcccttgagctccccaaaaacctcacccgaggctgcccactatggtcatctttttctctaaaatagccacttaccttcaataaagtatctacatgcggtgaa

SEQ ID NO: 447594 - DNA, 515 bp, Homo sapiens
agcggccgcctactactactaaattcgcggccgcgtcgacggaggagaagagcctgtcgctgaaaatcatgcagtacttttcccacttcatcagatcaggaaatcccaactacccttatgagttctcacggaaagtacccacatttgcaaccccctggcctgactttgtaccccgtgctggtggagagaactacaaggagttcagtgagctgctccccaatcgacagggcctgaagaaagccgactgctccttctggtccaagtacatctcgtctctgaagacatctgcagatggagccaagggcgggcagtcagcagagagtgaagaggaggagttgacggctggatctgggctaagagaagatctcctaagcctccaggaaccaggctctaagacctacagcaagtgaccagcccttgagctccccaaaaacctcacccgaggctgcccactatggtcatctttttctctaaaatagccacttaccttcaataaagtatctacatgcggtgaa

SEQ ID NO: 447595 - DNA, 665 bp, Homo sapiens
catctcagtcgacttagagacccccctggttgttcatcagagggattgaagtgtatggaccgccagctgggaagccaaagcgatgtccaaggagctgtgaaataagaaatcgtcgtcttctccacggggtgggagataagtcaccaccccagtgttctgcggagggagagtttatgcctgtccagtgcaaatttgtcaacaccacagacatgatgatttttgatctggtccacagctacaacaggtttccagatgcatttgtgaccttcagttccttccagaggaggttccctgaggtatctgggtattgccactgtgctgacagccaagggcgggaactggctgagacaggtttggagttgttactggatgaaatttatgacaccatttttgctggcctggaccttccttccaccttcactgaaaccaccctgtaccggatactgcagagacggttcctcgcagttcaatcagtcatctctggcagattccgatgccccacaaaatgtgaagtggagcggtttacagcaaccagctttggtcacccctatgttccaagctgccgcctccgccgccaccaccacctccgccaccgggcccgccgctgggcccggacctcagtgctgggacgtacggtagtgcttgctcatggcgctgctcgagta

SEQ ID NO: 447596 - DNA, 386 bp, Homo sapiens
agaaaggaactgtctgccacaagcacgagatgacacactggttagaacatggagctctggcacctgcagcctaggctcaaatcctggctctgtcacccccagctctgagactctagggaagtggcttcaactctaccctggagccccctctaaagttgaaataatactgttgttacccagctcctgggattgctctgagagggaggctccgcactctccccggccgccgtcatcagccatgagagggctcagcagcaggcaattgctttggcaaaggaggtcagttgccccatgtcatccagccaagaagtggtgtcctgcctccgccagaagcctgccaatgtcctcaatgatgcccagaccaaggatggatccttaagtgcaag

SEQ ID NO: 447597 - DNA, 839 bp, Homo sapiens
gtgaccgtaaatctcattctctccaaggtttccagatgcatttgtgaccttcagttccttccagaggaggttccctgaggtatctgggtattgccactgtgctgacagccaagggcgggaactggctgagacaggtttggagttgttactggatgaaatttatgacaccatttttgctggcctggaccttccttccaccttcactgaaaccaccctgtaccggatactgcagagacggttcctcgcagttcaatcagtcatctctggcagattccgatgccccacaaaatgtgaagtggagcggtttacagcaaccagctttggtcacccctatgttccaagctgccgccgaaatggcgactatcaggcggtgcagtgccagacggaagggccctgctggtgtgtggacgcccaggggaaggaaatgcatggaacccggcagcaaggggagccgccatcttgtggtgggtttcctctgggggcttcctctttcggcctcggatcatattactttggcggtcctccagaccaacctctctggaccccattaattcaactgccttctagtgtgcccctctggcccttcaagctcaacctgtctgagaaccagtttatcatcattaacttccaacatgtttctcatcttgtgtcagacctcgttgcattttcagggagctcagggaatattaggaggctcatagatgaagaaaaataaaagagaattgagttcccatgtgcggtgagacaggagcatgcacataactaaaggagcatggtgaggtgggcattcgatcttgcagcaggtatgggaaggaggcatttaggaagaatgcatggaa

SEQ ID NO: 447598 - DNA, 649 bp, Homo sapiens
tgagtgtctgtctgctgacaacaaatccaagtaccattgtacccttagcatgtccctatagccaggagacccatctggcacctcagccagtggaaaattccctctaaagggcattagcaagaaatgtccactggaggctggggtctctttgggacaaaaggaagggaccagagaagagaagtcctaatctggcttggaccaaccttccttgcccctctgtttcagatggagccaagggcgggcagtcagcagagagtgaagaggaggagttgacggctggatctgggctaagagaagatctcctaagcctccaggaaccaggctctaagacctacagcaagtgaccagcccttgagctccccaaaaacctcacccgaggctgcccactatggtcatctttttctctaaaatagccacttaccttcaataaagtatctacatgcggtgaatgcggtgaagcattgttgactctaatgtgtgaatccaaggcaattcgttggtaacaccaactatatcttaataatctttctaaggtttgaatcccaggctgctgtttccattcaacaaatgtttatgagcatctgttatgcaccaggccctgtgctgggtgctggagaaacaaggactttgctcctccagaaggagagaa

SEQ ID NO: 447599 - DNA, 498 bp, Homo sapiens
cgagtgcaagtgggaagtgattcaggtgatgaaaggaaagacaaatttccctcatggatatttctttcttctcatttgcccagaaatcccaactacccttatgagttctcacggaaagtacccacatttgcaaccccctggcctgactttgtaccccgtgctggtggagagaactacaaggagttcagtgagctgctccccaatcgacagggcctgaagaaagccgactgctccttctggtccaagtacatctcgtctctgaagacatctgcagatggagccaagggcgggcagtcagcagagagtgaagaggaggagttgacggctggatctgggctaagagaagatctcctaagcctccaggaaccaggctctaagacctacagcaagtgaccagcccttgagctccccaaaaacctcacccgaggctgcccactatggtcatctttttctctaaaatagccacttaccttcaataaagtatctacatgcggtgaa

SEQ ID NO: 447600 - DNA, 555 bp, Homo sapiens
aaattactttcttcataagtcaccccaggaagcatataagtcatacatacgagcctatgattccccgcttgctctgacgtctgagcaagctgggaagcaatttgaggaaagtcgaggccggaccagtagcaaaacagccttttaccaggcactgcagaattctctgggtggcgaggactcagatgcccgcgtcgaggctgctgctacatggtattactctctggagcactccacggatgactatgcctccttctcccgggctctggagaatgccacccgggactactttatcatctgccctataatcgacatggccagtgcctgggcaaagagggcccgaggaaacgtcttcatgtaccatgctcctgaaaactacggccatggcagcctggagctgctggcggatgttcagtttgccttggggcttcccttctacccagcctacgaggggcagttttctctggaggagaagagcctgtcgctgaaaatcatgcagtacttttcccacttcatcagatcagggctgctcagacggtaccagctcgatctaagttg

SEQ ID NO: 447601 - DNA, 351 bp, Homo sapiens
tgccctgagtatgacacccatgtctgaccagctctggttttgtactagggagctggaatagagctgcaagaagcttctgggttacatcttacgtgggaaacagagttttcaggcctaggaagagcctgtgtcaagggagatggggctattgcagtaatggtgggtacccagtgacagcacactcaagctcataaaaataaacatcttcctttgcaggtctgacacccttagaaggaactcaagacacctttaccaattttcagcaggtttatctctggaaaggtgagctccgtggtggaagagggggttagcaggacgctgattacatgagatgtctgcacctctcctctc

SEQ ID NO: 447602 - DNA, 753 bp, Homo sapiens
ataagctctgctgagagttgtcgagacaaaccaaatcaaaccattaaaactataatttaaaaacatactttatcaaaaacactataaatgaattgatttccagaatgcatattcaattcataacttaattgcagagttgacagtgtatctactgtatgctatccacatggcacatgttaaggagtagaaatgaacaaaattagtttggcatagatctatgtgtccaggtcaggatctatatctccctattttaacagtggggccagagaggtggtaataaaggctgccatttattgagcaatgtatgtttacaaggattatctcacaatcccaaagccacccataaactggccattgctatcctgagttacagaagacaaaaatagttttaagagtgtaagtgacttgctcactgacatagaaccagcaaggggtaagggcttaaattcaaacccaaagtaacaacatcaaagcctgcagtctttttttgttttaaatgattttatctttggggtgcacgaaaatctcagactttaccactatacaattcatccatgtaactcaaaaccacttgcatcctaaaagctattgaaataaaaaatattaaaaaataatctcatctttgattttagatttagggggtgtgcatgcaggcttgttatatgggtatgtggtatactgccgaggcttggggtacgattgagtccctcacccaggtagtgagcgtagtcgcaatagttagttttacaaccc

SEQ ID NO: 447603 - DNA, 514 bp, Homo sapiens
tttttttttccaccccaggaggagaggtgacatgtctcactctgaacagcttgggaattcagatgtgcagtgaggagaatggaggagcctggcgcattttggactgtggctctcctgacattgaagtccacacctatcccttcggatggtaccagaagcccattgctcaaaataatgctcccagtttttgccctttggttgttctgccttccctcacagagaaagtgtctctggactcgtggcagtccctggccctctcttcagtggttgttgatccatccattaggcactttgatgttgcccatgtcagcactgctgccaccagcaatttctctgctgtccgagacctctgtttgtcggaatgttcccaacatgaggcctgtctcatcaccactctgcaaacccaacctggggctgtgagatgtatgttctatgctgatactcaaagctgcacacatagtctgcaaaaaaaaaagtcgacgcggccgcgaatttagtagtagtaggcggccgc

SEQ ID NO: 447604 - DNA, 628 bp, Homo sapiens
ttgccatcattttagtgagatttgagttaggaaatgaggtttaatatgaatttaatatgtcatctttaattggaaactttcagtctgtattttactcatttgtcctcatattttcatgactacagcaaatctctaagtaatgtattttctttcttcctctatgaagttatactggaagataaagtgaagaacttttacactcgcctgccgttccaaaaactgatggggatatccattagaaataaagtgcccatgtctgaaaaatctatttctaatgggtaagctacttgtgtctcacccctaatgtttattatgaataatacttcctcaaagaagatgacacaatcacagctaaaaacagaagcatacccagcactttgggaggccgagctgggctgatcacgaggtcaagagatcaagactatcctgaccaacatggtgaagccccgtctctactaaaaatacaaaaattagctgggcatggtggcggcacatgctagtagtcccagttactcaggaggctgaggcagaagaattgcttgaactcaggaggtggaggttgcagtgagctgagattgcgccactgcactccagcctagcaacagagcgagactctgtcaaaaaaaaa

SEQ ID NO: 447605 - DNA, 445 bp, Homo sapiens
gtggctcccttttccactgtaggatgttcagcagcatcctgacccccacacactagatgccagtacaatcctttctcttcccagttgtgacaaccaggaatgtctccaagcattgccaaagggttctctaggggaggtagagatggggtggcaaaatctcgcctgctgagagcccctgggctgagctgagggtaccacatgcttgagctatctttgcgggctctgacgtcttctaaaatgcacaatgattttatgttccattccacagtatattgtatttaactccactgtatattgcatttacgttactataaaatgttttgcttccatgtctttaagtgaaattgatgtcctgggaagatgtttatttcacaggttttttgatgcctaaaatacatcagcatggacgccagttttcgagcccaccacctaccagagggaactg

SEQ ID NO: 447606 - DNA, 4661 bp, Homo sapiens
gctcctttcgcgtctgcaaccctggcttgttccccgcttagaggatccgtctgagcaagctgggaatcacagctgcctcagccccgggcctgccaaggccccagctgtggcagaccatccagacccaagggcactttcagctccagctcccgccgggcaagatgtgcagtgctgactacgcggatttgctgcagactttccaggttttcatattggatgagctgacagcccgcggcttctgccagatccaggtgaagacttttggcaccctggtttccattcctgtctgcaacaactcctctgtgcaggtgggttgtctgaccagggagcgtttaggagtgaatgttacatggaaatcacggcttgaggacatcccagtggcttctcttcctgacttacatgacattgagagagccttggtgggcaaggatctccttgggcgcttcacagatctgatccagagtggctcattccagcttcatctggactccaagacgttcccagcggaaaccatccgcttcctccaaggggaccactttggcacctctcccaggacatggtttgggtgctcggaaggattctaccaagtcttgacaagtgaggccagtcaggacggactgggatgcgttaagtgtcctgaaggaagctattcccaagatgaggaatgcattccttgtcctgttggattctaccaagaacaggcagggagcttggcctgtgtcccatgtcctgtgggcagaacgaccatttctgctggagctttcagccagactcactgtgtcactgactgtcagaggaacgaagcaggcctgcaatgtgaccagaatggccagtatcgagccagccagaaggacaggggcagtgggaaggccttctgtgtggacggcgaggggcggaggctgccatggtgggaaacagaggcccctcttgaggactcacagtgtttgatgatgcagaagtttgagaaggttccagaatcaaaggtgatcttcgacgccaatgctcctgtggctgtcagatccaaagttcctgattctgagttccccgtgatgcagtgcttgacagattgcacagaggacgaggcctgcagcttcttcaccgtgtccacgacggagccagagatttcctgtgatttctatgcttggacaagtgacaatgttgcctgcatgacttctgaccagaaacgagatgcactggggaactcaaaggccaccagctttggaagtcttcgctgccaggtgaaagtgaggagccatggtcaagattctccagctgtgtatttgaaaaagggccaaggatccaccacaacacttcagaaacgctttgaacccactggtttccaaaacatgctttctggattgtacaaccccattgtgttctcagcctcaggagccaatctaaccgatgctcacctcttctgtcttcttgcatgcgaccgtgatctgtgttgcgatggcttcgtcctcacacaggttcaaggaggtgccatcatctgtgggttgctgagctcacccagtgtcctgctttgtaatgtcaaagactggatggatccctctgaagcctgggctaatgctacatgtcctggtgtgacatatgaccaggagagccaccaggtgatattgcgtcttggagaccaggagttcatcaagagtctgacacccttagaaggaactcaagacacctttaccaattttcagcaggtttatctctggaaagattctgacatggggtctcggcctgagtctatgggatgtagaaaagacacagtgccaaggccagcatctccaacagaagcaggtttgacaacagaacttttctcccctgtggacctcaaccaggtcattgtcaatggaaatcaatcactatccagccagaagcactggcttttcaagcacctgttttcagcccagcaggcaaacctatggtgcctttctcgttgtgtgcaggagcactctttctgtcagctcgcagagataacagagagtgcatccttgtacttcacctgcaccctctacccagaggcacaggtgtgtgatgacatcatggagtccaatgcccagggctgcagactgatcctgcctcagatgccaaaggccctgttccggaagaaagttatactggaagataaagtgaagaacttttacactcgcctgccgttccaaaaactgatggggatatccattagaaataaagtgcccatgtctgaaaaatctatttctaatgggttctttgaatgtgaacgacggtgcgatgcggacccatgctgcactggctttggatttctaaatgtttcccagttaaaaggaggagaggtgacatgtctcactctgaacagcttgggaattcagatgtgcagtgaggagaatggaggagcctggcgcattttggactgtggctctcctgacattgaagtccacacctatcccttcggatggtaccagaagcccattgctcaaaataatgctcccagtttttgccctttggttgttctgccttccctcacagagaaagtgtctctggactcgtggcagtccctggccctctcttcagtggttgttgatccatccattaggcactttgatgttgcccatgtcagcactgctgccaccagcaatttctctgctgtccgagacctctgtttgtcggaatgttcccaacatgaggcctgtctcatcaccactctgcaaacccaacctggggctgtgagatgtatgttctatgctgatactcaaagctgcacacatagtctgcagggtcagaactgccgacttctgcttcgtgaagaggccacccacatctaccggaagccaggaatctctctgctcagctatgaggcatctgtaccttctgtgcccatttccacccatggccggctgctgggcaggtcccaggccatccaggtgggtacctcatggaagcaagtggaccagttccttggagttccatatgctgccccgcccctggcagagaggcgcttccaggcaccagagcccttgaactggacaggctcctgggatgccagcaagccaagggccagctgctggcagccaggcaccagaacatccacgtctcctggagtcagtgaagattgtttgtatctcaatgtgttcatccctcagaatgtggcccctaacgcgtctgtgctggtgttcttccacaacaccatggacagggaggagagtgaaggatggccggctatcgacggctccttcttggctgctgttggcaacctcatcgtggtcactgccagctaccgagtgggtgtcttcggcttcctgagttctgggtccggagaggtgagtggcaactgggggctgctggaccaggtggcggctctgacctgggtgcagacccacatccgaggatttggcggggaccctcggcgcgtgtccctggcagcagaccgtggcggggctgatgtggccagcatccaccttctcacggccagggccaccaactcccaacttttccggagagctgtgctgatgggaggctccgcactctccccggccgccgtcatcagccatgagagggctcagcagcaggcaattgctttggcaaaggaggtcagttgccccatgtcatccagccaagaagtggtgtcctgcctccgccagaagcctgccaatgtcctcaatgatgcccagaccaagctcctggccgtgagtggccctttccactactggggtcctgtgatcgatggccacttcctccgtgagcctccagccagagcactgaagaggtctttacgggtagaggtcgatctgctcattgggagttctcaggacgacgggctcatcaacagagcaaaggctgtgaagcaatttgaggaaagtcgaggccggaccagtagcaaaacagccttttaccaggcactgcagaattctctgggtggcgaggactcagatgcccgcgtcgaggctgctgctacatggtattactctctggagcactccacggatgactatgcctccttctcccgggctctggagaatgccacccgggactactttatcatctgccctataatcgacatggccagtgcctgggcaaagagggcccgaggaaacgtcttcatgtaccatgctcctgaaaactacggccatggcagcctggagctgctggcggatgttcagtttgccttggggcttcccttctacccagcctacgaggggcagttttctctggaggagaagagcctgtcgctgaaaatcatgcagtacttttcccacttcatcagatcaggaaatcccaactacccttatgagttctcacggaaagtacccacatttgcaaccccctggcctgactttgtaccccgtgctggtggagagaactacaaggagttcagtgagctgctccccaatcgacagggcctgaagaaagccgactgctccttctggtccaagtacatctcgtctctgaagacatctgcagatggagccaagggcgggcagtcagcagagagtgaagaggaggagttgacggctggatctgggctaagagaagatctcctaagcctccaggaaccaggctctaagacctacagcaagtgaccagcccttgagctccccaaaaacctcacccgaggctgcccactatggtcatctttttctctaaaatagccacttaccttcaataaagtatctacatgcggtgaa

SEQ ID NO: 447607 - DNA, 7826 bp, Homo sapiens
catctcagtcgacttagagacccccctggttgttcatcagagggattgaagtgtatggaccgccagctgggaagccaaagcgatgtccaaggagctgtgaaataagaaatcgtcgtcttctccacggggtgggagataagtcaccaccccagtgttctgcggagggagagtttatgcctgtccagtgcaaatttgtcaacaccacagacatgatgatttttgatctggtccacagctacaacaggtttccagatgcatttgtgaccttcagttccttccagaggaggttccctgaggtatctgggtattgccactgtgctgacagccaagggcgggaactggctgagacaggtttggagttgttactggatgaaatttatgacaccatttttgctggcctggaccttccttccaccttcactgaaaccaccctgtaccggatactgcagagacggttcctcgcagttcaatcagtcatctctggcagattccgatgccccacaaaatgtgaagtggagcggtttacagcaaccagctttggtcacccctatgttccaagctgccgccgaaatggcgactatcaggcggtgcagtgccagacggaagggccctgctggtgtgtggacgcccaggggaaggaaatgcatggaacccggcagcaaggggagccgccatcttgtgctgaaggccaatcttgtgcctccgaaaggcagcaggccttgtccagactctactttgggacctcaggctacttcagccagcacgacctgttctcttccccagagaaaagatgggcctctccaagagtagccagatttgccacatcctgcccacccacgatcaaggagctctttgtggactctgggcttctccgcccaatggtggagggacagagccaacagttttctgtctcagaaaatcttctcaaagaagccatccgagcaatttttccctcccgagggctggctcgtcttgcccttcagtttaccaccaacccaaagagactccagcaaaacctttttggagggaaatttttggtgaatgttggccagtttaacttgtctggagcccttggcacaagaggcacatttaacttcagtcaatttttccagcaacttggtcttgcaagcttcttgaatggagggagacaagaagatttggccaagccactctctgtgggattagattcaaattcttccacaggaacccctgaagctgctaagaaggatggtactatgaataagccaactgtgggcagctttggctttgaaattaacctacaagagaaccaaaatgccctcaaattccttgcttctctcctggagcttccagaattccttctcttcttgcaacatgctatctctgtgccagaagatgtggcaagagatttaggtgatgtgatggaaacggtactcagctcccagacctgtgagcagacacctgaaaggctatttgtcccatcatgcacgacagaaggaagctatgaggatgtccaatgcttttccggagagtgctggtgtgtgaattcctggggcaaagagcttccaggctcaagagtcagaggtggacagccaaggtgccccacagactgtgaaaagcaaagggctcgcatgcaaagcctcatgggcagccagcctgctggctccaccttgtttgtccctgcttgtactagtgagggacatttcctgcctgtccagtgcttcaactcagagtgctactgtgttgatgctgagggtcaggccattcctggaactcgaagtgcaatagggaagcccaagaaatgccccacgccctgtcaattacagtctgagcaagctttcctcaggacggtgcaggccctgctctctaactccagcatgctacccaccctttccgacacctacatcccacagtgcagcaccgatgggcagtggagacaagtgcaatgcaatgggcctcctgagcaggtcttcgagttgtaccaacgatgggaggctcagaacaagggccaggatctgacgcctgccaagctgctagtgaagatcatgagctacagagaagcagcttccggaaacttcagtctctttattcaaagtctgtatgaggctggccagcaagatgtcttcccggtgctgtcacaatacccttctctgcaagatgtcccactagcagcactggaagggaaacggccccagcccagggagaatatcctcctggagccctacctcttctggcagatcttaaatggccaactcagccaatacccggggtcctactcagacttcagcactcctttggcacattttgatcttcggaactgctggtgtgtggatgaggctggccaagaactggaaggaatgcggtctgagccaagcaagctcccaacatgtcctggctcctgtgaggaagcaaagctccgtgtactgcagttcattagggaaacggaagagattgtttcagcttccaacagttctcggttccctctgggggagagtttcctggtggccaagggaatccggctgaggaatgaggacctcggccttcctccgctcttcccgccccgggaggctttcgcggagcagtttctgcgtgggagtgattacgccattcgcctggcggctcagtctaccttaagcttctatcagagacgccgcttttccccggacgactcggctggagcatccgcccttctgcggtcgggcccctacatgccacagtgtgatgcgtttggaagttgggagcctgtgcagtgccacgctgggactgggcactgctggtgtgtagatgagaaaggagggttcatccctggctcactgactgcccgctctctgcagattccacagtgcccgacaacctgcgagaaatctcgaaccagtgggctgctttccagttggaaacaggctagatcccaagaaaacccatctccaaaagacctgttcgtcccagcctgcctagaaacaggagagtatgccaggctgcaggcatcgggggctggcacctggtgtgtggaccctgcatcaggagaagagttgcggcctggctcgagcagcagtgcccagtgcccaagcctctgcaatgtgctcaagagtggagtcctctccaggagagtcagcccaggctatgtcccagcctgcagggcagaggatgggggcttttccccagtgcaatgtgaccaggcccagggcagctgctggtgtgtcatggacagcggagaagaggtgcctgggacgcgcgtgaccgggggccagcccgcctgtgagagcccgcggtgtccgctgccattcaacgcgtcggaggtggttggtggaacaatcctgtgtgagacaatctcgggccccacaggctctgccatgcagcagtgccaattgctgtgccgccagggctcctggagcgtgtttccaccagggccattgatatgtagcctggagagcggacgctgggagtcacagctgcctcagccccgggcctgccaacggccccagctgtggcagaccatccagacccaagggcactttcagctccagctcccgccgggcaagatgtgcagtgctgactacgcggatttgctgcagactttccaggttttcatattggatgagctgacagcccgcggcttctgccagatccaggtgaagacttttggcaccctggtttccattcctgtctgcaacaactcctctgtgcaggtgggttgtctgaccagggagcgtttaggagtgaatgttacatggaaatcacggcttgaggacatcccagtggcttctcttcctgacttacatgacattgagagagccttggtgggcaaggatctccttgggcgcttcacagatctgatccagagtggctcattccagcttcatctggactccaagacgttcccagcggaaaccatccgcttcctccaaggggaccactttggcacctctcccaggacatggtttgggtgctcggaaggattctaccaagtcttgacaagtgaggccagtcaggacggactgggatgcgttaagtgtcctgaaggaagctattcccaagatgaggaatgcattccttgtcctgttggattctaccaagaacaggcagggagcttggcctgtgtcccatgtcctgtgggcagaacgaccatttctgctggagctttcagccagactcactgtgtcactgactgtcagaggaacgaagcaggcctgcaatgtgaccagaatggccagtatcgagccagccagaaggacaggggcagtgggaaggccttctgtgtggacggcgaggggcggaggctgccatggtgggaaacagaggcccctcttgaggactcacagtgtttgatgatgcagaagtttgagaaggttccagaatcaaaggtgatcttcgacgccaatgctcctgtggctgtcagatccaaagttcctgattctgagttccccgtgatgcagtgcttgacagattgcacagaggacgaggcctgcagcttcttcaccgtgtccacgacggagccagagatttcctgtgatttctatgcttggacaagtgacaatgttgcctgcatgacttctgaccagaaacgagatgcactggggaactcaaaggccaccagctttggaagtcttcgctgccaggtgaaagtgaggagccatggtcaagattctccagctgtgtatttgaaaaagggtgccatcatctgtgggttgctgagctcacccagtgtcctgctttgtaatgtcaaagactggatggatccctctgaagcctgggctaatgctacatgtcctggtgtgacatatgaccaggagagccaccaggtgatattgcgtcttggagaccaggagttcatcaagagtctgacacccttagaaggaactcaagacacctttaccaattttcagcaggtttatctctggaaagattctgacatggggtctcggcctgagtctatgggatgtagaaaagacacagtgccaaggccagcatctccaacagaagcaggtttgacaacagaacttttctcccctgtggacctcaaccaggtcattgtcaatggaaatcaatcactatccagccagaagcactggcttttcaagcacctgttttcagcccagcaggcaaacctatggtgcctttctcgttgtgtgcaggagcactctttctgtcagctcgcagagataacagagagtgcatccttgtacttcacctgcaccctctacccagaggcacaggtgtgtgatgacatcatggagtccaatgcccagggctgcagactgatcctgcctcagatgccaaaggccctgttccggaagaaagttatactggaagataaagtgaagaacttttacactcgcctgccgttccaaaaactgatggggatatccattagaaataaagtgcccatgtctgaaaaatctatttctaatgggttctttgaatgtgaacgacggtgcgatgcggacccatgctgcactggctttggatttctaaatgtttcccagttaaaaggaggagaggtgacatgtctcactctgaacagcttgggaattcagatgtgcagtgaggagaatggaggagcctggcgcattttggactgtggctctcctgacattgaagtccacacctatcccttcggatggtaccagaagcccattgctcaaaataatgctcccagtttttgccctttggttgttctgccttccctcacagagaaagtgtctctggactcgtggcagtccctggccctctcttcagtggttgttgatccatccattaggcactttgatgttgcccatgtcagcactgctgccaccagcaatttctctgctgtccgagacctctgtttgtcggaatgttcccaacatgaggcctgtctcatcaccactctgcaaacccaacctggggctgtgagatgtatgttctatgctgatactcaaagctgcacacatagtctgcagggtcagaactgccgacttctgcttcgtgaagaggccacccacatctaccggaagccaggaatctctctgctcagctatgaggcatctgtaccttctgtgcccatttccacccatggccggctgctgggcaggtcccaggccatccaggtgggtacctcatggaagcaagtggaccagttccttggagttccatatgctgccccgcccctggcagagaggcgcttccaggcaccagagcccttgaactggacaggctcctgggatgccagcaagccaagggccagctgctggcagccaggcaccagaacatccacgtctcctggagtcagtgaagattgtttgtatctcaatgtgttcatccctcagaatgtggcccctaacgcgtctgtgctggtgttcttccacaacaccatggacagggaggagagtgaaggatggccggctatcgacggctccttcttggctgctgttggcaacctcatcgtggtcactgccagctaccgagtgggtgtcttcggcttcctgagttctgggtccggagaggtgagtggcaactgggggctgctggaccaggtggcggctctgacctgggtgcagacccacatccgaggatttggcggggaccctcggcgcgtgtccctggcagcagaccgtggcggggctgatgtggccagcatccaccttctcacggccagggccaccaactcccaacttttccggagagctgtgctgatgggaggctccgcactctccccggccgccgtcatcagccatgagagggctcagcagcaggcaattgctttggcaaaggaggtcagttgccccatgtcatccagccaagaagtggtgtcctgcctccgccagaagcctgccaatgtcctcaatgatgcccagaccaagctcctggccgtgagtggccctttccactactggggtcctgtgatcgatggccacttcctccgtgagcctccagccagagcactgaagaggtctttacgggtagaggtcgatctgctcattgggagttctcaggacgacgggctcatcaacagagcaaaggctgtgaagcaatttgaggaaagtcgaggccggaccagtagcaaaacagccttttaccaggcactgcagaattctctgggtggcgaggactcagatgcccgcgtcgaggctgctgctacatggtattactctctggagcactccacggatgactatgcctccttctcccgggctctggagaatgccacccgggactactttatcatctgccctataatcgacatggccagtgcctgggcaaagagggcccgaggaaacgtcttcatgtaccatgctcctgaaaactacggccatggcagcctggagctgctggcggatgttcagtttgccttggggcttcccttctacccagcctacgaggggcagttttctctggaggagaagagcctgtcgctgaaaatcatgcagtacttttcccacttcatcagatcaggaaatcccaactacccttatgagttctcacggaaagtacccacatttgcaaccccctggcctgactttgtaccccgtgctggtggagagaactacaaggagttcagtgagctgctccccaatcgacagggcctgaagaaagccgactgctccttctggtccaagtacatctcgtctctgaagacatctgcagatggagccaagggcgggcagtcagcagagagtgaagaggaggagttgacggctggatctgggctaagagaagatctcctaagcctccaggaaccaggctctaagacctacagcaagtgaccagcccttgagctccccaaaaacctcacccgaggctgcccactatggtcatctttttctctaaaatagccacttaccttcaataaagtatctacatgcggtgaa

SEQ ID NO: 447608 - DNA, 7880 bp, Homo sapiens
catctcagtcgacttagagacccccctggttgttcatcagagggattgaagtgtatggaccgccagctgggaagccaaagcgatgtccaaggagctgtgaaataagaaatcgtcgtcttctccacggggtgggagataagtcaccaccccagtgttctgcggagggagagtttatgcctgtccagtgcaaatttgtcaacaccacagacatgatgatttttgatctggtccacagctacaacaggtttccagatgcatttgtgaccttcagttccttccagaggaggttccctgaggtatctgggtattgccactgtgctgacagccaagggcgggaactggctgagacaggtttggagttgttactggatgaaatttatgacaccatttttgctggcctggaccttccttccaccttcactgaaaccaccctgtaccggatactgcagagacggttcctcgcagttcaatcagtcatctctggcagattccgatgccccacaaaatgtgaagtggagcggtttacagcaaccagctttggtcacccctatgttccaagctgccgccgaaatggcgactatcaggcggtgcagtgccagacggaagggccctgctggtgtgtggacgcccaggggaaggaaatgcatggaacccggcagcaaggggagccgccatcttgtgctgaaggccaatcttgtgcctccgaaaggcagcaggccttgtccagactctactttgggacctcaggctacttcagccagcacgacctgttctcttccccagagaaaagatgggcctctccaagagtagccagatttgccacatcctgcccacccacgatcaaggagctctttgtggactctgggcttctccgcccaatggtggagggacagagccaacagttttctgtctcagaaaatcttctcaaagaagccatccgagcaatttttccctcccgagggctggctcgtcttgcccttcagtttaccaccaacccaaagagactccagcaaaacctttttggagggaaatttttggtgaatgttggccagtttaacttgtctggagcccttggcacaagaggcacatttaacttcagtcaatttttccagcaacttggtcttgcaagcttcttgaatggagggagacaagaagatttggccaagccactctctgtgggattagattcaaattcttccacaggaacccctgaagctgctaagaaggatggtactatgaataagccaactgtgggcagctttggctttgaaattaacctacaagagaaccaaaatgccctcaaattccttgcttctctcctggagcttccagaattccttctcttcttgcaacatgctatctctgtgccagaagatgtggcaagagatttaggtgatgtgatggaaacggtactcagctcccagacctgtgagcagacacctgaaaggctatttgtcccatcatgcacgacagaaggaagctatgaggatgtccaatgcttttccggagagtgctggtgtgtgaattcctggggcaaagagcttccaggctcaagagtcagaggtggacagccaaggtgccccacagactgtgaaaagcaaagggctcgcatgcaaagcctcatgggcagccagcctgctggctccaccttgtttgtccctgcttgtactagtgagggacatttcctgcctgtccagtgcttcaactcagagtgctactgtgttgatgctgagggtcaggccattcctggaactcgaagtgcaatagggaagcccaagaaatgccccacgccctgtcaattacagtctgagcaagctttcctcaggacggtgcaggccctgctctctaactccagcatgctacccaccctttccgacacctacatcccacagtgcagcaccgatgggcagtggagacaagtgcaatgcaatgggcctcctgagcaggtcttcgagttgtaccaacgatgggaggctcagaacaagggccaggatctgacgcctgccaagctgctagtgaagatcatgagctacagagaagcagcttccggaaacttcagtctctttattcaaagtctgtatgaggctggccagcaagatgtcttcccggtgctgtcacaatacccttctctgcaagatgtcccactagcagcactggaagggaaacggccccagcccagggagaatatcctcctggagccctacctcttctggcagatcttaaatggccaactcagccaatacccggggtcctactcagacttcagcactcctttggcacattttgatcttcggaactgctggtgtgtggatgaggctggccaagaactggaaggaatgcggtctgagccaagcaagctcccaacatgtcctggctcctgtgaggaagcaaagctccgtgtactgcagttcattagggaaacggaagagattgtttcagcttccaacagttctcggttccctctgggggagagtttcctggtggccaagggaatccggctgaggaatgaggacctcggccttcctccgctcttcccgccccgggaggctttcgcggagcagtttctgcgtgggagtgattacgccattcgcctggcggctcagtctaccttaagcttctatcagagacgccgcttttccccggacgactcggctggagcatccgcccttctgcggtcgggcccctacatgccacagtgtgatgcgtttggaagttgggagcctgtgcagtgccacgctgggactgggcactgctggtgtgtagatgagaaaggagggttcatccctggctcactgactgcccgctctctgcagattccacagtgcccgacaacctgcgagaaatctcgaaccagtgggctgctttccagttggaaacaggctagatcccaagaaaacccatctccaaaagacctgttcgtcccagcctgcctagaaacaggagagtatgccaggctgcaggcatcgggggctggcacctggtgtgtggaccctgcatcaggagaagagttgcggcctggctcgagcagcagtgcccagtgcccaagcctctgcaatgtgctcaagagtggagtcctctccaggagagtcagcccaggctatgtcccagcctgcagggcagaggatgggggcttttccccagtgcaatgtgaccaggcccagggcagctgctggtgtgtcatggacagcggagaagaggtgcctgggacgcgcgtgaccgggggccagcccgcctgtgagagcccgcggtgtccgctgccattcaacgcgtcggaggtggttggtggaacaatcctgtgtgagacaatctcgggccccacaggctctgccatgcagcagtgccaattgctgtgccgccagggctcctggagcgtgtttccaccagggccattgatatgtagcctggagagcggacgctgggagtcacagctgcctcagccccgggcctgccaacggccccagctgtggcagaccatccagacccaagggcactttcagctccagctcccgccgggcaagatgtgcagtgctgactacgcggatttgctgcagactttccaggttttcatattggatgagctgacagcccgcggcttctgccagatccaggtgaagacttttggcaccctggtttccattcctgtctgcaacaactcctctgtgcaggtgggttgtctgaccagggagcgtttaggagtgaatgttacatggaaatcacggcttgaggacatcccagtggcttctcttcctgacttacatgacattgagagagccttggtgggcaaggatctccttgggcgcttcacagatctgatccagagtggctcattccagcttcatctggactccaagacgttcccagcggaaaccatccgcttcctccaaggggaccactttggcacctctcccaggacatggtttgggtgctcggaaggattctaccaagtcttgacaagtgaggccagtcaggacggactgggatgcgttaagtgtcctgaaggaagctattcccaagatgaggaatgcattccttgtcctgttggattctaccaagaacaggcagggagcttggcctgtgtcccatgtcctgtgggcagaacgaccatttctgctggagctttcagccagactcactgtgtcactgactgtcagaggaacgaagcaggcctgcaatgtgaccagaatggccagtatcgagccagccagaaggacaggggcagtgggaaggccttctgtgtggacggcgaggggcggaggctgccatggtgggaaacagaggcccctcttgaggactcacagtgtttgatgatgcagaagtttgagaaggttccagaatcaaaggtgatcttcgacgccaatgctcctgtggctgtcagatccaaagttcctgattctgagttccccgtgatgcagtgcttgacagattgcacagaggacgaggcctgcagcttcttcaccgtgtccacgacggagccagagatttcctgtgatttctatgcttggacaagtgacaatgttgcctgcatgacttctgaccagaaacgagatgcactggggaactcaaaggccaccagctttggaagtcttcgctgccaggtgaaagtgaggagccatggtcaagattctccagctgtgtatttgaaaaagggccaaggatccaccacaacacttcagaaacgctttgaacccactggtttccaaaacatgctttctggattgtacaaccccattgtgttctcagcctcaggagccaatctaaccgatgctcacctcttctgtcttcttgcatgcgaccgtgatctgtgttgcgatggcttcgtcctcacacaggttcaaggaggtgccatcatctgtgggttgctgagctcacccagtgtcctgctttgtaatgtcaaagactggatggatccctctgaagcctgggctaatgctacatgtcctggtgtgacatatgaccaggagagccaccaggtgatattgcgtcttggagaccaggagttcatcaagagtctgacacccttagaaggaactcaagacacctttaccaattttcagcaggtttatctctggaaagattctgacatggggtctcggcctgagtctatgggatgtagaaaagacacagtgccaaggccagcatctccaacagaagcaggttgtgtgcaggagcactctttctgtcagctcgcagagataacagagagtgcatccttgtacttcacctgcaccctctacccagaggcacaggtgtgtgatgacatcatggagtccaatgcccagggctgcagactgatcctgcctcagatgccaaaggccctgttccggaagaaagttatactggaagataaagtgaagaacttttacactcgcctgccgttccaaaaactgatggggatatccattagaaataaagtgcccatgtctgaaaaatctatttctaatgggttctttgaatgtgaacgacggtgcgatgcggacccatgctgcactggctttggatttctaaatgtttcccagttaaaaggaggagaggtgacatgtctcactctgaacagcttgggaattcagatgtgcagtgaggagaatggaggagcctggcgcattttggactgtggctctcctgacattgaagtccacacctatcccttcggatggtaccagaagcccattgctcaaaataatgctcccagtttttgccctttggttgttctgccttccctcacagagaaagtgtctctggactcgtggcagtccctggccctctcttcagtggttgttgatccatccattaggcactttgatgttgcccatgtcagcactgctgccaccagcaatttctctgctgtccgagacctctgtttgtcggaatgttcccaacatgaggcctgtctcatcaccactctgcaaacccaacctggggctgtgagatgtatgttctatgctgatactcaaagctgcacacatagtctgcagggtcagaactgccgacttctgcttcgtgaagaggccacccacatctaccggaagccaggaatctctctgctcagctatgaggcatctgtaccttctgtgcccatttccacccatggccggctgctgggcaggtcccaggccatccaggtgggtacctcatggaagcaagtggaccagttccttggagttccatatgctgccccgcccctggcagagaggcgcttccaggcaccagagcccttgaactggacaggctcctgggatgccagcaagccaagggccagctgctggcagccaggcaccagaacatccacgtctcctggagtcagtgaagattgtttgtatctcaatgtgttcatccctcagaatgtggcccctaacgcgtctgtgctggtgttcttccacaacaccatggacagggaggagagtgaaggatggccggctatcgacggctccttcttggctgctgttggcaacctcatcgtggtcactgccagctaccgagtgggtgtcttcggcttcctgagttctgggtccggagaggtgagtggcaactgggggctgctggaccaggtggcggctctgacctgggtgcagacccacatccgaggatttggcggggaccctcggcgcgtgtccctggcagcagaccgtggcggggctgatgtggccagcatccaccttctcacggccagggccaccaactcccaacttttccggagagctgtgctgatgggaggctccgcactctccccggccgccgtcatcagccatgagagggctcagcagcaggcaattgctttggcaaaggaggtcagttgccccatgtcatccagccaagaagtggtgtcctgcctccgccagaagcctgccaatgtcctcaatgatgcccagaccaagctcctggccgtgagtggccctttccactactggggtcctgtgatcgatggccacttcctccgtgagcctccagccagagcactgaagaggtctttacgggtagaggtcgatctgctcattgggagttctcaggacgacgggctcatcaacagagcaaaggctgtgaagcaatttgaggaaagtcgaggccggaccagtagcaaaacagccttttaccaggcactgcagaattctctgggtggcgaggactcagatgcccgcgtcgaggctgctgctacatggtattactctctggagcactccacggatgactatgcctccttctcccgggctctggagaatgccacccgggactactttatcatctgccctataatcgacatggccagtgcctgggcaaagagggcccgaggaaacgtcttcatgtaccatgctcctgaaaactacggccatggcagcctggagctgctggcggatgttcagtttgccttggggcttcccttctacccagcctacgaggggcagttttctctggaggagaagagcctgtcgctgaaaatcatgcagtacttttcccacttcatcagatcaggaaatcccaactacccttatgagttctcacggaaagtacccacatttgcaaccccctggcctgactttgtaccccgtgctggtggagagaactacaaggagttcagtgagctgctccccaatcgacagggcctgaagaaagccgactgctccttctggtccaagtacatctcgtctctgaagacatctgcagatggagccaagggcgggcagtcagcagagagtgaagaggaggagttgacggctggatctgggctaagagaagatctcctaagcctccaggaaccaggctctaagacctacagcaagtgaccagcccttgagctccccaaaaacctcacccgaggctgcccactatggtcatctttttctctaaaatagccacttaccttcaataaagtatctacatgcggtgaa

SEQ ID NO: 447609 - DNA, 8067 bp, Homo sapiens
catctcagtcgacttagagacccccctggttgttcatcagagggattgaagtgtatggaccgccagctgggaagccaaagcgatgtccaaggagctgtgaaataagaaatcgtcgtcttctccacggggtgggagataagtcaccaccccagtgttctgcggagggagagtttatgcctgtccagtgcaaatttgtcaacaccacagacatgatgatttttgatctggtccacagctacaacaggtttccagatgcatttgtgaccttcagttccttccagaggaggttccctgaggtatctgggtattgccactgtgctgacagccaagggcgggaactggctgagacaggtttggagttgttactggatgaaatttatgacaccatttttgctggcctggaccttccttccaccttcactgaaaccaccctgtaccggatactgcagagacggttcctcgcagttcaatcagtcatctctggcagattccgatgccccacaaaatgtgaagtggagcggtttacagcaaccagctttggtcacccctatgttccaagctgccgccgaaatggcgactatcaggcggtgcagtgccagacggaagggccctgctggtgtgtggacgcccaggggaaggaaatgcatggaacccggcagcaaggggagccgccatcttgtgctgaaggccaatcttgtgcctccgaaaggcagcaggccttgtccagactctactttgggacctcaggctacttcagccagcacgacctgttctcttccccagagaaaagatgggcctctccaagagtagccagatttgccacatcctgcccacccacgatcaaggagctctttgtggactctgggcttctccgcccaatggtggagggacagagccaacagttttctgtctcagaaaatcttctcaaagaagccatccgagcaatttttccctcccgagggctggctcgtcttgcccttcagtttaccaccaacccaaagagactccagcaaaacctttttggagggaaatttttggtgaatgttggccagtttaacttgtctggagcccttggcacaagaggcacatttaacttcagtcaatttttccagcaacttggtcttgcaagcttcttgaatggagggagacaagaagatttggccaagccactctctgtgggattagattcaaattcttccacaggaacccctgaagctgctaagaaggatggtactatgaataagccaactgtgggcagctttggctttgaaattaacctacaagagaaccaaaatgccctcaaattccttgcttctctcctggagcttccagaattccttctcttcttgcaacatgctatctctgtgccagaagatgtggcaagagatttaggtgatgtgatggaaacggtactcagctcccagacctgtgagcagacacctgaaaggctatttgtcccatcatgcacgacagaaggaagctatgaggatgtccaatgcttttccggagagtgctggtgtgtgaattcctggggcaaagagcttccaggctcaagagtcagaggtggacagccaaggtgccccacagactgtgaaaagcaaagggctcgcatgcaaagcctcatgggcagccagcctgctggctccaccttgtttgtccctgcttgtactagtgagggacatttcctgcctgtccagtgcttcaactcagagtgctactgtgttgatgctgagggtcaggccattcctggaactcgaagtgcaatagggaagcccaagaaatgccccacgccctgtcaattacagtctgagcaagctttcctcaggacggtgcaggccctgctctctaactccagcatgctacccaccctttccgacacctacatcccacagtgcagcaccgatgggcagtggagacaagtgcaatgcaatgggcctcctgagcaggtcttcgagttgtaccaacgatgggaggctcagaacaagggccaggatctgacgcctgccaagctgctagtgaagatcatgagctacagagaagcagcttccggaaacttcagtctctttattcaaagtctgtatgaggctggccagcaagatgtcttcccggtgctgtcacaatacccttctctgcaagatgtcccactagcagcactggaagggaaacggccccagcccagggagaatatcctcctggagccctacctcttctggcagatcttaaatggccaactcagccaatacccggggtcctactcagacttcagcactcctttggcacattttgatcttcggaactgctggtgtgtggatgaggctggccaagaactggaaggaatgcggtctgagccaagcaagctcccaacatgtcctggctcctgtgaggaagcaaagctccgtgtactgcagttcattagggaaacggaagagattgtttcagcttccaacagttctcggttccctctgggggagagtttcctggtggccaagggaatccggctgaggaatgaggacctcggccttcctccgctcttcccgccccgggaggctttcgcggagcagtttctgcgtgggagtgattacgccattcgcctggcggctcagtctaccttaagcttctatcagagacgccgcttttccccggacgactcggctggagcatccgcccttctgcggtcgggcccctacatgccacagtgtgatgcgtttggaagttgggagcctgtgcagtgccacgctgggactgggcactgctggtgtgtagatgagaaaggagggttcatccctggctcactgactgcccgctctctgcagattccacagtgcccgacaacctgcgagaaatctcgaaccagtgggctgctttccagttggaaacaggctagatcccaagaaaacccatctccaaaagacctgttcgtcccagcctgcctagaaacaggagagtatgccaggctgcaggcatcgggggctggcacctggtgtgtggaccctgcatcaggagaagagttgcggcctggctcgagcagcagtgcccagtgcccaagcctctgcaatgtgctcaagagtggagtcctctccaggagagtcagcccaggctatgtcccagcctgcagggcagaggatgggggcttttccccagtgcaatgtgaccaggcccagggcagctgctggtgtgtcatggacagcggagaagaggtgcctgggacgcgcgtgaccgggggccagcccgcctgtgagagcccgcggtgtccgctgccattcaacgcgtcggaggtggttggtggaacaatcctgtgtgagacaatctcgggccccacaggctctgccatgcagcagtgccaattgctgtgccgccagggctcctggagcgtgtttccaccagggccattgatatgtagcctggagagcggacgctgggagtcacagctgcctcagccccgggcctgccaacggccccagctgtggcagaccatccagacccaagggcactttcagctccagctcccgccgggcaagatgtgcagtgctgactacgcggatttgctgcagactttccaggttttcatattggatgagctgacagcccgcggcttctgccagatccaggtgaagacttttggcaccctggtttccattcctgtctgcaacaactcctctgtgcaggtgggttgtctgaccagggagcgtttaggagtgaatgttacatggaaatcacggcttgaggacatcccagtggcttctcttcctgacttacatgacattgagagagccttggtgggcaaggatctccttgggcgcttcacagatctgatccagagtggctcattccagcttcatctggactccaagacgttcccagcggaaaccatccgcttcctccaaggggaccactttggcacctctcccaggacatggtttgggtgctcggaaggattctaccaagtcttgacaagtgaggccagtcaggacggactgggatgcgttaagtgtcctgaaggaagctattcccaagatgaggaatgcattccttgtcctgttggattctaccaagaacaggcagggagcttggcctgtgtcccatgtcctgtgggcagaacgaccatttctgctggagctttcagccagactcactgtgtcactgactgtcagaggaacgaagcaggcctgcaatgtgaccagaatggccagtatcgagccagccagaaggacaggggcagtgggaaggccttctgtgtggacggcgaggggcggaggctgccatggtgggaaacagaggcccctcttgaggactcacagtgtttgatgatgcagaagtttgagaaggttccagaatcaaaggtgatcttcgacgccaatgctcctgtggctgtcagatccaaagttcctgattctgagttccccgtgatgcagtgcttgacagattgcacagaggacgaggcctgcagcttcttcaccgtgtccacgacggagccagagatttcctgtgatttctatgcttggacaagtgacaatgttgcctgcatgacttctgaccagaaacgagatgcactggggaactcaaaggccaccagctttggaagtcttcgctgccaggtgaaagtgaggagccatggtcaagattctccagctgtgtatttgaaaaagggccaaggatccaccacaacacttcagaaacgctttgaacccactggtttccaaaacatgctttctggattgtacaaccccattgtgttctcagcctcaggagccaatctaaccgatgctcacctcttctgtcttcttgcatgcgaccgtgatctgtgttgcgatggcttcgtcctcacacaggttcaaggaggtgccatcatctgtgggttgctgagctcacccagtgtcctgctttgtaatgtcaaagactggatggatccctctgaagcctgggctaatgctacatgtcctggtgtgacatatgaccaggagagccaccaggtgatattgcgtcttggagaccaggagttcatcaagagtctgacacccttagaaggaactcaagacacctttaccaattttcagcaggtttatctctggaaagattctgacatggggtctcggcctgagtctatgggatgtagaaaagacacagtgccaaggccagcatctccaacagaagcaggtttgacaacagaacttttctcccctgtggacctcaaccaggtcattgtcaatggaaatcaatcactatccagccagaagcactggcttttcaagcacctgttttcagcccagcaggcaaacctatggtgcctttctcgttgtgtgcaggagcactctttctgtcagctcgcagagataacagagagtgcatccttgtacttcacctgcaccctctacccagaggcacaggtgtgtgatgacatcatggagtccaatgcccagggctgcagactgatcctgcctcagatgccaaaggccctgttccggaagaaagttatactggaagataaagtgaagaacttttacactcgcctgccgttccaaaaactgatggggatatccattagaaataaagtgcccatgtctgaaaaatctatttctaatgggttctttgaatgtgaacgacggtgcgatgcggacccatgctgcactggctttggatttctaaatgtttcccagttaaaaggaggagaggtgacatgtctcactctgaacagcttgggaattcagatgtgcagtgaggagaatggaggagcctggcgcattttggactgtggctctcctgacattgaagtccacacctatcccttcggatggtaccagaagcccattgctcaaaataatgctcccagtttttgccctttggttgttctgccttccctcacagagaaagtgtctctggactcgtggcagtccctggccctctcttcagtggttgttgatccatccattaggcactttgatgttgcccatgtcagcactgctgccaccagcaatttctctgctgtccgagacctctgtttgtcggaatgttcccaacatgaggcctgtctcatcaccactctgcaaacccaacctggggctgtgagatgtatgttctatgctgatactcaaagctgcacacatagtctgcagggtcagaactgccgacttctgcttcgtgaagaggccacccacatctaccggaagccaggaatctctctgctcagctatgaggcatctgtaccttctgtgcccatttccacccatggccggctgctgggcaggtcccaggccatccaggtgggtacctcatggaagcaagtggaccagttccttggagttccatatgctgccccgcccctggcagagaggcgcttccaggcaccagagcccttgaactggacaggctcctgggatgccagcaagccaagggccagctgctggcagccaggcaccagaacatccacgtctcctggagtcagtgaagattgtttgtatctcaatgtgttcatccctcagaatgtggcccctaacgcgtctgtgctggtgttcttccacaacaccatggacagggaggagagtgaaggatggccggctatcgacggctccttcttggctgctgttggcaacctcatcgtggtcactgccagctaccgagtgggtgtcttcggcttcctgagttctgggtccggagaggtgagtggcaactgggggctgctggaccaggtggcggctctgacctgggtgcagacccacatccgaggatttggcggggaccctcggcgcgtgtccctggcagcagaccgtggcggggctgatgtggccagcatccaccttctcacggccagggccaccaactcccaacttttccggagagctgtgctgatgggaggctccgcactctccccggccgccgtcatcagccatgagagggctcagcagcaggcaattgctttggcaaaggaggtcagttgccccatgtcatccagccaagaagtggtgtcctgcctccgccagaagcctgccaatgtcctcaatgatgcccagaccaagctcctggccgtgagtggccctttccactactggggtcctgtgatcgatggccacttcctccgtgagcctccagccagagcactgaagaggtctttacgggtagaggtcgatctgctcattgggagttctcaggacgacgggctcatcaacagagcaaaggctgtgaagcaatttgaggaaagtcgaggccggaccagtagcaaaacagccttttaccaggcactgcagaattctctgggtggcgaggactcagatgcccgcgtcgaggctgctgctacatggtattactctctggagcactccacggatgactatgcctccttctcccgggctctggagaatgccacccgggactactttatcatctgccctataatcgacatggccagtgcctgggcaaagagggcccgaggaaacgtcttcatgtaccatgctcctgaaaactacggccatggcagcctggagctgctggcggatgttcagtttgccttggggcttcccttctacccagcctacgaggggcagttttctctggaggagaagagcctgtcgctgaaaatcatgcagtacttttcccacttcatcagatcaggaaatcccaactacccttatgagttctcacggaaagtacccacatttgcaaccccctggcctgactttgtaccccgtgctggtggagagaactacaaggagttcagtgagctgctccccaatcgacagggcctgaagaaagccgactgctccttctggtccaagtacatctcgtctctgaagacatctgcagatggagccaagggcgggcagtcagcagagagtgaagaggaggagttgacggctggatctgggctaagagaagatctcctaagcctccaggaaccaggctctaagacctacagcaagtgaccagcccttgagctccccaaaaacctcacccgaggctgcccactatggtcatctttttctctaaaatagccacttaccttcaataaagtatctacatgcggtgaaaaaaaaaaaagtcgacgcggccgcgaatttagtagtagtaggcggccgc

SEQ ID NO: 447610 - DNA, 7955 bp, Homo sapiens
catctcagtcgacttagagacccccctggttgttcatcagagggattgaagtgtatggaccgccagctgggaagccaaagcgatgtccaaggagctgtgaaataagaaatcgtcgtcttctccacggggtgggagataagtcaccaccccagtgttctgcggagggagagtttatgcctgtccagtgcaaatttgtcaacaccacagacatgatgatttttgatctggtccacagctacaacaggtttccagatgcatttgtgaccttcagttccttccagaggaggttccctgaggtatctgggtattgccactgtgctgacagccaagggcgggaactggctgagacaggtttggagttgttactggatgaaatttatgacaccatttttgctggcctggaccttccttccaccttcactgaaaccaccctgtaccggatactgcagagacggttcctcgcagttcaatcagtcatctctggcagattccgatgccccacaaaatgtgaagtggagcggtttacagcaaccagctttggtcacccctatgttccaagctgccgccgaaatggcgactatcaggcggtgcagtgccagacggaagggccctgctggtgtgtggacgcccaggggaaggaaatgcatggaacccggcagcaaggggagccgccatcttgtgctgaaggccaatcttgtgcctccgaaaggcagcaggccttgtccagactctactttgggacctcaggctacttcagccagcacgacctgttctcttccccagagaaaagatgggcctctccaagagtagccagatttgccacatcctgcccacccacgatcaaggagctctttgtggactctgggcttctccgcccaatggtggagggacagagccaacagttttctgtctcagaaaatcttctcaaagaagccatccgagcaatttttccctcccgagggctggctcgtcttgcccttcagtttaccaccaacccaaagagactccagcaaaacctttttggagggaaatttttggtgaatgttggccagtttaacttgtctggagcccttggcacaagaggcacatttaacttcagtcaatttttccagcaacttggtcttgcaagcttcttgaatggagggagacaagaagatttggccaagccactctctgtgggattagattcaaattcttccacaggaacccctgaagctgctaagaaggatggtactatgaataagccaactgtgggcagctttggctttgaaattaacctacaagagaaccaaaatgccctcaaattccttgcttctctcctggagcttccagaattccttctcttcttgcaacatgctatctctgtgccagaagatgtggcaagagatttaggtgatgtgatggaaacggtactcagctcccagacctgtgagcagacacctgaaaggctatttgtcccatcatgcacgacagaaggaagctatgaggatgtccaatgcttttccggagagtgctggtgtgtgaattcctggggcaaagagcttccaggctcaagagtcagaggtggacagccaaggtgccccacagactgtgaaaagcaaagggctcgcatgcaaagcctcatgggcagccagcctgctggctccaccttgtttgtccctgcttgtactagtgagggacatttcctgcctgtccagtgcttcaactcagagtgctactgtgttgatgctgagggtcaggccattcctggaactcgaagtgcaatagggaagcccaagaaatgccccacgccctgtcaattacagtctgagcaagctttcctcaggacggtgcaggccctgctctctaactccagcatgctacccaccctttccgacacctacatcccacagtgcagcaccgatgggcagtggagacaagtgcaatgcaatgggcctcctgagcaggtcttcgagttgtaccaacgatgggaggctcagaacaagggccaggatctgacgcctgccaagctgctagtgaagatcatgagctacagagaagcagcttccggaaacttcagtctctttattcaaagtctgtatgaggctggccagcaagatgtcttcccggtgctgtcacaatacccttctctgcaagatgtcccactagcagcactggaagggaaacggccccagcccagggagaatatcctcctggagccctacctcttctggcagatcttaaatggccaactcagccaatacccggggtcctactcagacttcagcactcctttggcacattttgatcttcggaactgctggtgtgtggatgaggctggccaagaactggaaggaatgcggtctgagccaagcaagctcccaacatgtcctggctcctgtgaggaagcaaagctccgtgtactgcagttcattagggaaacggaagagattgtttcagcttccaacagttctcggttccctctgggggagagtttcctggtggccaagggaatccggctgaggaatgaggacctcggccttcctccgctcttcccgccccgggaggctttcgcggagcagtttctgcgtgggagtgattacgccattcgcctggcggctcagtctaccttaagcttctatcagagacgccgcttttccccggacgactcggctggagcatccgcccttctgcggtcgggcccctacatgccacagtgtgatgcgtttggaagttgggagcctgtgcagtgccacgctgggactgggcactgctggtgtgtagatgagaaaggagggttcatccctggctcactgactgcccgctctctgcagattccacagtgcccgacaacctgcgagaaatctcgaaccagtgggctgctttccagttggaaacaggctagatcccaagaaaacccatctccaaaagacctgttcgtcccagcctgcctagaaacaggagagtatgccaggctgcaggcatcgggggctggcacctggtgtgtggaccctgcatcaggagaagagttgcggcctggctcgagcagcagtgcccagtgcccaagcctctgcaatgtgctcaagagtggagtcctctccaggagagtcagcccaggctatgtcccagcctgcagggcagaggatgggggcttttccccagtgcaatgtgaccaggcccagggcagctgctggtgtgtcatggacagcggagaagaggtgcctgggacgcgcgtgaccgggggccagcccgcctgtgagagcccgcggtgtccgctgccattcaacgcgtcggaggtggttggtggaacaatcctgtgtgagacaatctcgggccccacaggctctgccatgcagcagtgccaattgctgtgccgccagggctcctggagcgtgtttccaccagggccattgatatgtagcctggagagcggacgctgggagtcacagctgcctcagccccgggcctgccaacggccccagctgtggcagaccatccagacccaagggcactttcagctccagctcccgccgggcaagatgtgcagtgctgactacgcggatttgctgcagactttccaggttttcatattggatgagctgacagcccgcggcttctgccagatccaggtgaagacttttggcaccctggtttccattcctgtctgcaacaactcctctgtgcaggtgggttgtctgaccagggagcgtttaggagtgaatgttacatggaaatcacggcttgaggacatcccagtggcttctcttcctgacttacatgacattgagagagccttggtgggcaaggatctccttgggcgcttcacagatctgatccagagtggctcattccagcttcatctggactccaagacgttcccagcggaaaccatccgcttcctccaaggggaccactttggcacctctcccaggacatggtttgggtgctcggaaggattctaccaagtcttgacaagtgaggccagtcaggacggactgggatgcgttaagtgtcctgaaggaagctattcccaagatgaggaatgcattccttgtcctgttggattctaccaagaacaggcagggagcttggcctgtgtcccatgtcctgtgggcagaacgaccatttctgctggagctttcagccagactcactgtgtcactgactgtcagaggaacgaagcaggcctgcaatgtgaccagaatggccagtatcgagccagccagaaggacaggggcagtgggaaggccttctgtgtggacggcgaggggcggaggctgccatggtgggaaacagaggcccctcttgaggactcacagtgtttgatgatgcagaagtttgagaaggttccagaatcaaaggtgatcttcgacgccaatgctcctgtggctgtcagatccaaagttcctgattctgagttccccgtgatgcagtgcttgacagattgcacagaggacgaggcctgcagcttcttcaccgtgtccacgacggagccagagatttcctgtgatttctatgcttggacaagtgacaatgttgcctgcatgacttctgaccagaaacgagatgcactggggaactcaaaggccaccagctttggaagtcttcgctgccaggtgaaagtgaggagccatggtcaagattctccagctgtgtatttgaaaaagggccaaggatccaccacaacacttcagaaacgctttgaacccactggtttccaaaacatgctttctggattgtacaaccccattgtgttctcagcctcaggagccaatctaaccgatgctcacctcttctgtcttcttgcatgcgaccgtgatctgtgttgcgatggcttcgtcctcacacaggttcaaggaggtgccatcatctgtgggttgctgagctcacccagtgtcctgctttgtaatgtcaaagactggatggatccctctgaagcctgggctaatgctacatgtcctggtgtgacatatgaccaggagagccaccaggtgatattgcgtcttggagaccaggagttcatcaagagtctgacacccttagaaggaactcaagacacctttaccaattttcagcaggtttatctctggaaagattctgacatggggtctcggcctgagtctatgggatgtagaaaagacacagtgccaaggccagcatctccaacagaagcaggtttgacaacagaacttttctcccctgtggacctcaaccaggtcattgtcaatggaaatcaatcactatccagccagaagcactggcttttcaagcacctgttttcagcccagcaggcaaacctatggtgcctttctcgttgtgtgcaggagcactctttctgtcagctcgcagagataacagagagtgcatccttgtacttcacctgcaccctctacccagaggcacaggtgtgtgatgacatcatggagtccaatgcccagggctgcagactgatcctgcctcagatgccaaaggccctgttccggaagaaagttatactggaagataaagtgaagaacttttacactcgcctgccgttccaaaaactgatggggatatccattagaaataaagtgcccatgtctgaaaaatctatttctaatgggttctttgaatgtgaacgacggtgcgatgcggacccatgctgcactggctttggatttctaaatgtttcccagttaaaaggaggagaggtgacatgtctcactctgaacagcttgggaattcagatgtgcagtgaggagaatggaggagcctggcgcattttggactgtggctctcctgacattgaagtccacacctatcccttcggatggtaccagaagcccatgtctctggactcgtggcagtccctggccctctcttcagtggttgttgatccatccattaggcactttgatgttgcccatgtcagcactgctgccaccagcaatttctctgctgtccgagacctctgtttgtcggaatgttcccaacatgaggcctgtctcatcaccactctgcaaacccaacctggggctgtgagatgtatgttctatgctgatactcaaagctgcacacatagtctgcagggtcagaactgccgacttctgcttcgtgaagaggccacccacatctaccggaagccaggaatctctctgctcagctatgaggcatctgtaccttctgtgcccatttccacccatggccggctgctgggcaggtcccaggccatccaggtgggtacctcatggaagcaagtggaccagttccttggagttccatatgctgccccgcccctggcagagaggcgcttccaggcaccagagcccttgaactggacaggctcctgggatgccagcaagccaagggccagctgctggcagccaggcaccagaacatccacgtctcctggagtcagtgaagattgtttgtatctcaatgtgttcatccctcagaatgtggcccctaacgcgtctgtgctggtgttcttccacaacaccatggacagggaggagagtgaaggatggccggctatcgacggctccttcttggctgctgttggcaacctcatcgtggtcactgccagctaccgagtgggtgtcttcggcttcctgagttctgggtccggagaggtgagtggcaactgggggctgctggaccaggtggcggctctgacctgggtgcagacccacatccgaggatttggcggggaccctcggcgcgtgtccctggcagcagaccgtggcggggctgatgtggccagcatccaccttctcacggccagggccaccaactcccaacttttccggagagctgtgctgatgggaggctccgcactctccccggccgccgtcatcagccatgagagggctcagcagcaggcaattgctttggcaaaggaggtcagttgccccatgtcatccagccaagaagtggtgtcctgcctccgccagaagcctgccaatgtcctcaatgatgcccagaccaagctcctggccgtgagtggccctttccactactggggtcctgtgatcgatggccacttcctccgtgagcctccagccagagcactgaagaggtctttacgggtagaggtcgatctgctcattgggagttctcaggacgacgggctcatcaacagagcaaaggctgtgaagcaatttgaggaaagtcgaggccggaccagtagcaaaacagccttttaccaggcactgcagaattctctgggtggcgaggactcagatgcccgcgtcgaggctgctgctacatggtattactctctggagcactccacggatgactatgcctccttctcccgggctctggagaatgccacccgggactactttatcatctgccctataatcgacatggccagtgcctgggcaaagagggcccgaggaaacgtcttcatgtaccatgctcctgaaaactacggccatggcagcctggagctgctggcggatgttcagtttgccttggggcttcccttctacccagcctacgaggggcagttttctctggaggagaagagcctgtcgctgaaaatcatgcagtacttttcccacttcatcagatcaggaaatcccaactacccttatgagttctcacggaaagtacccacatttgcaaccccctggcctgactttgtaccccgtgctggtggagagaactacaaggagttcagtgagctgctccccaatcgacagggcctgaagaaagccgactgctccttctggtccaagtacatctcgtctctgaagacatctgcagatggagccaagggcgggcagtcagcagagagtgaagaggaggagttgacggctggatctgggctaagagaagatctcctaagcctccaggaaccaggctctaagacctacagcaagtgaccagcccttgagctccccaaaaacctcacccgaggctgcccactatggtcatctttttctctaaaatagccacttaccttcaataaagtatctacatgcggtgaa

SEQ ID NO: 447611 - DNA, 8080 bp, Homo sapiens
  misc_feature (8021)..(8021): n is a, c, g, or t
catctcagtcgacttagagacccccctggttgttcatcagagggattgaagtgtatggaccgccagctgggaagccaaagcgatgtccaaggagctgtgaaataagaaatcgtcgtcttctccacggggtgggagataagtcaccaccccagtgttctgcggagggagagtttatgcctgtccagtgcaaatttgtcaacaccacagacatgatgatttttgatctggtccacagctacaacaggtttccagatgcatttgtgaccttcagttccttccagaggaggttccctgaggtatctgggtattgccactgtgctgacagccaagggcgggaactggctgagacaggtttggagttgttactggatgaaatttatgacaccatttttgctggcctggaccttccttccaccttcactgaaaccaccctgtaccggatactgcagagacggttcctcgcagttcaatcagtcatctctggcagattccgatgccccacaaaatgtgaagtggagcggtttacagcaaccagctttggtcacccctatgttccaagctgccgccgaaatggcgactatcaggcggtgcagtgccagacggaagggccctgctggtgtgtggacgcccaggggaaggaaatgcatggaacccggcagcaaggggagccgccatcttgtgctgaaggccaatcttgtgcctccgaaaggcagcaggccttgtccagactctactttgggacctcaggctacttcagccagcacgacctgttctcttccccagagaaaagatgggcctctccaagagtagccagatttgccacatcctgcccacccacgatcaaggagctctttgtggactctgggcttctccgcccaatggtggagggacagagccaacagttttctgtctcagaaaatcttctcaaagaagccatccgagcaatttttccctcccgagggctggctcgtcttgcccttcagtttaccaccaacccaaagagactccagcaaaacctttttggagggaaatttttggtgaatgttggccagtttaacttgtctggagcccttggcacaagaggcacatttaacttcagtcaatttttccagcaacttggtcttgcaagcttcttgaatggagggagacaagaagatttggccaagccactctctgtgggattagattcaaattcttccacaggaacccctgaagctgctaagaaggatggtactatgaataagccaactgtgggcagctttggctttgaaattaacctacaagagaaccaaaatgccctcaaattccttgcttctctcctggagcttccagaattccttctcttcttgcaacatgctatctctgtgccagaagatgtggcaagagatttaggtgatgtgatggaaacggtactcagctcccagacctgtgagcagacacctgaaaggctatttgtcccatcatgcacgacagaaggaagctatgaggatgtccaatgcttttccggagagtgctggtgtgtgaattcctggggcaaagagcttccaggctcaagagtcagaggtggacagccaaggtgccccacagactgtgaaaagcaaagggctcgcatgcaaagcctcatgggcagccagcctgctggctccaccttgtttgtccctgcttgtactagtgagggacatttcctgcctgtccagtgcttcaactcagagtgctactgtgttgatgctgagggtcaggccattcctggaactcgaagtgcaatagggaagcccaagaaatgccccacgccctgtcaattacagtctgagcaagctttcctcaggacggtgcaggccctgctctctaactccagcatgctacccaccctttccgacacctacatcccacagtgcagcaccgatgggcagtggagacaagtgcaatgcaatgggcctcctgagcaggtcttcgagttgtaccaacgatgggaggctcagaacaagggccaggatctgacgcctgccaagctgctagtgaagatcatgagctacagagaagcagcttccggaaacttcagtctctttattcaaagtctgtatgaggctggccagcaagatgtcttcccggtgctgtcacaatacccttctctgcaagatgtcccactagcagcactggaagggaaacggccccagcccagggagaatatcctcctggagccctacctcttctggcagatcttaaatggccaactcagccaatacccggggtcctactcagacttcagcactcctttggcacattttgatcttcggaactgctggtgtgtggatgaggctggccaagaactggaaggaatgcggtctgagccaagcaagctcccaacatgtcctggctcctgtgaggaagcaaagctccgtgtactgcagttcattagggaaacggaagagattgtttcagcttccaacagttctcggttccctctgggggagagtttcctggtggccaagggaatccggctgaggaatgaggacctcggccttcctccgctcttcccgccccgggaggctttcgcggagcagtttctgcgtgggagtgattacgccattcgcctggcggctcagtctaccttaagcttctatcagagacgccgcttttccccggacgactcggctggagcatccgcccttctgcggtcgggcccctacatgccacagtgtgatgcgtttggaagttgggagcctgtgcagtgccacgctgggactgggcactgctggtgtgtagatgagaaaggagggttcatccctggctcactgactgcccgctctctgcagattccacagtgcccgacaacctgcgagaaatctcgaaccagtgggctgctttccagttggaaacaggctagatcccaagaaaacccatctccaaaagacctgttcgtcccagcctgcctagaaacaggagagtatgccaggctgcaggcatcgggggctggcacctggtgtgtggaccctgcatcaggagaagagttgcggcctggctcgagcagcagtgcccagtgcccaagcctctgcaatgtgctcaagagtggagtcctctccaggagagtcagcccaggctatgtcccagcctgcagggcagaggatgggggcttttccccagtgcaatgtgaccaggcccagggcagctgctggtgtgtcatggacagcggagaagaggtgcctgggacgcgcgtgaccgggggccagcccgcctgtgagagcccgcggtgtccgctgccattcaacgcgtcggaggtggttggtggaacaatcctgtgtgagacaatctcgggccccacaggctctgccatgcagcagtgccaattgctgtgccgccagggctcctggagcgtgtttccaccagggccattgatatgtagcctggagagcggacgctgggagtcacagctgcctcagccccgggcctgccaacggccccagctgtggcagaccatccagacccaagggcactttcagctccagctcccgccgggcaagatgtgcagtgctgactacgcggatttgctgcagactttccaggttttcatattggatgagctgacagcccgcggcttctgccagatccaggtgaagacttttggcaccctggtttccattcctgtctgcaacaactcctctgtgcaggtgggttgtctgaccagggagcgtttaggagtgaatgttacatggaaatcacggcttgaggacatcccagtggcttctcttcctgacttacatgacattgagagagccttggtgggcaaggatctccttgggcgcttcacagatctgatccagagtggctcattccagcttcatctggactccaagacgttcccagcggaaaccatccgcttcctccaaggggaccactttggcacctctcccaggacatggtttgggtgctcggaaggattctaccaagtcttgacaagtgaggccagtcaggacggactgggatgcgttaagtgtcctgaaggaagctattcccaagatgaggaatgcattccttgtcctgttggattctaccaagaacaggcagggagcttggcctgtgtcccatgtcctgtgggcagaacgaccatttctgctggagctttcagccagactcactgtgtcactgactgtcagaggaacgaagcaggcctgcaatgtgaccagaatggccagtatcgagccagccagaaggacaggggcagtgggaaggccttctgtgtggacggcgaggggcggaggctgccatggtgggaaacagaggcccctcttgaggactcacagtgtttgatgatgcagaagtttgagaaggttccagaatcaaaggtgatcttcgacgccaatgctcctgtggctgtcagatccaaagttcctgattctgagttccccgtgatgcagtgcttgacagattgcacagaggacgaggcctgcagcttcttcaccgtgtccacgacggagccagagatttcctgtgatttctatgcttggacaagtgacaatgttgcctgcatgacttctgaccagaaacgagatgcactggggaactcaaaggccaccagctttggaagtcttcgctgccaggtgaaagtgaggagccatggtcaagattctccagctgtgtatttgaaaaagggccaaggatccaccacaacacttcagaaacgctttgaacccactggtttccaaaacatgctttctggattgtacaaccccattgtgttctcagcctcaggagccaatctaaccgatgctcacctcttctgtcttcttgcatgcgaccgtgatctgtgttgcgatggcttcgtcctcacacaggttcaaggaggtgccatcatctgtgggttgctgagctcacccagtgtcctgctttgtaatgtcaaagactggatggatccctctgaagcctgggctaatgctacatgtcctggtgtgacatatgaccaggagagccaccaggtgatattgcgtcttggagaccaggagttcatcaagagtctgacacccttagaaggaactcaagacacctttaccaattttcagcaggtttatctctggaaagattctgacatggggtctcggcctgagtctatgggatgtagaaaagacacagtgccaaggccagcatctccaacagaagcaggtttgacaacagaacttttctcccctgtggacctcaaccaggtcattgtcaatggaaatcaatcactatccagccagaagcactggcttttcaagcacctgttttcagcccagcaggcaaacctatggtgcctttctcgttgtgtgcaggagcactctttctgtcagctcgcagagataacagagagtgcatccttgtacttcacctgcaccctctacccagaggcacaggtgtgtgatgacatcatggagtccaatgcccagggctgcagactgatcctgcctcagatgccaaaggccctgttccggaagaaagttatactggaagataaagtgaagaacttttacactcgcctgccgttccaaaaactgatggggatatccattagaaataaagtgcccatgtctgaaaaatctatttctaatgggttctttgaatgtgaacgacggtgcgatgcggacccatgctgcactggctttggatttctaaatgtttcccagttaaaaggaggagaggtgacatgtctcactctgaacagcttgggaattcagatgtgcagtgaggagaatggaggagcctggcgcattttggactgtggctctcctgacattgaagtccacacctatcccttcggatggtaccagaagcccattgctcaaaataatgctcccagtttttgccctttggttgttctgccttccctcacagagaaagtgtctctggactcgtggcagtccctggccctctcttcagtggttgttgatccatccattaggcactttgatgttgcccatgtcagcactgctgccaccagcaatttctctgctgtccgagacctctgtttgtcggaatgttcccaacatgaggcctgtctcatcaccactctgcaaacccaacctggggctgtgagatgtatgttctatgctgatactcaaagctgcacacatagtctgcagggtcagaactgccgacttctgcttcgtgaagaggccacccacatctaccggaagccaggaatctctctgctcagctatgaggcatctgtaccttctgtgcccatttccacccatggccggctgctgggcaggtcccaggccatccaggtgggtacctcatggaagcaagtggaccagttccttggagttccatatgctgccccgcccctggcagagaggcgcttccaggcaccagagcccttgaactggacaggctcctgggatgccagcaagccaagggccagctgctggcagccaggcaccagaacatccacgtctcctggagtcagtgaagattgtttgtatctcaatgtgttcatccctcagaatgtggcccctaacgcgtctgtgctggtgttcttccacaacaccatggacagggaggagagtgaaggatggccggctatcgacggctccttcttggctgctgttggcaacctcatcgtggtcactgccagctaccgagtgggtgtcttcggcttcctgagttctgggtccggagaggtgagtggcaactgggggctgctggaccaggtggcggctctgacctgggtgcagacccacatccgaggatttggcggggaccctcggcgcgtgtccctggcagcagaccgtggcggggctgatgtggccagcatccaccttctcacggccagggccaccaactcccaacttttccggagagctgtgctgatgggaggctccgcactctccccggccgccgtcatcagccatgagagggctcagcagcaggcaattgctttggcaaaggaggtcagttgccccatgtcatccagccaagaagtggtgtcctgcctccgccagaagcctgccaatgtcctcaatgatgcccagaccaagctcctggccgtgagtggccctttccactactggggtcctgtgatcgatggccacttcctccgtgagcctccagccagagcactgaagaggtctttacgggtagaggtcgatctgctcattgggagttctcaggacgacgggctcatcaacagagcaaaggctgtgaagcaatttgaggaaagtcgaggccggaccagtagcaaaacagccttttaccaggcactgcagaattctctgggtggcgaggactcagatgcccgcgtcgaggctgctgctacatggtattactctctggagcactccacggatgactatgcctccttctcccgggctctggagaatgccacccgggactactttatcatctgccctataatcgacatggccagtgcctgggcaaagagggcccgaggaaacgtcttcatgtaccatgctcctgaaaactacggccatggcagcctggagctgctggcggatgttcagtttgccttggggcttcccttctacccagcctacgaggggcagttttctctggaggagaagagcctgtcgctgaaaatcatgcagtacttttcccacttcatcagatcaggaaatcccaactacccttatgagttctcacggaaagtacccacatttgcaaccccctggcctgactttgtaccccgtgctggtggagagaactacaaggagttcagtgagctgctccccaatcgacagggcctgaagaaagccgactgctccttctggtccaagtacatctcgtctctgaagacatctgcagatggagccaagggcgggcagtcagcagagagtgaagaggaggagttgacggctggatctgggctaagagaagatctcctaagcctccaggaaccaggctctaagacctacagcaagtgaccagcccttgagctccccaaaaacctcacccgaggctgcccactatggtcatctttttctctaaaatagccacttaccttcaataaagtatctacatgcggtgaactngatcggccggttgtgcatctccccgccacgaatcgcaactattttttgtagaaccacga

SEQ ID NO: 447612 - DNA, 8071 bp, Homo sapiens
  misc_feature (6008)..(6008): n is a, c, g, or t
  misc_feature (6010)..(6010): n is a, c, g, or t
catctcagtcgacttagagacccccctggttgttcatcagagggattgaagtgtatggaccgccagctgggaagccaaagcgatgtccaaggagctgtgaaataagaaatcgtcgtcttctccacggggtgggagataagtcaccaccccagtgttctgcggagggagagtttatgcctgtccagtgcaaatttgtcaacaccacagacatgatgatttttgatctggtccacagctacaacaggtttccagatgcatttgtgaccttcagttccttccagaggaggttccctgaggtatctgggtattgccactgtgctgacagccaagggcgggaactggctgagacaggtttggagttgttactggatgaaatttatgacaccatttttgctggcctggaccttccttccaccttcactgaaaccaccctgtaccggatactgcagagacggttcctcgcagttcaatcagtcatctctggcagattccgatgccccacaaaatgtgaagtggagcggtttacagcaaccagctttggtcacccctatgttccaagctgccgccgaaatggcgactatcaggcggtgcagtgccagacggaagggccctgctggtgtgtggacgcccaggggaaggaaatgcatggaacccggcagcaaggggagccgccatcttgtgctgaaggccaatcttgtgcctccgaaaggcagcaggccttgtccagactctactttgggacctcaggctacttcagccagcacgacctgttctcttccccagagaaaagatgggcctctccaagagtagccagatttgccacatcctgcccacccacgatcaaggagctctttgtggactctgggcttctccgcccaatggtggagggacagagccaacagttttctgtctcagaaaatcttctcaaagaagccatccgagcaatttttccctcccgagggctggctcgtcttgcccttcagtttaccaccaacccaaagagactccagcaaaacctttttggagggaaatttttggtgaatgttggccagtttaacttgtctggagcccttggcacaagaggcacatttaacttcagtcaatttttccagcaacttggtcttgcaagcttcttgaatggagggagacaagaagatttggccaagccactctctgtgggattagattcaaattcttccacaggaacccctgaagctgctaagaaggatggtactatgaataagccaactgtgggcagctttggctttgaaattaacctacaagagaaccaaaatgccctcaaattccttgcttctctcctggagcttccagaattccttctcttcttgcaacatgctatctctgtgccagaagatgtggcaagagatttaggtgatgtgatggaaacggtactcagctcccagacctgtgagcagacacctgaaaggctatttgtcccatcatgcacgacagaaggaagctatgaggatgtccaatgcttttccggagagtgctggtgtgtgaattcctggggcaaagagcttccaggctcaagagtcagaggtggacagccaaggtgccccacagactgtgaaaagcaaagggctcgcatgcaaagcctcatgggcagccagcctgctggctccaccttgtttgtccctgcttgtactagtgagggacatttcctgcctgtccagtgcttcaactcagagtgctactgtgttgatgctgagggtcaggccattcctggaactcgaagtgcaatagggaagcccaagaaatgccccacgccctgtcaattacagtctgagcaagctttcctcaggacggtgcaggccctgctctctaactccagcatgctacccaccctttccgacacctacatcccacagtgcagcaccgatgggcagtggagacaagtgcaatgcaatgggcctcctgagcaggtcttcgagttgtaccaacgatgggaggctcagaacaagggccaggatctgacgcctgccaagctgctagtgaagatcatgagctacagagaagcagcttccggaaacttcagtctctttattcaaagtctgtatgaggctggccagcaagatgtcttcccggtgctgtcacaatacccttctctgcaagatgtcccactagcagcactggaagggaaacggccccagcccagggagaatatcctcctggagccctacctcttctggcagatcttaaatggccaactcagccaatacccggggtcctactcagacttcagcactcctttggcacattttgatcttcggaactgctggtgtgtggatgaggctggccaagaactggaaggaatgcggtctgagccaagcaagctcccaacatgtcctggctcctgtgaggaagcaaagctccgtgtactgcagttcattagggaaacggaagagattgtttcagcttccaacagttctcggttccctctgggggagagtttcctggtggccaagggaatccggctgaggaatgaggacctcggccttcctccgctcttcccgccccgggaggctttcgcggagcagtttctgcgtgggagtgattacgccattcgcctggcggctcagtctaccttaagcttctatcagagacgccgcttttccccggacgactcggctggagcatccgcccttctgcggtcgggcccctacatgccacagtgtgatgcgtttggaagttgggagcctgtgcagtgccacgctgggactgggcactgctggtgtgtagatgagaaaggagggttcatccctggctcactgactgcccgctctctgcagattccacagtgcccgacaacctgcgagaaatctcgaaccagtgggctgctttccagttggaaacaggctagatcccaagaaaacccatctccaaaagacctgttcgtcccagcctgcctagaaacaggagagtatgccaggctgcaggcatcgggggctggcacctggtgtgtggaccctgcatcaggagaagagttgcggcctggctcgagcagcagtgcccagtgcccaagcctctgcaatgtgctcaagagtggagtcctctccaggagagtcagcccaggctatgtcccagcctgcagggcagaggatgggggcttttccccagtgcaatgtgaccaggcccagggcagctgctggtgtgtcatggacagcggagaagaggtgcctgggacgcgcgtgaccgggggccagcccgcctgtgagagcccgcggtgtccgctgccattcaacgcgtcggaggtggttggtggaacaatcctgtgtgagacaatctcgggccccacaggctctgccatgcagcagtgccaattgctgtgccgccagggctcctggagcgtgtttccaccagggccattgatatgtagcctggagagcggacgctgggagtcacagctgcctcagccccgggcctgccaacggccccagctgtggcagaccatccagacccaagggcactttcagctccagctcccgccgggcaagatgtgcagtgctgactacgcggatttgctgcagactttccaggttttcatattggatgagctgacagcccgcggcttctgccagatccaggtgaagacttttggcaccctggtttccattcctgtctgcaacaactcctctgtgcaggtgggttgtctgaccagggagcgtttaggagtgaatgttacatggaaatcacggcttgaggacatcccagtggcttctcttcctgacttacatgacattgagagagccttggtgggcaaggatctccttgggcgcttcacagatctgatccagagtggctcattccagcttcatctggactccaagacgttcccagcggaaaccatccgcttcctccaaggggaccactttggcacctctcccaggacatggtttgggtgctcggaaggattctaccaagtcttgacaagtgaggccagtcaggacggactgggatgcgttaagtgtcctgaaggaagctattcccaagatgaggaatgcattccttgtcctgttggattctaccaagaacaggcagggagcttggcctgtgtcccatgtcctgtgggcagaacgaccatttctgctggagctttcagccagactcactgtgtcactgactgtcagaggaacgaagcaggcctgcaatgtgaccagaatggccagtatcgagccagccagaaggacaggggcagtgggaaggccttctgtgtggacggcgaggggcggaggctgccatggtgggaaacagaggcccctcttgaggactcacagtgtttgatgatgcagaagtttgagaaggttccagaatcaaaggtgatcttcgacgccaatgctcctgtggctgtcagatccaaagttcctgattctgagttccccgtgatgcagtgcttgacagattgcacagaggacgaggcctgcagcttcttcaccgtgtccacgacggagccagagatttcctgtgatttctatgcttggacaagtgacaatgttgcctgcatgacttctgaccagaaacgagatgcactggggaactcaaaggccaccagctttggaagtcttcgctgccaggtgaaagtgaggagccatggtcaagattctccagctgtgtatttgaaaaagggccaaggatccaccacaacacttcagaaacgctttgaacccactggtttccaaaacatgctttctggattgtacaaccccattgtgttctcagcctcaggagccaatctaaccgatgctcacctcttctgtcttcttgcatgcgaccgtgatctgtgttgcgatggcttcgtcctcacacaggttcaaggaggtgccatcatctgtgggttgctgagctcacccagtgtcctgctttgtaatgtcaaagactggatggatccctctgaagcctgggctaatgctacatgtcctggtgtgacatatgaccaggagagccaccaggtgatattgcgtcttggagaccaggagttcatcaagagtctgacacccttagaaggaactcaagacacctttaccaattttcagcaggtttatctctggaaagattctgacatggggtctcggcctgagtctatgggatgtagaaaagacacagtgccaaggccagcatctccaacagaagcaggtttgacaacagaacttttctcccctgtggacctcaaccaggtcattgtcaatggaaatcaatcactatccagccagaagcactggcttttcaagcacctgttttcagcccagcaggcaaacctatggtgcctttctcgttgtgtgcaggagcactctttctgtcagctcgcagagataacagagagtgcatccttgtacttcacctgcaccctctacccagaggcacaggtgtgtgatgacatcatggagtccaatgcccagggctgcagactgatcctgcctcagatgccaaaggccctgttccggaagaaagttatactggaagataaagtgaagaacttttacactcgcctgccgttccaaaaactgatggggatatccattagaaataaagtgcccatgtctgaaaaatctatttctaatgggttctttgaatgtgaacgacggtgcgatgcggacccatgctgcactggctttggatttctaaatgtttcccagttaaaaggaggagaggtgacatgtctcactctgaacagcttgggaattcagatgtgcagtgaggagaatggaggagcctggcgcattttggactgtggctctcctgacattgaagtccacacctatcccttcggatggtaccagaagcccattgctcaaaataatgctcccagtttttgccctttggttgttctgccttccctcacagagaaagtgtctctggactcgtggcagtccctggccctctcttcagtggttgttgatccatccattaggcactttgatgttgcccatgtcagcactgctgccaccagcaatttctctgctgtccgagacctctgtttgtcggaatgntncccaacatgaggcctgtctcatcaccactctgcaaacccatgtcggaatgttcccaacatgaggcctgtctcatcaccactctgcaaacccaacctggggctgtgagatgtatgttctatgctgatactcaaagctgcacacatagtctgcagggtcagaactgccgacttctgcttcgtgaagaggccacccacatctaccggaagccaggaatctctctgctcagctatgaggcatctgtaccttctgtgcccatttccacccatggccggctgctgggcaggtcccaggccatccaggtgggtacctcatggaagcaagtggaccagttccttggagttccatatgctgccccgcccctggcagagaggcgcttccaggcaccagagcccttgaactggacaggctcctgggatgccagcaagccaagggccagctgctggcagccaggcaccagaacatccacgtctcctggagtcagtgaagattgtttgtatctcaatgtgttcatccctcagaatgtggcccctaacgcgtctgtgctggtgttcttccacaacaccatggacagggaggagagtgaaggatggccggctatcgacggctccttcttggctgctgttggcaacctcatcgtggtcactgccagctaccgagtgggtgtcttcggcttcctgagttctgggtccggagaggtgagtggcaactgggggctgctggaccaggtggcggctctgacctgggtgcagacccacatccgaggatttggcggggaccctcggcgcgtgtccctggcagcagaccgtggcggggctgatgtggccagcatccaccttctcacggccagggccaccaactcccaacttttccggagagctgtgctgatgggaggctccgcactctccccggccgccgtcatcagccatgagagggctcagcagcaggcaattgctttggcaaaggaggtcagttgccccatgtcatccagccaagaagtggtgtcctgcctccgccagaagcctgccaatgtcctcaatgatgcccagaccaagctcctggccgtgagtggccctttccactactggggtcctgtgatcgatggccacttcctccgtgagcctccagccagagcactgaagaggtctttacgggtagaggtcgatctgctcattgggagttctcaggacgacgggctcatcaacagagcaaaggctgtgaagcaatttgaggaaagtcgaggccggaccagtagcaaaacagccttttaccaggcactgcagaattctctgggtggcgaggactcagatgcccgcgtcgaggctgctgctacatggtattactctctggagcactccacggatgactatgcctccttctcccgggctctggagaatgccacccgggactactttatcatctgccctataatcgacatggccagtgcctgggcaaagagggcccgaggaaacgtcttcatgtaccatgctcctgaaaactacggccatggcagcctggagctgctggcggatgttcagtttgccttggggcttcccttctacccagcctacgaggggcagttttctctggaggagaagagcctgtcgctgaaaatcatgcagtacttttcccacttcatcagatcaggaaatcccaactacccttatgagttctcacggaaagtacccacatttgcaaccccctggcctgactttgtaccccgtgctggtggagagaactacaaggagttcagtgagctgctccccaatcgacagggcctgaagaaagccgactgctccttctggtccaagtacatctcgtctctgaagacatctgcagatggagccaagggcgggcagtcagcagagagtgaagaggaggagttgacggctggatctgggctaagagaagatctcctaagcctccaggaaccaggctctaagacctacagcaagtgaccagcccttgagctccccaaaaacctcacccgaggctgcccactatggtcatctttttctctaaaatagccacttaccttcaataaagtatctacatgcggtgaa

SEQ ID NO: 447613 - DNA, 7821 bp, Homo sapiens
catctcagtcgacttagagacccccctggttgttcatcagagggattgaagtgtatggaccgccagctgggaagccaaagcgatgtccaaggagctgtgaaataagaaatcgtcgtcttctccacggggtgggagataagtcaccaccccagtgttctgcggagggagagtttatgcctgtccagtgcaaatttgtcaacaccacagacatgatgatttttgatctggtccacagctacaacaggtttccagatgcatttgtgaccttcagttccttccagaggaggttccctgaggtatctgggtattgccactgtgctgacagccaagggcgggaactggctgagacaggtttggagttgttactggatgaaatttatgacaccatttttgctggcctggaccttccttccaccttcactgaaaccaccctgtaccggatactgcagagacggttcctcgcagttcaatcagtcatctctggcagattccgatgccccacaaaatgtgaagtggagcggtttacagcaaccagctttggtcacccctatgttccaagctgccgccgaaatggcgactatcaggcggtgcagtgccagacggaagggccctgctggtgtgtggacgcccaggggaaggaaatgcatggaacccggcagcaaggggagccgccatcttgtgctgaaggccaatcttgtgcctccgaaaggcagcaggccttgtccagactctactttgggacctcaggctacttcagccagcacgacctgttctcttccccagagaaaagatgggcctctccaagagtagccagatttgccacatcctgcccacccacgatcaaggagctctttgtggactctgggcttctccgcccaatggtggagggacagagccaacagttttctgtctcagaaaatcttctcaaagaagccatccgagcaatttttccctcccgagggctggctcgtcttgcccttcagtttaccaccaacccaaagagactccagcaaaacctttttggagggaaatttttggtgaatgttggccagtttaacttgtctggagcccttggcacaagaggcacatttaacttcagtcaatttttccagcaacttggtcttgcaagcttcttgaatggagggagacaagaagatttggccaagccactctctgtgggattagattcaaattcttccacaggaacccctgaagctgctaagaaggatggtactatgaataagccaactgtgggcagctttggctttgaaattaacctacaagagaaccaaaatgccctcaaattccttgcttctctcctggagcttccagaattccttctcttcttgcaacatgctatctctgtgccagaagatgtggcaagagatttaggtgatgtgatggaaacggtactcagctcccagacctgtgagcagacacctgaaaggctatttgtcccatcatgcacgacagaaggaagctatgaggatgtccaatgcttttccggagagtgctggtgtgtgaattcctggggcaaagagcttccaggctcaagagtcagaggtggacagccaaggtgccccacagactgtgaaaagcaaagggctcgcatgcaaagcctcatgggcagccagcctgctggctccaccttgtttgtccctgcttgtactagtgagggacatttcctgcctgtccagtgcttcaactcagagtgctactgtgttgatgctgagggtcaggccattcctggaactcgaagtgcaatagggaagcccaagaaatgccccacgccctgtcaattacagtctgagcaagctttcctcaggacggtgcaggccctgctctctaactccagcatgctacccaccctttccgacacctacatcccacagtgcagcaccgatgggcagtggagacaagtgcaatgcaatgggcctcctgagcaggtcttcgagttgtaccaacgatgggaggctcagaacaagggccaggatctgacgcctgccaagctgctagtgaagatcatgagctacagagaagcagcttccggaaacttcagtctctttattcaaagtctgtatgaggctggccagcaagatgtcttcccggtgctgtcacaatacccttctctgcaagatgtcccactagcagcactggaagggaaacggccccagcccagggagaatatcctcctggagccctacctcttctggcagatcttaaatggccaactcagccaatacccggggtcctactcagacttcagcactcctttggcacattttgatcttcggaactgctggtgtgtggatgaggctggccaagaactggaaggaatgcggtctgagccaagcaagctcccaacatgtcctggctcctgtgaggaagcaaagctccgtgtactgcagttcattagggaaacggaagagattgtttcagcttccaacagttctcggttccctctgggggagagtttcctggtggccaagggaatccggctgaggaatgaggacctcggccttcctccgctcttcccgccccgggaggctttcgcggagcagtttctgcgtgggagtgattacgccattcgcctggcggctcagtctaccttaagcttctatcagagacgccgcttttccccggacgactcggctggagcatccgcccttctgcggtcgggcccctacatgccacagtgtgatgcgtttggaagttgggagcctgtgcagtgccacgctgggactgggcactgctggtgtgtagatgagaaaggagggttcatccctggctcactgactgcccgctctctgcagattccacagtgcccgacaacctgcgagaaatctcgaaccagtgggctgctttccagttggaaacaggctagatcccaagaaaacccatctccaaaagacctgttcgtcccagcctgcctagaaacaggagagtatgccaggctgcaggcatcgggggctggcacctggtgtgtggaccctgcatcaggagaagagttgcggcctggctcgagcagcagtgcccagtgcccaagcctctgcaatgtgctcaagagtggagtcctctccaggagagtcagcccaggctatgtcccagcctgcagggcagaggatgggggcttttccccagtgcaatgtgaccaggcccagggcagctgctggtgtgtcatggacagcggagaagaggtgcctgggacgcgcgtgaccgggggccagcccgcctgtgagagcccgcggtgtccgctgccattcaacgcgtcggaggtggttggtggaacaatcctgtgtgagacaatctcgggccccacaggctctgccatgcagcagtgccaattgctgtgccgccagggctcctggagcgtgtttccaccagggccattgatatgtagcctggagagcggacgctgggagtcacagctgcctcagccccgggcctgccaacggccccagctgtggcagaccatccagacccaagggcactttcagctccagctcccgccgggcaagatgtgcagtgctgactacgcggatttgctgcagactttccaggttttcatattggatgagctgacagcccgcggcttctgccagatccaggtgaagacttttggcaccctggtttccattcctgtctgcaacaactcctctgtgcaggtgggttgtctgaccagggagcgtttaggagtgaatgttacatggaaatcacggcttgaggacatcccagtggcttctcttcctgacttacatgacattgagagagccttggtgggcaaggatctccttgggcgcttcacagatctgatccagagtggctcattccagcttcatctggactccaagacgttcccagcggaaaccatccgcttcctccaaggggaccactttggcacctctcccaggacatggtttgggtgctcggaaggattctaccaagtcttgacaagtgaggccagtcaggacggactgggatgcgttaagtgtcctgaaggaagctattcccaagatgaggaatgcattccttgtcctgttggattctaccaagaacaggcagggagcttggcctgtgtcccatgtcctgtgggcagaacgaccatttctgctggagctttcagccagactcactgtgtcactgactgtcagaggaacgaagcaggcctgcaatgtgaccagaatggccagtatcgagccagccagaaggacaggggcagtgggaaggccttctgtgtggacggcgaggggcggaggctgccatggtgggaaacagaggcccctcttgaggactcacagtgtttgatgatgcagaagtttgagaaggttccagaatcaaaggtgatcttcgacgccaatgctcctgtggctgtcagatccaaagttcctgattctgagttccccgtgatgcagtgcttgacagattgcacagaggacgaggcctgcagcttcttcaccgtgtccacgacggagccagagatttcctgtgatttctatgcttggacaagtgacaatgttgcctgcatgacttctgaccagaaacgagatgcactggggaactcaaaggccaccagctttggaagtcttcgctgccaggtgaaagtgaggagccatggtcaagattctccagctgtgtatttgaaaaagggccaaggatccaccacaacacttcagaaacgctttgaacccactggtttccaaaacatgctttctggattgtacaaccccattgtgttctcagcctcaggagccaatctaaccgatgctcacctcttctgtcttcttgcatgcgaccgtgatctgtgttgcgatggcttcgtcctcacacaggttcaaggaggtgccatcatctgtgggttgctgagctcacccagtgtcctgctttgtaatgtcaaagactggatggatccctctgaagcctgggctaatgctacatgtcctggtgtgacatatgaccaggagagccaccaggtgatattgcgtcttggagaccaggagttcatcaagagtctgacacccttagaaggaactcaagacacctttaccaattttcagcaggtttatctctggaaagattctgacatggggtctcggcctgagtctatgggatgtagaaaagacacagtgccaaggccagcatctccaacagaagcaggtttgacaacagaacttttctcccctgtggacctcaaccaggtcattgtcaatggaaatcaatcactatccagccagaagcactggcttttcaagcacctgttttcagcccagcaggcaaacctatggtgcctttctcgttgtgtgcaggagcactctttctgtcagctcgcagagataacagagagtgcatccttgtacttcacctgcaccctctacccagaggcacaggtgtgtgatgacatcatggagtccaatgcccagggctgcagactgatcctgcctcagatgccaaaggccctgttccggaagaaagttatactggaagataaagtgaagaacttttacactcgcctgccgttccaaaaactgatggggatatccattagaaataaagtgcccatgtctgaaaaatctatttctaatgggttctttgaatgtgaacgacggtgcgatgcggacccatgctgcactggctttggatttctaaatgtttcccagttaaaaggaggagaggtgacatgtctcactctgaacagcttgggaattcagatgtgcagtgaggagaatggaggagcctggcgcattttggactgtggctctcctgacattgaagtccacacctatcccttcggatggtaccagaagcccattgctcaaaataatgctcccagtttttgccctttggttgttctgccttccctcacagagaaagtgtctctggactcgtggcagtccctggccctctcttcagtggttgttgatccatccattaggcactttgatgttgcccatgtcagcactgctgccaccagcaatttctctgctgtccgagacctctgtttgtcggaatgttcccaacatgaggcctgtctcatcaccactctgcaaacccaacctggggctgtgagatgtatgttctatgctgatactcaaagctgcacacatagtctgcagggtcagaactgccgacttctgcttcgtgaagaggccacccacatctaccggaagccaggaatctctctgctcagctatgaggcatctgtaccttctgtgcccatttccacccatggccggctgctgggcaggtcccaggccatccaggtgggtacctcatggaagcaagtggaccagttccttggagttccatatgctgccccgcccctggcagagaggcgcttccaggcaccagagcccttgaactggacaggctcctgggatgccagcaagccaagggccagctgctggcagccaggcaccagaacatccacgtctcctggagtcagtgaagattgtttgtatctcaatgtgttcatccctcagaatgtggcccctaacgcgtctgtgctggtgttcttccacaacaccatggacagggaggagagtgaaggatggccggctatcgacggctccttcttggctgctgttggcaacctcatcgtggtcactgccagctaccgagtgggtgtcttcggcttcctgagttctgggtccggagaggtgagtggcaactgggggctgctggaccaggtggcggctctgacctgggtgcagacccacatccgaggatttggcggggaccctcggcgcgtgtccctggcagcagaccgtggcggggctgatgtggccagcatccaccttctcacggccagggccaccaactcccaacttttccggagagctgtgctgatgggaggctccgcactctccccggccgccgtcatcagccatgagagggctcagcagcaggcaattgctttggcaaaggaggtcagttgccccatgtcatccagccaagaagtggtgtcctgcctccgccagaagcctgccaatgtcctcaatgatgcccagaccaagctcctggccgtgagtggccctttccactactggggtcctgtgatcgatggccacttcctccgtgagcctccagccagagcactgaagaggtctttacgggtagaggtcgatctgctcattgggagttctcaggacgacgggctcatcaacagagcaaaggctgtgaagcaatttgaggaaagtcgaggccggaccagtagcaaaacagccttttaccaggcactgcagaattctctgggtggcgaggactcagatgcccgcgtcgaggctgctgctacatggtattactctctggagcactccacggatgactatgcctccttctcccgggctctggagaatgccacccgggactactttatcatctgccctataatcgacatggccagtgcctgggcaaagagggcccgaggaaacgtcttcatgtaccatgctcctgaaaactacggccatggcagcctggagctgctggcggatgttcagtttgccttggggcttcccttctacccagcctacgaggggcagttttctctggaggagaagagcctgtcgctgaaaatcatgcagtacttttcccacttcatcagatcaggaaatcccaactacccttatgagttctcacggaaagtacccacatttgcaaccccctggcctgactttgtaccccgtgctggtggagagaactacaaggagttcagtgagctgctccccaatcgacagggcctgaagaaagccgactgctccttctggtccaagtacatctcgtctctgaagacatctgcaggatgagccaagcgcgggcagtcggagg

SEQ ID NO: 447614 - DNA, 7781 bp, Homo sapiens
catctcagtcgacttagagacccccctggttgttcatcagagggattgaagtgtatggaccgccagctgggaagccaaagcgatgtccaaggagctgtgaaataagaaatcgtcgtcttctccacggggtgggagataagtcaccaccccagtgttctgcggagggagagtttatgcctgtccagtgcaaatttgtcaacaccacagacatgatgatttttgatctggtccacagctacaacaggtttccagatgcatttgtgaccttcagttccttccagaggaggttccctgaggtatctgggtattgccactgtgctgacagccaagggcgggaactggctgagacaggtttggagttgttactggatgaaatttatgacaccatttttgctggcctggaccttccttccaccttcactgaaaccaccctgtaccggatactgcagagacggttcctcgcagttcaatcagtcatctctggcagattccgatgccccacaaaatgtgaagtggagcggtttacagcaaccagctttggtcacccctatgttccaagctgccgccgaaatggcgactatcaggcggtgcagtgccagacggaagggccctgctggtgtgtggacgcccaggggaaggaaatgcatggaacccggcagcaaggggagccgccatcttgtgctgaaggccaatcttgtgcctccgaaaggcagcaggccttgtccagactctactttgggacctcaggctacttcagccagcacgacctgttctcttccccagagaaaagatgggcctctccaagagtagccagatttgccacatcctgcccacccacgatcaaggagctctttgtggactctgggcttctccgcccaatggtggagggacagagccaacagttttctgtctcagaaaatcttctcaaagaagccatccgagcaatttttccctcccgagggctggctcgtcttgcccttcagtttaccaccaacccaaagagactccagcaaaacctttttggagggaaatttttggtgaatgttggccagtttaacttgtctggagcccttggcacaagaggcacatttaacttcagtcaatttttccagcaacttggtcttgcaagcttcttgaatggagggagacaagaagatttggccaagccactctctgtgggattagattcaaattcttccacaggaacccctgaagctgctaagaaggatggtactatgaataagccaactgtgggcagctttggctttgaaattaacctacaagagaaccaaaatgccctcaaattccttgcttctctcctggagcttccagaattccttctcttcttgcaacatgctatctctgtgccagaagatgtggcaagagatttaggtgatgtgatggaaacggtactcagctcccagacctgtgagcagacacctgaaaggctatttgtcccatcatgcacgacagaaggaagctatgaggatgtccaatgcttttccggagagtgctggtgtgtgaattcctggggcaaagagcttccaggctcaagagtcagaggtggacagccaaggtgccccacagactgtgaaaagcaaagggctcgcatgcaaagcctcatgggcagccagcctgctggctccaccttgtttgtccctgcttgtactagtgagggacatttcctgcctgtccagtgcttcaactcagagtgctactgtgttgatgctgagggtcaggccattcctggaactcgaagtgcaatagggaagcccaagaaatgccccacgccctgtcaattacagtctgagcaagctttcctcaggacggtgcaggccctgctctctaactccagcatgctacccaccctttccgacacctacatcccacagtgcagcaccgatgggcagtggagacaagtgcaatgcaatgggcctcctgagcaggtcttcgagttgtaccaacgatgggaggctcagaacaagggccaggatctgacgcctgccaagctgctagtgaagatcatgagctacagagaagcagcttccggaaacttcagtctctttattcaaagtctgtatgaggctggccagcaagatgtcttcccggtgctgtcacaatacccttctctgcaagatgtcccactagcagcactggaagggaaacggccccagcccagggagaatatcctcctggagccctacctcttctggcagatcttaaatggccaactcagccaatacccggggtcctactcagacttcagcactcctttggcacattttgatcttcggaactgctggtgtgtggatgaggctggccaagaactggaaggaatgcggtctgagccaagcaagctcccaacatgtcctggctcctgtgaggaagcaaagctccgtgtactgcagttcattagggaaacggaagagattgtttcagcttccaacagttctcggttccctctgggggagagtttcctggtggccaagggaatccggctgaggaatgaggacctcggccttcctccgctcttcccgccccgggaggctttcgcggagcagtttctgcgtgggagtgattacgccattcgcctggcggctcagtctaccttaagcttctatcagagacgccgcttttccccggacgactcggctggagcatccgcccttctgcggtcgggcccctacatgccacagtgtgatgcgtttggaagttgggagcctgtgcagtgccacgctgggactgggcactgctggtgtgtagatgagaaaggagggttcatccctggctcactgactgcccgctctctgcagattccacagtgcccgacaacctgcgagaaatctcgaaccagtgggctgctttccagttggaaacaggctagatcccaagaaaacccatctccaaaagacctgttcgtcccagcctgcctagaaacaggagagtatgccaggctgcaggcatcgggggctggcacctggtgtgtggaccctgcatcaggagaagagttgcggcctggctcgagcagcagtgcccagtgcccaagcctctgcaatgtgctcaagagtggagtcctctccaggagagtcagcccaggctatgtcccagcctgcagggcagaggatgggggcttttccccagtgcaatgtgaccaggcccagggcagctgctggtgtgtcatggacagcggagaagaggtgcctgggacgcgcgtgaccgggggccagcccgcctgtgagagcccgcggtgtccgctgccattcaacgcgtcggaggtggttggtggaacaatcctgtgtgagacaatctcgggccccacaggctctgccatgcagcagtgccaattgctgtgccgccagggctcctggagcgtgtttccaccagggccattgatatgtagcctggagagcggacgctgggagtcacagctgcctcagccccgggcctgccaacggccccagctgtggcagaccatccagacccaagggcactttcagctccagctcccgccgggcaagatgtgcagtgctgactacgcggatttgctgcagactttccaggttttcatattggatgagctgacagcccgcggcttctgccagatccaggtgaagacttttggcaccctggtttccattcctgtctgcaacaactcctctgtgcaggtgggttgtctgaccagggagcgtttaggagtgaatgttacatggaaatcacggcttgaggacatcccagtggcttctcttcctgacttacatgacattgagagagccttggtgggcaaggatctccttgggcgcttcacagatctgatccagagtggctcattccagcttcatctggactccaagacgttcccagcggaaaccatccgcttcctccaaggggaccactttggcacctctcccaggacatggtttgggtgctcggaaggattctaccaagtcttgacaagtgaggccagtcaggacggactgggatgcgttaagtgtcctgaaggaagctattcccaagatgaggaatgcattccttgtcctgttggattctaccaagaacaggcagggagcttggcctgtgtcccatgtcctgtgggcagaacgaccatttctgctggagctttcagccagactcactgtgtcactgactgtcagaggaacgaagcaggcctgcaatgtgaccagaatggccagtatcgagccagccagaaggacaggggcagtgggaaggccttctgtgtggacggcgaggggcggaggctgccatggtgggaaacagaggcccctcttgaggactcacagtgtttgatgatgcagaagtttgagaaggttccagaatcaaaggtgatcttcgacgccaatgctcctgtggctgtcagatccaaagttcctgattctgagttccccgtgatgcagtgcttgacagattgcacagaggacgaggcctgcagcttcttcaccgtgtccacgacggagccagagatttcctgtgatttctatgcttggacaagtgacaatgttgcctgcatgacttctgaccagaaacgagatgcactggggaactcaaaggccaccagctttggaagtcttcgctgccaggtgaaagtgaggagccatggtcaagattctccagctgtgtatttgaaaaagggccaaggatccaccacaacacttcagaaacgctttgaacccactggtttccaaaacatgctttctggattgtacaaccccattgtgttctcagcctcaggagccaatctaaccgatgctcacctcttctgtcttcttgcatgcgaccgtgatctgtgttgcgatggcttcgtcctcacacaggttcaaggaggtgccatcatctgtgggttgctgagctcacccagtgtcctgctttgtaatgtcaaagactggatggatccctctgaagcctgggctaatgctacatgtcctggtgtgacatatgaccaggagagccaccaggtgatattgcgtcttggagaccaggagttcatcaagagtctgacacccttagaaggaactcaagacacctttaccaattttcagcaggtttatctctggaaagattctgacatggggtctcggcctgagtctatgggatgtagaaaagacacagtgccaaggccagcatctccaacagaagcaggtttgacaacagaacttttctcccctgtggacctcaaccaggtcattgtcaatggaaatcaatcactatccagccagaagcactggcttttcaagcacctgttttcagcccagcaggcaaacctatggtgcctttctcgttgtgtgcaggagcactctttctgtcagctcgcagagataacagagagtgcatccttgtacttcacctgcaccctctacccagaggcacaggtgtgtgatgacatcatggagtccaatgcccagggctgcagactgatcctgcctcagatgccaaaggccctgttccggaagaaagttatactggaagataaagtgaagaacttttacactcgcctgccgttccaaaaactgatggggatatccattagaaataaagtgcccatgtctgaaaaatctatttctaatgggttctttgaatgtgaacgacggtgcgatgcggacccatgctgcactggctttggatttctaaatgtttcccagttaaaaggaggagaggtgacatgtctcactctgaacagcttgggaattcagatgtgcagtgaggagaatggaggagcctggcgcattttggactgtggctctcctgacattgaagtccacacctatcccttcggatggtaccagaagcccattgctcaaaataatgctcccagtttttgccctttggttgttctgccttccctcacagagaaagtgtctctggactcgtggcagtccctggccctctcttcagtggttgttgatccatccattaggcactttgatgttgcccatgtcagcactgctgccaccagcaatttctctgctgtccgagacctctgtttgtcggaatgttcccaacatgaggcctgtctcatcaccactctgcaaacccaacctggggctgtgagatgtatgttctatgctgatactcaaagctgcacacatagtctgcagggtcagaactgccgacttctgcttcgtgaagaggccacccacatctaccggaagccaggaatctctctgctcagctatgaggcatctgtaccttctgtgcccatttccacccatggccggctgctgggcaggtcccaggccatccaggtgggtacctcatggaagcaagtggaccagttccttggagttccatatgctgccccgcccctggcagagaggcgcttccaggcaccagagcccttgaactggacaggctcctgggatgccagcaagccaagggccagctgctggcagccaggcaccagaacatccacgtctcctggagtcagtgaagattgtttgtatctcaatgtgttcatccctcagaatgtggcccctaacgcgtctgtgctggtgttcttccacaacaccatggacagggaggagagtgaaggatggccggctatcgacggctccttcttggctgctgttggcaacctcatcgtggtcactgccagctaccgagtgggtgtcttcggcttcctgagttctgggtccggagaggtgagtggcaactgggggctgctggaccaggtggcggctctgacctgggtgcagacccacatccgaggatttggcggggaccctcggcgcgtgtccctggcagcagaccgtggcggggctgatgtggccagcatccaccttctcacggccagggccaccaactcccaacttttccggagagctgtgctgatgggaggctccgcactctccccggccgccgtcatcagccatgagagggctcagcagcaggcaattgctttggcaaaggaggtcagttgccccatgtcatccagccaagaagtggtgtcctgcctccgccagaagcctgccaatgtcctcaatgatgcccagaccaagctcctggccgtgagtggccctttccactactggggtcctgtgatcgatggccacttcctccgtgagcctccagccagagcactgaagaggtctttacgggtagaggtcgatctgctcattgggagttctcaggacgacgggctcatcaacagagcaaaggctgtgaagcaatttgaggaaagtcgaggccggaccagtagcaaaacagccttttaccaggcactgcagaattctctgggtggcgaggactcagatgcccgcgtcgaggctgctgctacatggtattactctctggagcactccacggatgactatgcctccttctcccgggctctggagaatgccacccgggactactttatcatctgccctataatcgacatggccagtgcctgggcaaagagggcccgaggaaacgtcttcatgtaccatgctcctgaaaactacggccatggcagcctggagctgctggcggatgttcagtttgccttggggcttcccttctacccagcctacgaggggcagttttctctggaggagaagagcctgtcgctgaaaatcatgcagtacttttcccacttcatcagatcaggaaatcccaactacccttatgagttctcacggaaagtacccacatttgcaaccccctggcctgactttgtaccccgtgctggtggagagaactacaaggagttcagtgagctgctccccaatcgttcaccccctgtagacgtctcgcctgctcattcttgtctcccctacatattactc

SEQ ID NO: 447615 - DNA, 7625 bp, Homo sapiens
catctcagtcgacttagagacccccctggttgttcatcagagggattgaagtgtatggaccgccagctgggaagccaaagcgatgtccaaggagctgtgaaataagaaatcgtcgtcttctccacggggtgggagataagtcaccaccccagtgttctgcggagggagagtttatgcctgtccagtgcaaatttgtcaacaccacagacatgatgatttttgatctggtccacagctacaacaggtttccagatgcatttgtgaccttcagttccttccagaggaggttccctgaggtatctgggtattgccactgtgctgacagccaagggcgggaactggctgagacaggtttggagttgttactggatgaaatttatgacaccatttttgctggcctggaccttccttccaccttcactgaaaccaccctgtaccggatactgcagagacggttcctcgcagttcaatcagtcatctctggcagattccgatgccccacaaaatgtgaagtggagcggtttacagcaaccagctttggtcacccctatgttccaagctgccgccgaaatggcgactatcaggcggtgcagtgccagacggaagggccctgctggtgtgtggacgcccaggggaaggaaatgcatggaacccggcagcaaggggagccgccatcttgtgctgaaggccaatcttgtgcctccgaaaggcagcaggccttgtccagactctactttgggacctcaggctacttcagccagcacgacctgttctcttccccagagaaaagatgggcctctccaagagtagccagatttgccacatcctgcccacccacgatcaaggagctctttgtggactctgggcttctccgcccaatggtggagggacagagccaacagttttctgtctcagaaaatcttctcaaagaagccatccgagcaatttttccctcccgagggctggctcgtcttgcccttcagtttaccaccaacccaaagagactccagcaaaacctttttggagggaaatttttggtgaatgttggccagtttaacttgtctggagcccttggcacaagaggcacatttaacttcagtcaatttttccagcaacttggtcttgcaagcttcttgaatggagggagacaagaagatttggccaagccactctctgtgggattagattcaaattcttccacaggaacccctgaagctgctaagaaggatggtactatgaataagccaactgtgggcagctttggctttgaaattaacctacaagagaaccaaaatgccctcaaattccttgcttctctcctggagcttccagaattccttctcttcttgcaacatgctatctctgtgccagaagatgtggcaagagatttaggtgatgtgatggaaacggtactcagctcccagacctgtgagcagacacctgaaaggctatttgtcccatcatgcacgacagaaggaagctatgaggatgtccaatgcttttccggagagtgctggtgtgtgaattcctggggcaaagagcttccaggctcaagagtcagaggtggacagccaaggtgccccacagactgtgaaaagcaaagggctcgcatgcaaagcctcatgggcagccagcctgctggctccaccttgtttgtccctgcttgtactagtgagggacatttcctgcctgtccagtgcttcaactcagagtgctactgtgttgatgctgagggtcaggccattcctggaactcgaagtgcaatagggaagcccaagaaatgccccacgccctgtcaattacagtctgagcaagctttcctcaggacggtgcaggccctgctctctaactccagcatgctacccaccctttccgacacctacatcccacagtgcagcaccgatgggcagtggagacaagtgcaatgcaatgggcctcctgagcaggtcttcgagttgtaccaacgatgggaggctcagaacaagggccaggatctgacgcctgccaagctgctagtgaagatcatgagctacagagaagcagcttccggaaacttcagtctctttattcaaagtctgtatgaggctggccagcaagatgtcttcccggtgctgtcacaatacccttctctgcaagatgtcccactagcagcactggaagggaaacggccccagcccagggagaatatcctcctggagccctacctcttctggcagatcttaaatggccaactcagccaatacccggggtcctactcagacttcagcactcctttggcacattttgatcttcggaactgctggtgtgtggatgaggctggccaagaactggaaggaatgcggtctgagccaagcaagctcccaacatgtcctggctcctgtgaggaagcaaagctccgtgtactgcagttcattagggaaacggaagagattgtttcagcttccaacagttctcggttccctctgggggagagtttcctggtggccaagggaatccggctgaggaatgaggacctcggccttcctccgctcttcccgccccgggaggctttcgcggagcagtttctgcgtgggagtgattacgccattcgcctggcggctcagtctaccttaagcttctatcagagacgccgcttttccccggacgactcggctggagcatccgcccttctgcggtcgggcccctacatgccacagtgtgatgcgtttggaagttgggagcctgtgcagtgccacgctgggactgggcactgctggtgtgtagatgagaaaggagggttcatccctggctcactgactgcccgctctctgcagattccacagtgcccgacaacctgcgagaaatctcgaaccagtgggctgctttccagttggaaacaggctagatcccaagaaaacccatctccaaaagacctgttcgtcccagcctgcctagaaacaggagagtatgccaggctgcaggcatcgggggctggcacctggtgtgtggaccctgcatcaggagaagagttgcggcctggctcgagcagcagtgcccagtgcccaagcctctgcaatgtgctcaagagtggagtcctctccaggagagtcagcccaggctatgtcccagcctgcagggcagaggatgggggcttttccccagtgcaatgtgaccaggcccagggcagctgctggtgtgtcatggacagcggagaagaggtgcctgggacgcgcgtgaccgggggccagcccgcctgtgagagcccgcggtgtccgctgccattcaacgcgtcggaggtggttggtggaacaatcctgtgtgagacaatctcgggccccacaggctctgccatgcagcagtgccaattgctgtgccgccagggctcctggagcgtgtttccaccagggccattgatatgtagcctggagagcggacgctgggagtcacagctgcctcagccccgggcctgccaacggccccagctgtggcagaccatccagacccaagggcactttcagctccagctcccgccgggcaagatgtgcagtgctgactacgcggatttgctgcagactttccaggttttcatattggatgagctgacagcccgcggcttctgccagatccaggtgaagacttttggcaccctggtttccattcctgtctgcaacaactcctctgtgcaggtgggttgtctgaccagggagcgtttaggagtgaatgttacatggaaatcacggcttgaggacatcccagtggcttctcttcctgacttacatgacattgagagagccttggtgggcaaggatctccttgggcgcttcacagatctgatccagagtggctcattccagcttcatctggactccaagacgttcccagcggaaaccatccgcttcctccaaggggaccactttggcacctctcccaggacatggtttgggtgctcggaaggattctaccaagtcttgacaagtgaggccagtcaggacggactgggatgcgttaagtgtcctgaaggaagctattcccaagatgaggaatgcattccttgtcctgttggattctaccaagaacaggcagggagcttggcctgtgtcccatgtcctgtgggcagaacgaccatttctgctggagctttcagccagactcactgtgtcactgactgtcagaggaacgaagcaggcctgcaatgtgaccagaatggccagtatcgagccagccagaaggacaggggcagtgggaaggccttctgtgtggacggcgaggggcggaggctgccatggtgggaaacagaggcccctcttgaggactcacagtgtttgatgatgcagaagtttgagaaggttccagaatcaaaggtgatcttcgacgccaatgctcctgtggctgtcagatccaaagttcctgattctgagttccccgtgatgcagtgcttgacagattgcacagaggacgaggcctgcagcttcttcaccgtgtccacgacggagccagagatttcctgtgatttctatgcttggacaagtgacaatgttgcctgcatgacttctgaccagaaacgagatgcactggggaactcaaaggccaccagctttggaagtcttcgctgccaggtgaaagtgaggagccatggtcaagattctccagctgtgtatttgaaaaagggccaaggatccaccacaacacttcagaaacgctttgaacccactggtttccaaaacatgctttctggattgtacaaccccattgtgttctcagcctcaggagccaatctaaccgatgctcacctcttctgtcttcttgcatgcgaccgtgatctgtgttgcgatggcttcgtcctcacacaggttcaaggaggtgccatcatctgtgggttgctgagctcacccagtgtcctgctttgtaatgtcaaagactggatggatccctctgaagcctgggctaatgctacatgtcctggtgtgacatatgaccaggagagccaccaggtgatattgcgtcttggagaccaggagttcatcaagagtctgacacccttagaaggaactcaagacacctttaccaattttcagcaggtttatctctggaaagattctgacatggggtctcggcctgagtctatgggatgtagaaaagacacagtgccaaggccagcatctccaacagaagcaggtttgacaacagaacttttctcccctgtggacctcaaccaggtcattgtcaatggaaatcaatcactatccagccagaagcactggcttttcaagcacctgttttcagcccagcaggcaaacctatggtgcctttctcgttgtgtgcaggagcactctttctgtcagctcgcagagataacagagagtgcatccttgtacttcacctgcaccctctacccagaggcacaggtgtgtgatgacatcatggagtccaatgcccagggctgcagactgatcctgcctcagatgccaaaggccctgttccggaagaaagttatactggaagataaagtgaagaacttttacactcgcctgccgttccaaaaactgatggggatatccattagaaataaagtgcccatgtctgaaaaatctatttctaatgggttctttgaatgtgaacgacggtgcgatgcggacccatgctgcactggctttggatttctaaatgtttcccagttaaaaggaggagaggtgacatgtctcactctgaacagcttgggaattcagatgtgcagtgaggagaatggaggagcctggcgcattttggactgtggctctcctgacattgaagtccacacctatcccttcggatggtaccagaagcccattgctcaaaataatgctcccagtttttgccctttggttgttctgccttccctcacagagaaagtgtctctggactcgtggcagtccctggccctctcttcagtggttgttgatccatccattaggcactttgatgttgcccatgtcagcactgctgccaccagcaatttctctgctgtccgagacctctgtttgtcggaatgttcccaacatgaggcctgtctcatcaccactctgcaaacccaacctggggctgtgagatgtatgttctatgctgatactcaaagctgcacacatagtctgcagggtcagaactgccgacttctgcttcgtgaagaggccacccacatctaccggaagccaggaatctctctgctcagctatgaggcatctgtaccttctgtgcccatttccacccatggccggctgctgggcaggtcccaggccatccaggtgggtacctcatggaagcaagtggaccagttccttggagttccatatgctgccccgcccctggcagagaggcgcttccaggcaccagagcccttgaactggacaggctcctgggatgccagcaagccaagggccagctgctggcagccaggcaccagaacatccacgtctcctggagtcagtgaagattgtttgtatctcaatgtgttcatccctcagaatgtggcccctaacgcgtctgtgctggtgttcttccacaacaccatggacagggaggagagtgaaggatggccggctatcgacggctccttcttggctgctgttggcaacctcatcgtggtcactgccagctaccgagtgggtgtcttcggcttcctgagttctgggtccggagaggtgagtggcaactgggggctgctggaccaggtggcggctctgacctgggtgcagacccacatccgaggatttggcggggaccctcggcgcgtgtccctggcagcagaccgtggcggggctgatgtggccagcatccaccttctcacggccagggccaccaactcccaacttttccggagagctgtgctgatgggaggctccgcactctccccggccgccgtcatcagccatgagagggctcagcagcaggcaattgctttggcaaaggaggtcagttgccccatgtcatccagccaagaagtggtgtcctgcctccgccagaagcctgccaatgtcctcaatgatgcccagaccaagctcctggccgtgagtggccctttccactactggggtcctgtgatcgatggccacttcctccgtgagcctccagccagagcactgaagaggtctttacgggtagaggtcgatctgctcattgggagttctcaggacgacgggctcatcaacagagcaaaggctgtgaagcaatttgaggaaagtcgaggccggaccagtagcaaaacagccttttaccaggcactgcagaattctctgggtggcgaggactcagatgcccgcgtcgaggctgctgctacatggtattactctctggagcactccacggatgactatgcctccttctcccgggctctggagaatgccacccgggactactttatcatctgccctataatcgacatggccagtgcctgggcaaagagggcccgaggaaacgtcttcatgtaccatgctcctgaaaactacggccatggcagcctggagctgctggcggatgttcagtttgccttggggcttcccttctacccagcctacgaggggcagttttctctggaggagaagagcctgtcgctgaaaatcatgcagtacttttcccacttcatcagatcaggggtaacctcggtaccgagcttg

SEQ ID NO: 447616 - DNA, 7680 bp, Homo sapiens
catctcagtcgacttagagacccccctggttgttcatcagagggattgaagtgtatggaccgccagctgggaagccaaagcgatgtccaaggagctgtgaaataagaaatcgtcgtcttctccacggggtgggagataagtcaccaccccagtgttctgcggagggagagtttatgcctgtccagtgcaaatttgtcaacaccacagacatgatgatttttgatctggtccacagctacaacaggtttccagatgcatttgtgaccttcagttccttccagaggaggttccctgaggtatctgggtattgccactgtgctgacagccaagggcgggaactggctgagacaggtttggagttgttactggatgaaatttatgacaccatttttgctggcctggaccttccttccaccttcactgaaaccaccctgtaccggatactgcagagacggttcctcgcagttcaatcagtcatctctggcagattccgatgccccacaaaatgtgaagtggagcggtttacagcaaccagctttggtcacccctatgttccaagctgccgccgaaatggcgactatcaggcggtgcagtgccagacggaagggccctgctggtgtgtggacgcccaggggaaggaaatgcatggaacccggcagcaaggggagccgccatcttgtgctgaaggccaatcttgtgcctccgaaaggcagcaggccttgtccagactctactttgggacctcaggctacttcagccagcacgacctgttctcttccccagagaaaagatgggcctctccaagagtagccagatttgccacatcctgcccacccacgatcaaggagctctttgtggactctgggcttctccgcccaatggtggagggacagagccaacagttttctgtctcagaaaatcttctcaaagaagccatccgagcaatttttccctcccgagggctggctcgtcttgcccttcagtttaccaccaacccaaagagactccagcaaaacctttttggagggaaatttttggtgaatgttggccagtttaacttgtctggagcccttggcacaagaggcacatttaacttcagtcaatttttccagcaacttggtcttgcaagcttcttgaatggagggagacaagaagatttggccaagccactctctgtgggattagattcaaattcttccacaggaacccctgaagctgctaagaaggatggtactatgaataagccaactgtgggcagctttggctttgaaattaacctacaagagaaccaaaatgccctcaaattccttgcttctctcctggagcttccagaattccttctcttcttgcaacatgctatctctgtgccagaagatgtggcaagagatttaggtgatgtgatggaaacggtactcagctcccagacctgtgagcagacacctgaaaggctatttgtcccatcatgcacgacagaaggaagctatgaggatgtccaatgcttttccggagagtgctggtgtgtgaattcctggggcaaagagcttccaggctcaagagtcagaggtggacagccaaggtgccccacagactgtgaaaagcaaagggctcgcatgcaaagcctcatgggcagccagcctgctggctccaccttgtttgtccctgcttgtactagtgagggacatttcctgcctgtccagtgcttcaactcagagtgctactgtgttgatgctgagggtcaggccattcctggaactcgaagtgcaatagggaagcccaagaaatgccccacgccctgtcaattacagtctgagcaagctttcctcaggacggtgcaggccctgctctctaactccagcatgctacccaccctttccgacacctacatcccacagtgcagcaccgatgggcagtggagacaagtgcaatgcaatgggcctcctgagcaggtcttcgagttgtaccaacgatgggaggctcagaacaagggccaggatctgacgcctgccaagctgctagtgaagatcatgagctacagagaagcagcttccggaaacttcagtctctttattcaaagtctgtatgaggctggccagcaagatgtcttcccggtgctgtcacaatacccttctctgcaagatgtcccactagcagcactggaagggaaacggccccagcccagggagaatatcctcctggagccctacctcttctggcagatcttaaatggccaactcagccaatacccggggtcctactcagacttcagcactcctttggcacattttgatcttcggaactgctggtgtgtggatgaggctggccaagaactggaaggaatgcggtctgagccaagcaagctcccaacatgtcctggctcctgtgaggaagcaaagctccgtgtactgcagttcattagggaaacggaagagattgtttcagcttccaacagttctcggttccctctgggggagagtttcctggtggccaagggaatccggctgaggaatgaggacctcggccttcctccgctcttcccgccccgggaggctttcgcggagcagtttctgcgtgggagtgattacgccattcgcctggcggctcagtctaccttaagcttctatcagagacgccgcttttccccggacgactcggctggagcatccgcccttctgcggtcgggcccctacatgccacagtgtgatgcgtttggaagttgggagcctgtgcagtgccacgctgggactgggcactgctggtgtgtagatgagaaaggagggttcatccctggctcactgactgcccgctctctgcagattccacagtgcccgacaacctgcgagaaatctcgaaccagtgggctgctttccagttggaaacaggctagatcccaagaaaacccatctccaaaagacctgttcgtcccagcctgcctagaaacaggagagtatgccaggctgcaggcatcgggggctggcacctggtgtgtggaccctgcatcaggagaagagttgcggcctggctcgagcagcagtgcccagtgcccaagcctctgcaatgtgctcaagagtggagtcctctccaggagagtcagcccaggctatgtcccagcctgcagggcagaggatgggggcttttccccagtgcaatgtgaccaggcccagggcagctgctggtgtgtcatggacagcggagaagaggtgcctgggacgcgcgtgaccgggggccagcccgcctgtgagagcccgcggtgtccgctgccattcaacgcgtcggaggtggttggtggaacaatcctgtgtgagacaatctcgggccccacaggctctgccatgcagcagtgccaattgctgtgccgccagggctcctggagcgtgtttccaccagggccattgatatgtagcctggagagcggacgctgggagtcacagctgcctcagccccgggcctgccaacggccccagctgtggcagaccatccagacccaagggcactttcagctccagctcccgccgggcaagatgtgcagtgctgactacgcggatttgctgcagactttccaggttttcatattggatgagctgacagcccgcggcttctgccagatccaggtgaagacttttggcaccctggtttccattcctgtctgcaacaactcctctgtgcaggtgggttgtctgaccagggagcgtttaggagtgaatgttacatggaaatcacggcttgaggacatcccagtggcttctcttcctgacttacatgacattgagagagccttggtgggcaaggatctccttgggcgcttcacagatctgatccagagtggctcattccagcttcatctggactccaagacgttcccagcggaaaccatccgcttcctccaaggggaccactttggcacctctcccaggacatggtttgggtgctcggaaggattctaccaagtcttgacaagtgaggccagtcaggacggactgggatgcgttaagtgtcctgaaggaagctattcccaagatgaggaatgcattccttgtcctgttggattctaccaagaacaggcagggagcttggcctgtgtcccatgtcctgtgggcagaacgaccatttctgctggagctttcagccagactcactgtgtcactgactgtcagaggaacgaagcaggcctgcaatgtgaccagaatggccagtatcgagccagccagaaggacaggggcagtgggaaggccttctgtgtggacggcgaggggcggaggctgccatggtgggaaacagaggcccctcttgaggactcacagtgtttgatgatgcagaagtttgagaaggttccagaatcaaaggtgatcttcgacgccaatgctcctgtggctgtcagatccaaagttcctgattctgagttccccgtgatgcagtgcttgacagattgcacagaggacgaggcctgcagcttcttcaccgtgtccacgacggagccagagatttcctgtgatttctatgcttggacaagtgacaatgttgcctgcatgacttctgaccagaaacgagatgcactggggaactcaaaggccaccagctttggaagtcttcgctgccaggtgaaagtgaggagccatggtcaagattctccagctgtgtatttgaaaaagggccaaggatccaccacaacacttcagaaacgctttgaacccactggtttccaaaacatgctttctggattgtacaaccccattgtgttctcagcctcaggagccaatctaaccgatgctcacctcttctgtcttcttgcatgcgaccgtgatctgtgttgcgatggcttcgtcctcacacaggttcaaggaggtgccatcatctgtgggttgctgagctcacccagtgtcctgctttgtaatgtcaaagactggatggatccctctgaagcctgggctaatgctacatgtcctggtgtgacatatgaccaggagagccaccaggtgatattgcgtcttggagaccaggagttcatcaagagtctgacacccttagaaggaactcaagacacctttaccaattttcagcaggtttatctctggaaagattctgacatggggtctcggcctgagtctatgggatgtagaaaagacacagtgccaaggccagcatctccaacagaagcaggtttgacaacagaacttttctcccctgtggacctcaaccaggtcattgtcaatggaaatcaatcactatccagccagaagcactggcttttcaagcacctgttttcagcccagcaggcaaacctatggtgcctttctcgttgtgtgcaggagcactctttctgtcagctcgcagagataacagagagtgcatccttgtacttcacctgcaccctctacccagaggcacaggtgtgtgatgacatcatggagtccaatgcccagggctgcagactgatcctgcctcagatgccaaaggccctgttccggaagaaagttatactggaagataaagtgaagaacttttacactcgcctgccgttccaaaaactgatggggatatccattagaaataaagtgcccatgtctgaaaaatctatttctaatgggttctttgaatgtgaacgacggtgcgatgcggacccatgctgcactggctttggatttctaaatgtttcccagttaaaaggaggagaggtgacatgtctcactctgaacagcttgggaattcagatgtgcagtgaggagaatggaggagcctggcgcattttggactgtggctctcctgacattgaagtccacacctatcccttcggatggtaccagaagcccattgctcaaaataatgctcccagtttttgccctttggttgttctgccttccctcacagagaaagtgtctctggactcgtggcagtccctggccctctcttcagtggttgttgatccatccattaggcactttgatgttgcccatgtcagcactgctgccaccagcaatttctctgctgtccgagacctctgtttgtcggaatgttcccaacatgaggcctgtctcatcaccactctgcaaacccaacctggggctgtgagatgtatgttctatgctgatactcaaagctgcacacatagtctgcagggtcagaactgccgacttctgcttcgtgaagaggccacccacatctaccggaagccaggaatctctctgctcagctatgaggcatctgtaccttctgtgcccatttccacccatggccggctgctgggcaggtcccaggccatccaggtgggtacctcatggaagcaagtggaccagttccttggagttccatatgctgccccgcccctggcagagaggcgcttccaggcaccagagcccttgaactggacaggctcctgggatgccagcaagccaagggccagctgctggcagccaggcaccagaacatccacgtctcctggagtcagtgaagattgtttgtatctcaatgtgttcatccctcagaatgtggcccctaacgcgtctgtgctggtgttcttccacaacaccatggacagggaggagagtgaaggatggccggctatcgacggctccttcttggctgctgttggcaacctcatcgtggtcactgccagctaccgagtgggtgtcttcggcttcctgagttctgggtccggagaggtgagtggcaactgggggctgctggaccaggtggcggctctgacctgggtgcagacccacatccgaggatttggcggggaccctcggcgcgtgtccctggcagcagaccgtggcggggctgatgtggccagcatccaccttctcacggccagggccaccaactcccaacttttccggagagctgtgctgatgggaggctccgcactctccccggccgccgtcatcagccatgagagggctcagcagcaggcaattgctttggcaaaggaggtcagttgccccatgtcatccagccaagaagtggtgtcctgcctccgccagaagcctgccaatgtcctcaatgatgcccagaccaagctcctggccgtgagtggccctttccactactggggtcctgtgatcgatggccacttcctccgtgagcctccagccagagcactgaagaggtctttacgggtagaggtcgatctgctcattgggagttctcaggacgacgggctcatcaacagagcaaaggctgtgaagcaatttgaggaaagtcgaggccggaccagtagcaaaacagccttttaccaggcactgcagaattctctgggtggcgaggactcagatgcccgcgtcgaggctgctgctacatggtattactctctggagcactccacggatgactatgcctccttctcccgggctctggagaatgccacccgggactactttatcatctgccctataatcgacatggccagtgcctgggcaaagagggcccgaggaaacgtcttcatgtaccatgctcctgaaaactacggccatggcagcctggagctgctggcggatgttcagtttgccttggggcttcccttctacccagcctacgaggggcagttttctctggaggagaagagcctgtcgctgaaaatcatgcagtacttttcccacttcatcagatcaggtgaaatcccactactatcacaagaacagcacgggaaagacctggccccatgactattacctcccatcaggtccctcc

SEQ ID NO: 447617 - DNA, 7883 bp, Homo sapiens
catctcagtcgacttagagacccccctggttgttcatcagagggattgaagtgtatggaccgccagctgggaagccaaagcgatgtccaaggagctgtgaaataagaaatcgtcgtcttctccacggggtgggagataagtcaccaccccagtgttctgcggagggagagtttatgcctgtccagtgcaaatttgtcaacaccacagacatgatgatttttgatctggtccacagctacaacaggtttccagatgcatttgtgaccttcagttccttccagaggaggttccctgaggtatctgggtattgccactgtgctgacagccaagggcgggaactggctgagacaggtttggagttgttactggatgaaatttatgacaccatttttgctggcctggaccttccttccaccttcactgaaaccaccctgtaccggatactgcagagacggttcctcgcagttcaatcagtcatctctggcagattccgatgccccacaaaatgtgaagtggagcggtttacagcaaccagctttggtcacccctatgttccaagctgccgccgaaatggcgactatcaggcggtgcagtgccagacggaagggccctgctggtgtgtggacgcccaggggaaggaaatgcatggaacccggcagcaaggggagccgccatcttgtgctgaaggccaatcttgtgcctccgaaaggcagcaggccttgtccagactctactttgggacctcaggctacttcagccagcacgacctgttctcttccccagagaaaagatgggcctctccaagagtagccagatttgccacatcctgcccacccacgatcaaggagctctttgtggactctgggcttctccgcccaatggtggagggacagagccaacagttttctgtctcagaaaatcttctcaaagaagccatccgagcaatttttccctcccgagggctggctcgtcttgcccttcagtttaccaccaacccaaagagactccagcaaaacctttttggagggaaatttttggtgaatgttggccagtttaacttgtctggagcccttggcacaagaggcacatttaacttcagtcaatttttccagcaacttggtcttgcaagcttcttgaatggagggagacaagaagatttggccaagccactctctgtgggattagattcaaattcttccacaggaacccctgaagctgctaagaaggatggtactatgaataagccaactgtgggcagctttggctttgaaattaacctacaagagaaccaaaatgccctcaaattccttgcttctctcctggagcttccagaattccttctcttcttgcaacatgctatctctgtgccagaagatgtggcaagagatttaggtgatgtgatggaaacggtactcagctcccagacctgtgagcagacacctgaaaggctatttgtcccatcatgcacgacagaaggaagctatgaggatgtccaatgcttttccggagagtgctggtgtgtgaattcctggggcaaagagcttccaggctcaagagtcagaggtggacagccaaggtgccccacagactgtgaaaagcaaagggctcgcatgcaaagcctcatgggcagccagcctgctggctccaccttgtttgtccctgcttgtactagtgagggacatttcctgcctgtccagtgcttcaactcagagtgctactgtgttgatgctgagggtcaggccattcctggaactcgaagtgcaatagggaagcccaagaaatgccccacgccctgtcaattacagtctgagcaagctttcctcaggacggtgcaggccctgctctctaactccagcatgctacccaccctttccgacacctacatcccacagtgcagcaccgatgggcagtggagacaagtgcaatgcaatgggcctcctgagcaggtcttcgagttgtaccaacgatgggaggctcagaacaagggccaggatctgacgcctgccaagctgctagtgaagatcatgagctacagagaagcagcttccggaaacttcagtctctttattcaaagtctgtatgaggctggccagcaagatgtcttcccggtgctgtcacaatacccttctctgcaagatgtcccactagcagcactggaagggaaacggccccagcccagggagaatatcctcctggagccctacctcttctggcagatcttaaatggccaactcagccaatacccggggtcctactcagacttcagcactcctttggcacattttgatcttcggaactgctggtgtgtggatgaggctggccaagaactggaaggaatgcggtctgagccaagcaagctcccaacatgtcctggctcctgtgaggaagcaaagctccgtgtactgcagttcattagggaaacggaagagattgtttcagcttccaacagttctcggttccctctgggggagagtttcctggtggccaagggaatccggctgaggaatgaggacctcggccttcctccgctcttcccgccccgggaggctttcgcggagcagtttctgcgtgggagtgattacgccattcgcctggcggctcagtctaccttaagcttctatcagagacgccgcttttccccggacgactcggctggagcatccgcccttctgcggtcgggcccctacatgccacagtgtgatgcgtttggaagttgggagcctgtgcagtgccacgctgggactgggcactgctggtgtgtagatgagaaaggagggttcatccctggctcactgactgcccgctctctgcagattccacagtgcccgacaacctgcgagaaatctcgaaccagtgggctgctttccagttggaaacaggctagatcccaagaaaacccatctccaaaagacctgttcgtcccagcctgcctagaaacaggagagtatgccaggctgcaggcatcgggggctggcacctggtgtgtggaccctgcatcaggagaagagttgcggcctggctcgagcagcagtgcccagtgcccaagcctctgcaatgtgctcaagagtggagtcctctccaggagagtcagcccaggctatgtcccagcctgcagggcagaggatgggggcttttccccagtgcaatgtgaccaggcccagggcagctgctggtgtgtcatggacagcggagaagaggtgcctgggacgcgcgtgaccgggggccagcccgcctgtgagagcccgcggtgtccgctgccattcaacgcgtcggaggtggttggtggaacaatcctgtgtgagacaatctcgggccccacaggctctgccatgcagcagtgccaattgctgtgccgccagggctcctggagcgtgtttccaccagggccattgatatgtagcctggagagcggacgctgggagtcacagctgcctcagccccgggcctgccaacggccccagctgtggcagaccatccagacccaagggcactttcagctccagctcccgccgggcaagatgtgcagtgctgactacgcggatttgctgcagactttccaggttttcatattggatgagctgacagcccgcggcttctgccagatccaggtgaagacttttggcaccctggtttccattcctgtctgcaacaactcctctgtgcaggtgggttgtctgaccagggagcgtttaggagtgaatgttacatggaaatcacggcttgaggacatcccagtggcttctcttcctgacttacatgacattgagagagccttggtgggcaaggatctccttgggcgcttcacagatctgatccagagtggctcattccagcttcatctggactccaagacgttcccagcggaaaccatccgcttcctccaaggggaccactttggcacctctcccaggacatggtttgggtgctcggaaggattctaccaagtcttgacaagtgaggccagtcaggacggactgggatgcgttaagtgtcctgaaggaagctattcccaagatgaggaatgcattccttgtcctgttggattctaccaagaacaggcagggagcttggcctgtgtcccatgtcctgtgggcagaacgaccatttctgctggagctttcagccagactcactgtgtcactgactgtcagaggaacgaagcaggcctgcaatgtgaccagaatggccagtatcgagccagccagaaggacaggggcagtgggaaggccttctgtgtggacggcgaggggcggaggctgccatggtgggaaacagaggcccctcttgaggactcacagtgtttgatgatgcagaagtttgagaaggttccagaatcaaaggtgatcttcgacgccaatgctcctgtggctgtcagatccaaagttcctgattctgagttccccgtgatgcagtgcttgacagattgcacagaggacgaggcctgcagcttcttcaccgtgtccacgacggagccagagatttcctgtgatttctatgcttggacaagtgacaatgttgcctgcatgacttctgaccagaaacgagatgcactggggaactcaaaggccaccagctttggaagtcttcgctgccaggtgaaagtgaggagccatggtcaagattctccagctgtgtatttgaaaaagggccaaggatccaccacaacacttcagaaacgctttgaacccactggtttccaaaacatgctttctggattgtacaaccccattgtgttctcagcctcaggagccaatctaaccgatgctcacctcttctgtcttcttgcatgcgaccgtgatctgtgttgcgatggcttcgtcctcacacaggttcaaggaggtgccatcatctgtgggttgctgagctcacccagtgtcctgctttgtaatgtcaaagactggatggatccctctgaagcctgggctaatgctacatgtcctggtgtgacatatgaccaggagagccaccaggtgatattgcgtcttggagaccaggagttcatcaagagtctgacacccttagaaggaactcaagacacctttaccaattttcagcaggtttatctctggaaagattctgacatggggtctcggcctgagtctatgggatgtagaaaagacacagtgccaaggccagcatctccaacagaagcaggtttgacaacagaacttttctcccctgtggacctcaaccaggtcattgtcaatggaaatcaatcactatccagccagaagcactggcttttcaagcacctgttttcagcccagcaggcaaacctatggtgcctttctcgttgtgtgcaggagcactctttctgtcagctcgcagagataacagagagtgcatccttgtacttcacctgcaccctctacccagaggcacaggtgtgtgatgacatcatggagtccaatgcccagggctgcagactgatcctgcctcagatgccaaaggccctgttccggaagaaagttatactggaagataaagtgaagaacttttacactcgcctgccgttccaaaaactgatggggatatccattagaaataaagtgcccatgtctgaaaaatctatttctaatgggttctttgaatgtgaacgacggtgcgatgcggacccatgctgcactggctttggatttctaaatgtttcccagttaaaaggaggagaggtgacatgtctcactctgaacagcttgggaattcagatgtgcagtgaggagaatggaggagcctggcgcattttggactgtggctctcctgacattgaagtccacacctatcccttcggatggtaccagaagcccattgctcaaaataatgctcccagtttttgccctttggttgttctgccttccctcacagagaaagtgtctctggactcgtggcagtccctggccctctcttcagtggttgttgatccatccattaggcactttgatgttgcccatgtcagcactgctgccaccagcaatttctctgctgtccgagacctctgtttgtcggaatgttcccaacatgaggcctgtctcatcaccactctgcaaacccaacctggggctgtgagatgtatgttctatgctgatactcaaagctgcacacatagtctgcagggtcagaactgccgacttctgcttcgtgaagaggccacccacatctaccggaagccaggaatctctctgctcagctatgaggcatctgtaccttctgtgcccatttccacccatggccggctgctgggcaggtcccaggccatccaggtgggtacctcatggaagcaagtggaccagttccttggagttccatatgctgccccgcccctggcagagaggcgcttccaggcaccagagcccttgaactggacaggctcctgggatgccagcaagccaagggccagctgctggcagccaggcaccagaacatccacgtctcctggagtcagtgaagattgtttgtatctcaatgtgttcatccctcagaatgtggcccctaacgcgtctgtgctggtgttcttccacaacaccatggacagggaggagagtgaaggatggccggctatcgacggctccttcttggctgctgttggcaacctcatcgtggtcactgccagctaccgagtgggtgtcttcggcttcctgagttctgggtccggagaggtgagtggcaactgggggctgctggaccaggtggcggctctgacctgggtgcagacccacatccgaggatttggcggggaccctcggcgcgtgtccctggcagcagaccgtggcggggctgatgtggccagcatccaccttctcacggccagggccaccaactcccaacttttccggagagctgtgctgatgggaggctccgcactctccccggccgccgtcatcagccatgagagggctcagcagcaggcaattgctttggcaaaggaggtcagttgccccatgtcatccagccaagaagtggtgtcctgcctccgccagaagcctgccaatgtcctcaatgatgcccagaccaagctcctggccgtgagtggccctttccactactggggtcctgtgatcgatggccacttcctccgtgagcctccagccagagcactgaagaggtctttacgggtagaggtcgatctgctcattgggagttctcaggacgacgggctcatcaacagagcaaaggctgtgaagcaatttgaggaaagtcgaggccggaccagtagcaaaacagccttttaccaggcactgcagaattctctgggtggcgaggactcagatgcccgcgtcgaggctgctgctacatggtattactctctggagcactccacggatgactatgcctccttctcccgggctctggagaatgccacccgggactactttatcatctgccctataatcgacatggccagtgcctgggcaaagagggcccgaggaaacgtcttcatgtaccatgctcctgaaaactacggccatggcagaaatcccaactacccttatgagttctcacggaaagtacccacatttgcaaccccctggcctgactttgtaccccgtgctggtggagagaactacaaggagttcagtgagctgctccccaatcgacagggcctgaagaaagccgactgctccttctggtccaagtacatctcgtctctgaagacatctgcagatggagccaagggcgggcagtcagcagagagtgaagaggaggagttgacggctggatctgggctaagagaagatctcctaagcctccaggaaccaggctctaagacctacagcaagtgaccagcccttgagctccccaaaaacctcacccgaggctgcccactatggtcatctttttctctaaaatagccacttaccttcaataaagtatctacatgcggtgaa

SEQ ID NO: 447618 - DNA, 7704 bp, Homo sapiens
catctcagtcgacttagagacccccctggttgttcatcagagggattgaagtgtatggaccgccagctgggaagccaaagcgatgtccaaggagctgtgaaataagaaatcgtcgtcttctccacggggtgggagataagtcaccaccccagtgttctgcggagggagagtttatgcctgtccagtgcaaatttgtcaacaccacagacatgatgatttttgatctggtccacagctacaacaggtttccagatgcatttgtgaccttcagttccttccagaggaggttccctgaggtatctgggtattgccactgtgctgacagccaagggcgggaactggctgagacaggtttggagttgttactggatgaaatttatgacaccatttttgctggcctggaccttccttccaccttcactgaaaccaccctgtaccggatactgcagagacggttcctcgcagttcaatcagtcatctctggcagattccgatgccccacaaaatgtgaagtggagcggtttacagcaaccagctttggtcacccctatgttccaagctgccgccgaaatggcgactatcaggcggtgcagtgccagacggaagggccctgctggtgtgtggacgcccaggggaaggaaatgcatggaacccggcagcaaggggagccgccatcttgtgctgaaggccaatcttgtgcctccgaaaggcagcaggccttgtccagactctactttgggacctcaggctacttcagccagcacgacctgttctcttccccagagaaaagatgggcctctccaagagtagccagatttgccacatcctgcccacccacgatcaaggagctctttgtggactctgggcttctccgcccaatggtggagggacagagccaacagttttctgtctcagaaaatcttctcaaagaagccatccgagcaatttttccctcccgagggctggctcgtcttgcccttcagtttaccaccaacccaaagagactccagcaaaacctttttggagggaaatttttggtgaatgttggccagtttaacttgtctggagcccttggcacaagaggcacatttaacttcagtcaatttttccagcaacttggtcttgcaagcttcttgaatggagggagacaagaagatttggccaagccactctctgtgggattagattcaaattcttccacaggaacccctgaagctgctaagaaggatggtactatgaataagccaactgtgggcagctttggctttgaaattaacctacaagagaaccaaaatgccctcaaattccttgcttctctcctggagcttccagaattccttctcttcttgcaacatgctatctctgtgccagaagatgtggcaagagatttaggtgatgtgatggaaacggtactcagctcccagacctgtgagcagacacctgaaaggctatttgtcccatcatgcacgacagaaggaagctatgaggatgtccaatgcttttccggagagtgctggtgtgtgaattcctggggcaaagagcttccaggctcaagagtcagaggtggacagccaaggtgccccacagactgtgaaaagcaaagggctcgcatgcaaagcctcatgggcagccagcctgctggctccaccttgtttgtccctgcttgtactagtgagggacatttcctgcctgtccagtgcttcaactcagagtgctactgtgttgatgctgagggtcaggccattcctggaactcgaagtgcaatagggaagcccaagaaatgccccacgccctgtcaattacagtctgagcaagctttcctcaggacggtgcaggccctgctctctaactccagcatgctacccaccctttccgacacctacatcccacagtgcagcaccgatgggcagtggagacaagtgcaatgcaatgggcctcctgagcaggtcttcgagttgtaccaacgatgggaggctcagaacaagggccaggatctgacgcctgccaagctgctagtgaagatcatgagctacagagaagcagcttccggaaacttcagtctctttattcaaagtctgtatgaggctggccagcaagatgtcttcccggtgctgtcacaatacccttctctgcaagatgtcccactagcagcactggaagggaaacggccccagcccagggagaatatcctcctggagccctacctcttctggcagatcttaaatggccaactcagccaatacccggggtcctactcagacttcagcactcctttggcacattttgatcttcggaactgctggtgtgtggatgaggctggccaagaactggaaggaatgcggtctgagccaagcaagctcccaacatgtcctggctcctgtgaggaagcaaagctccgtgtactgcagttcattagggaaacggaagagattgtttcagcttccaacagttctcggttccctctgggggagagtttcctggtggccaagggaatccggctgaggaatgaggacctcggccttcctccgctcttcccgccccgggaggctttcgcggagcagtttctgcgtgggagtgattacgccattcgcctggcggctcagtctaccttaagcttctatcagagacgccgcttttccccggacgactcggctggagcatccgcccttctgcggtcgggcccctacatgccacagtgtgatgcgtttggaagttgggagcctgtgcagtgccacgctgggactgggcactgctggtgtgtagatgagaaaggagggttcatccctggctcactgactgcccgctctctgcagattccacagtgcccgacaacctgcgagaaatctcgaaccagtgggctgctttccagttggaaacaggctagatcccaagaaaacccatctccaaaagacctgttcgtcccagcctgcctagaaacaggagagtatgccaggctgcaggcatcgggggctggcacctggtgtgtggaccctgcatcaggagaagagttgcggcctggctcgagcagcagtgcccagtgcccaagcctctgcaatgtgctcaagagtggagtcctctccaggagagtcagcccaggctatgtcccagcctgcagggcagaggatgggggcttttccccagtgcaatgtgaccaggcccagggcagctgctggtgtgtcatggacagcggagaagaggtgcctgggacgcgcgtgaccgggggccagcccgcctgtgagagcccgcggtgtccgctgccattcaacgcgtcggaggtggttggtggaacaatcctgtgtgagacaatctcgggccccacaggctctgccatgcagcagtgccaattgctgtgccgccagggctcctggagcgtgtttccaccagggccattgatatgtagcctggagagcggacgctgggagtcacagctgcctcagccccgggcctgccaacggccccagctgtggcagaccatccagacccaagggcactttcagctccagctcccgccgggcaagatgtgcagtgctgactacgcggatttgctgcagactttccaggttttcatattggatgagctgacagcccgcggcttctgccagatccaggtgaagacttttggcaccctggtttccattcctgtctgcaacaactcctctgtgcaggtgggttgtctgaccagggagcgtttaggagtgaatgttacatggaaatcacggcttgaggacatcccagtggcttctcttcctgacttacatgacattgagagagccttggtgggcaaggatctccttgggcgcttcacagatctgatccagagtggctcattccagcttcatctggactccaagacgttcccagcggaaaccatccgcttcctccaaggggaccactttggcacctctcccaggacatggtttgggtgctcggaaggattctaccaagtcttgacaagtgaggccagtcaggacggactgggatgcgttaagtgtcctgaaggaagctattcccaagatgaggaatgcattccttgtcctgttggattctaccaagaacaggcagggagcttggcctgtgtcccatgtcctgtgggcagaacgaccatttctgctggagctttcagccagactcactgtgtcactgactgtcagaggaacgaagcaggcctgcaatgtgaccagaatggccagtatcgagccagccagaaggacaggggcagtgggaaggccttctgtgtggacggcgaggggcggaggctgccatggtgggaaacagaggcccctcttgaggactcacagtgtttgatgatgcagaagtttgagaaggttccagaatcaaaggtgatcttcgacgccaatgctcctgtggctgtcagatccaaagttcctgattctgagttccccgtgatgcagtgcttgacagattgcacagaggacgaggcctgcagcttcttcaccgtgtccacgacggagccagagatttcctgtgatttctatgcttggacaagtgacaatgttgcctgcatgacttctgaccagaaacgagatgcactggggaactcaaaggccaccagctttggaagtcttcgctgccaggtgaaagtgaggagccatggtcaagattctccagctgtgtatttgaaaaagggccaaggatccaccacaacacttcagaaacgctttgaacccactggtttccaaaacatgctttctggattgtacaaccccattgtgttctcagcctcaggagccaatctaaccgatgctcacctcttctgtcttcttgcatgcgaccgtgatctgtgttgcgatggcttcgtcctcacacaggttcaaggaggtgccatcatctgtgggttgctgagctcacccagtgtcctgctttgtaatgtcaaagactggatggatccctctgaagcctgggctaatgctacatgtcctggtgtgacatatgaccaggagagccaccaggtgatattgcgtcttggagaccaggagttcatcaagagtctgacacccttagaaggaactcaagacacctttaccaattttcagcaggtttatctctggaaagattctgacatggggtctcggcctgagtctatgggatgtagaaaagacacagtgccaaggccagcatctccaacagaagcaggtttgacaacagaacttttctcccctgtggacctcaaccaggtcattgtcaatggaaatcaatcactatccagccagaagcactggcttttcaagcacctgttttcagcccagcaggcaaacctatggtgcctttctcgttgtgtgcaggagcactctttctgtcagctcgcagagataacagagagtgcatccttgtacttcacctgcaccctctacccagaggcacaggtgtgtgatgacatcatggagtccaatgcccagggctgcagactgatcctgcctcagatgccaaaggccctgttccggaagaaagttatactggaagataaagtgaagaacttttacactcgcctgccgttccaaaaactgatggggatatccattagaaataaagtgcccatgtctgaaaaatctatttctaatgggttctttgaatgtgaacgacggtgcgatgcggacccatgctgcactggctttggatttctaaatgtttcccagttaaaaggaggagaggtgacatgtctcactctgaacagcttgggaattcagatgtgcagtgaggagaatggaggagcctggcgcattttggactgtggctctcctgacattgaagtccacacctatcccttcggatggtaccagaagcccattgctcaaaataatgctcccagtttttgccctttggttgttctgccttccctcacagagaaagtgtctctggactcgtggcagtccctggccctctcttcagtggttgttgatccatccattaggcactttgatgttgcccatgtcagcactgctgccaccagcaatttctctgctgtccgagacctctgtttgtcggaatgttcccaacatgaggcctgtctcatcaccactctgcaaacccaacctggggctgtgagatgtatgttctatgctgatactcaaagctgcacacatagtctgcagggtcagaactgccgacttctgcttcgtgaagaggccacccacatctaccggaagccaggaatctctctgctcagctatgaggcatctgtaccttctgtgcccatttccacccatggccggctgctgggcaggtcccaggccatccaggtgggtacctcatggaagcaagtggaccagttccttggagttccatatgctgccccgcccctggcagagaggcgcttccaggcaccagagcccttgaactggacaggctcctgggatgccagcaagccaagggccagctgctggcagccaggcaccagaacatccacgtctcctggagtcagtgaagattgtttgtatctcaatgtgttcatccctcagaatgtggcccctaacgcgtctgtgctggtgttcttccacaacaccatggacagggaggagagtgaaggatggccggctatcgacggctccttcttggctgctgttggcaacctcatcgtggtcactgccagctaccgagtgggtgtcttcggcttcctgagttctgggtccggagaggtgagtggcaactgggggctgctggaccaggtggcggctctgacctgggtgcagacccacatccgaggatttggcggggaccctcggcgcgtgtccctggcagcagaccgtggcggggctgatgtggccagcatccaccttctcacggccagggccaccaactcccaacttttccggagagctgtgctgatgggaggctccgcactctccccggccgccgtcatcagccatgagagggctcagcagcaggcaattgctttggcaaaggaggtcagttgccccatgtcatccagccaagaagtggtgtcctgcctccgccagaagcctgccaatgtcctcaatgatgcccagaccaagctcctggccgtgagtggccctttccactactggggtcctgtgatcgatggccacttcctccgtgagcctccagccagagcactgaagaggtctttacgggtagaggtcgatctgctcattgggagttctcaggacgacgggctcatcaacagagcaaaggctgtgaagcaatttgaggaaagtcgaggccggaccagtagcaaaacagccttttaccaggcactgcagaattctctgggtggcgaggactcagatgcccgcgtcgaggctgctgctacatggtattactctctggagcactccacggatgactatgcctccttctcccgggctctggagaatgccacccggtaagctaagctgcaggagggtgcagattcctactgctatgttttggagcagactcagttggtgttcaggtcatgaatgagaaataaaggcacgtggctttgtgcttgaggtttcctctgcatcattcattcagcctacagcatggggagtgtccctgctgaggggaagccctggaggacatgtagggtggaccctgctgccaggaaaccccaagccaatgagagaaatgagggggtgactctggctcttcctgggccatgagggagctgtcggagggcagagacgaagcacttgccagaagtgcctggtgcacgctccacctgaagcagccgctcagcaaatg

SEQ ID NO: 447619 - DNA, 7258 bp, Homo sapiens
catctcagtcgacttagagacccccctggttgttcatcagagggattgaagtgtatggaccgccagctgggaagccaaagcgatgtccaaggagctgtgaaataagaaatcgtcgtcttctccacggggtgggagataagtcaccaccccagtgttctgcggagggagagtttatgcctgtccagtgcaaatttgtcaacaccacagacatgatgatttttgatctggtccacagctacaacaggtttccagatgcatttgtgaccttcagttccttccagaggaggttccctgaggtatctgggtattgccactgtgctgacagccaagggcgggaactggctgagacaggtttggagttgttactggatgaaatttatgacaccatttttgctggcctggaccttccttccaccttcactgaaaccaccctgtaccggatactgcagagacggttcctcgcagttcaatcagtcatctctggcagattccgatgccccacaaaatgtgaagtggagcggtttacagcaaccagctttggtcacccctatgttccaagctgccgccgaaatggcgactatcaggcggtgcagtgccagacggaagggccctgctggtgtgtggacgcccaggggaaggaaatgcatggaacccggcagcaaggggagccgccatcttgtgctgaaggccaatcttgtgcctccgaaaggcagcaggccttgtccagactctactttgggacctcaggctacttcagccagcacgacctgttctcttccccagagaaaagatgggcctctccaagagtagccagatttgccacatcctgcccacccacgatcaaggagctctttgtggactctgggcttctccgcccaatggtggagggacagagccaacagttttctgtctcagaaaatcttctcaaagaagccatccgagcaatttttccctcccgagggctggctcgtcttgcccttcagtttaccaccaacccaaagagactccagcaaaacctttttggagggaaatttttggtgaatgttggccagtttaacttgtctggagcccttggcacaagaggcacatttaacttcagtcaatttttccagcaacttggtcttgcaagcttcttgaatggagggagacaagaagatttggccaagccactctctgtgggattagattcaaattcttccacaggaacccctgaagctgctaagaaggatggtactatgaataagccaactgtgggcagctttggctttgaaattaacctacaagagaaccaaaatgccctcaaattccttgcttctctcctggagcttccagaattccttctcttcttgcaacatgctatctctgtgccagaagatgtggcaagagatttaggtgatgtgatggaaacggtactcagctcccagacctgtgagcagacacctgaaaggctatttgtcccatcatgcacgacagaaggaagctatgaggatgtccaatgcttttccggagagtgctggtgtgtgaattcctggggcaaagagcttccaggctcaagagtcagaggtggacagccaaggtgccccacagactgtgaaaagcaaagggctcgcatgcaaagcctcatgggcagccagcctgctggctccaccttgtttgtccctgcttgtactagtgagggacatttcctgcctgtccagtgcttcaactcagagtgctactgtgttgatgctgagggtcaggccattcctggaactcgaagtgcaatagggaagcccaagaaatgccccacgccctgtcaattacagtctgagcaagctttcctcaggacggtgcaggccctgctctctaactccagcatgctacccaccctttccgacacctacatcccacagtgcagcaccgatgggcagtggagacaagtgcaatgcaatgggcctcctgagcaggtcttcgagttgtaccaacgatgggaggctcagaacaagggccaggatctgacgcctgccaagctgctagtgaagatcatgagctacagagaagcagcttccggaaacttcagtctctttattcaaagtctgtatgaggctggccagcaagatgtcttcccggtgctgtcacaatacccttctctgcaagatgtcccactagcagcactggaagggaaacggccccagcccagggagaatatcctcctggagccctacctcttctggcagatcttaaatggccaactcagccaatacccggggtcctactcagacttcagcactcctttggcacattttgatcttcggaactgctggtgtgtggatgaggctggccaagaactggaaggaatgcggtctgagccaagcaagctcccaacatgtcctggctcctgtgaggaagcaaagctccgtgtactgcagttcattagggaaacggaagagattgtttcagcttccaacagttctcggttccctctgggggagagtttcctggtggccaagggaatccggctgaggaatgaggacctcggccttcctccgctcttcccgccccgggaggctttcgcggagcagtttctgcgtgggagtgattacgccattcgcctggcggctcagtctaccttaagcttctatcagagacgccgcttttccccggacgactcggctggagcatccgcccttctgcggtcgggcccctacatgccacagtgtgatgcgtttggaagttgggagcctgtgcagtgccacgctgggactgggcactgctggtgtgtagatgagaaaggagggttcatccctggctcactgactgcccgctctctgcagattccacagtgcccgacaacctgcgagaaatctcgaaccagtgggctgctttccagttggaaacaggctagatcccaagaaaacccatctccaaaagacctgttcgtcccagcctgcctagaaacaggagagtatgccaggctgcaggcatcgggggctggcacctggtgtgtggaccctgcatcaggagaagagttgcggcctggctcgagcagcagtgcccagtgcccaagcctctgcaatgtgctcaagagtggagtcctctccaggagagtcagcccaggctatgtcccagcctgcagggcagaggatgggggcttttccccagtgcaatgtgaccaggcccagggcagctgctggtgtgtcatggacagcggagaagaggtgcctgggacgcgcgtgaccgggggccagcccgcctgtgagagcccgcggtgtccgctgccattcaacgcgtcggaggtggttggtggaacaatcctgtgtgagacaatctcgggccccacaggctctgccatgcagcagtgccaattgctgtgccgccagggctcctggagcgtgtttccaccagggccattgatatgtagcctggagagcggacgctgggagtcacagctgcctcagccccgggcctgccaacggccccagctgtggcagaccatccagacccaagggcactttcagctccagctcccgccgggcaagatgtgcagtgctgactacgcggatttgctgcagactttccaggttttcatattggatgagctgacagcccgcggcttctgccagatccaggtgaagacttttggcaccctggtttccattcctgtctgcaacaactcctctgtgcaggtgggttgtctgaccagggagcgtttaggagtgaatgttacatggaaatcacggcttgaggacatcccagtggcttctcttcctgacttacatgacattgagagagccttggtgggcaaggatctccttgggcgcttcacagatctgatccagagtggctcattccagcttcatctggactccaagacgttcccagcggaaaccatccgcttcctccaaggggaccactttggcacctctcccaggacatggtttgggtgctcggaaggattctaccaagtcttgacaagtgaggccagtcaggacggactgggatgcgttaagtgtcctgaaggaagctattcccaagatgaggaatgcattccttgtcctgttggattctaccaagaacaggcagggagcttggcctgtgtcccatgtcctgtgggcagaacgaccatttctgctggagctttcagccagactcactgtgtcactgactgtcagaggaacgaagcaggcctgcaatgtgaccagaatggccagtatcgagccagccagaaggacaggggcagtgggaaggccttctgtgtggacggcgaggggcggaggctgccatggtgggaaacagaggcccctcttgaggactcacagtgtttgatgatgcagaagtttgagaaggttccagaatcaaaggtgatcttcgacgccaatgctcctgtggctgtcagatccaaagttcctgattctgagttccccgtgatgcagtgcttgacagattgcacagaggacgaggcctgcagcttcttcaccgtgtccacgacggagccagagatttcctgtgatttctatgcttggacaagtgacaatgttgcctgcatgacttctgaccagaaacgagatgcactggggaactcaaaggccaccagctttggaagtcttcgctgccaggtgaaagtgaggagccatggtcaagattctccagctgtgtatttgaaaaagggccaaggatccaccacaacacttcagaaacgctttgaacccactggtttccaaaacatgctttctggattgtacaaccccattgtgttctcagcctcaggagccaatctaaccgatgctcacctcttctgtcttcttgcatgcgaccgtgatctgtgttgcgatggcttcgtcctcacacaggttcaaggaggtgccatcatctgtgggttgctgagctcacccagtgtcctgctttgtaatgtcaaagactggatggatccctctgaagcctgggctaatgctacatgtcctggtgtgacatatgaccaggagagccaccaggtgatattgcgtcttggagaccaggagttcatcaagagtctgacacccttagaaggaactcaagacacctttaccaattttcagcaggtttatctctggaaagattctgacatggggtctcggcctgagtctatgggatgtagaaaagacacagtgccaaggccagcatctccaacagaagcaggtttgacaacagaacttttctcccctgtggacctcaaccaggtcattgtcaatggaaatcaatcactatccagccagaagcactggcttttcaagcacctgttttcagcccagcaggcaaacctatggtgcctttctcgttgtgtgcaggagcactctttctgtcagctcgcagagataacagagagtgcatccttgtacttcacctgcaccctctacccagaggcacaggtgtgtgatgacatcatggagtccaatgcccagggctgcagactgatcctgcctcagatgccaaaggccctgttccggaagaaagttatactggaagataaagtgaagaacttttacactcgcctgccgttccaaaaactgatggggatatccattagaaataaagtgcccatgtctgaaaaatctatttctaatgggttctttgaatgtgaacgacggtgcgatgcggacccatgctgcactggctttggatttctaaatgtttcccagttaaaaggaggagaggtgacatgtctcactctgaacagcttgggaattcagatgtgcagtgaggagaatggaggagcctggcgcattttggactgtggctctcctgacattgaagtccacacctatcccttcggatggtaccagaagcccattgctcaaaataatgctcccagtttttgccctttggttgttctgccttccctcacagagaaagtgtctctggactcgtggcagtccctggccctctcttcagtggttgttgatccatccattaggcactttgatgttgcccatgtcagcactgctgccaccagcaatttctctgctgtccgagacctctgtttgtcggaatgttcccaacatgaggcctgtctcatcaccactctgcaaacccaacctggggctgtgagatgtatgttctatgctgatactcaaagctgcacacatagtctgcagggtcagaactgccgacttctgcttcgtgaagaggccacccacatctaccggaagccaggaatctctctgctcagctatgaggcatctgtaccttctgtgcccatttccacccatggccggctgctgggcaggtcccaggccatccaggtgggtacctcatggaagcaagtggaccagttccttggagttccatatgctgccccgcccctggcagagaggcgcttccaggcaccagagcccttgaactggacaggctcctgggatgccagcaagccaagggccagctgctggcagccaggcaccagaacatccacgtctcctggagtcagtgaagattgtttgtatctcaatgtgttcatccctcagaatgtggcccctaacgcgtctgtgctggtgttcttccacaacaccatggacagggaggagagtgaaggatggccggctatcgacggctccttcttggctgctgttggcaacctcatcgtggtcactgccagctaccgagtgggtgtcttcggcttcctgagttctgggtccggagaggtgagtggcaactgggggctgctggaccaggtggcggctctgacctgggtgcagacccacatccgaggatttggcggggaccctcggcgcgtgtccctggcagcagaccgtggcggggctgatgtggccagcatccaccttctcacggccagggccaccaactcccaacttttccggagagctgtgctgatggtaagtggtgtgtgttctaccttcagtcttactgcagatgcggctgggggaggtggttctcctggtgctgcaaaagtctagttggcttcaattgcttgggtttcccttgtcctttgtcctgagtgtggatgctgcttggagttttccatgtatgtgtgattccacaatgctgaagagctctcctgacttttttccactcacgtctgaagtgctaaaaattttagatggtgaagtgtttctatttcctgagagtggttcattaggatttagtgatctgaaccatcaattatctctcttgtcaatgcatgatggtaaagaagagaactcactgttcgcaattcttctggatggcctgaagtgccggctacgtgaggctgatgatgatggtgatgaggaggaggatgatggtggta

SEQ ID NO: 447620 - DNA, 6794 bp, Homo sapiens
catctcagtcgacttagagacccccctggttgttcatcagagggattgaagtgtatggaccgccagctgggaagccaaagcgatgtccaaggagctgtgaaataagaaatcgtcgtcttctccacggggtgggagataagtcaccaccccagtgttctgcggagggagagtttatgcctgtccagtgcaaatttgtcaacaccacagacatgatgatttttgatctggtccacagctacaacaggtttccagatgcatttgtgaccttcagttccttccagaggaggttccctgaggtatctgggtattgccactgtgctgacagccaagggcgggaactggctgagacaggtttggagttgttactggatgaaatttatgacaccatttttgctggcctggaccttccttccaccttcactgaaaccaccctgtaccggatactgcagagacggttcctcgcagttcaatcagtcatctctggcagattccgatgccccacaaaatgtgaagtggagcggtttacagcaaccagctttggtcacccctatgttccaagctgccgccgaaatggcgactatcaggcggtgcagtgccagacggaagggccctgctggtgtgtggacgcccaggggaaggaaatgcatggaacccggcagcaaggggagccgccatcttgtgctgaaggccaatcttgtgcctccgaaaggcagcaggccttgtccagactctactttgggacctcaggctacttcagccagcacgacctgttctcttccccagagaaaagatgggcctctccaagagtagccagatttgccacatcctgcccacccacgatcaaggagctctttgtggactctgggcttctccgcccaatggtggagggacagagccaacagttttctgtctcagaaaatcttctcaaagaagccatccgagcaatttttccctcccgagggctggctcgtcttgcccttcagtttaccaccaacccaaagagactccagcaaaacctttttggagggaaatttttggtgaatgttggccagtttaacttgtctggagcccttggcacaagaggcacatttaacttcagtcaatttttccagcaacttggtcttgcaagcttcttgaatggagggagacaagaagatttggccaagccactctctgtgggattagattcaaattcttccacaggaacccctgaagctgctaagaaggatggtactatgaataagccaactgtgggcagctttggctttgaaattaacctacaagagaaccaaaatgccctcaaattccttgcttctctcctggagcttccagaattccttctcttcttgcaacatgctatctctgtgccagaagatgtggcaagagatttaggtgatgtgatggaaacggtactcagctcccagacctgtgagcagacacctgaaaggctatttgtcccatcatgcacgacagaaggaagctatgaggatgtccaatgcttttccggagagtgctggtgtgtgaattcctggggcaaagagcttccaggctcaagagtcagaggtggacagccaaggtgccccacagactgtgaaaagcaaagggctcgcatgcaaagcctcatgggcagccagcctgctggctccaccttgtttgtccctgcttgtactagtgagggacatttcctgcctgtccagtgcttcaactcagagtgctactgtgttgatgctgagggtcaggccattcctggaactcgaagtgcaatagggaagcccaagaaatgccccacgccctgtcaattacagtctgagcaagctttcctcaggacggtgcaggccctgctctctaactccagcatgctacccaccctttccgacacctacatcccacagtgcagcaccgatgggcagtggagacaagtgcaatgcaatgggcctcctgagcaggtcttcgagttgtaccaacgatgggaggctcagaacaagggccaggatctgacgcctgccaagctgctagtgaagatcatgagctacagagaagcagcttccggaaacttcagtctctttattcaaagtctgtatgaggctggccagcaagatgtcttcccggtgctgtcacaatacccttctctgcaagatgtcccactagcagcactggaagggaaacggccccagcccagggagaatatcctcctggagccctacctcttctggcagatcttaaatggccaactcagccaatacccggggtcctactcagacttcagcactcctttggcacattttgatcttcggaactgctggtgtgtggatgaggctggccaagaactggaaggaatgcggtctgagccaagcaagctcccaacatgtcctggctcctgtgaggaagcaaagctccgtgtactgcagttcattagggaaacggaagagattgtttcagcttccaacagttctcggttccctctgggggagagtttcctggtggccaagggaatccggctgaggaatgaggacctcggccttcctccgctcttcccgccccgggaggctttcgcggagcagtttctgcgtgggagtgattacgccattcgcctggcggctcagtctaccttaagcttctatcagagacgccgcttttccccggacgactcggctggagcatccgcccttctgcggtcgggcccctacatgccacagtgtgatgcgtttggaagttgggagcctgtgcagtgccacgctgggactgggcactgctggtgtgtagatgagaaaggagggttcatccctggctcactgactgcccgctctctgcagattccacagtgcccgacaacctgcgagaaatctcgaaccagtgggctgctttccagttggaaacaggctagatcccaagaaaacccatctccaaaagacctgttcgtcccagcctgcctagaaacaggagagtatgccaggctgcaggcatcgggggctggcacctggtgtgtggaccctgcatcaggagaagagttgcggcctggctcgagcagcagtgcccagtgcccaagcctctgcaatgtgctcaagagtggagtcctctccaggagagtcagcccaggctatgtcccagcctgcagggcagaggatgggggcttttccccagtgcaatgtgaccaggcccagggcagctgctggtgtgtcatggacagcggagaagaggtgcctgggacgcgcgtgaccgggggccagcccgcctgtgagagcccgcggtgtccgctgccattcaacgcgtcggaggtggttggtggaacaatcctgtgtgagacaatctcgggccccacaggctctgccatgcagcagtgccaattgctgtgccgccagggctcctggagcgtgtttccaccagggccattgatatgtagcctggagagcggacgctgggagtcacagctgcctcagccccgggcctgccaacggccccagctgtggcagaccatccagacccaagggcactttcagctccagctcccgccgggcaagatgtgcagtgctgactacgcggatttgctgcagactttccaggttttcatattggatgagctgacagcccgcggcttctgccagatccaggtgaagacttttggcaccctggtttccattcctgtctgcaacaactcctctgtgcaggtgggttgtctgaccagggagcgtttaggagtgaatgttacatggaaatcacggcttgaggacatcccagtggcttctcttcctgacttacatgacattgagagagccttggtgggcaaggatctccttgggcgcttcacagatctgatccagagtggctcattccagcttcatctggactccaagacgttcccagcggaaaccatccgcttcctccaaggggaccactttggcacctctcccaggacatggtttgggtgctcggaaggattctaccaagtcttgacaagtgaggccagtcaggacggactgggatgcgttaagtgtcctgaaggaagctattcccaagatgaggaatgcattccttgtcctgttggattctaccaagaacaggcagggagcttggcctgtgtcccatgtcctgtgggcagaacgaccatttctgctggagctttcagccagactcactgtgtcactgactgtcagaggaacgaagcaggcctgcaatgtgaccagaatggccagtatcgagccagccagaaggacaggggcagtgggaaggccttctgtgtggacggcgaggggcggaggctgccatggtgggaaacagaggcccctcttgaggactcacagtgtttgatgatgcagaagtttgagaaggttccagaatcaaaggtgatcttcgacgccaatgctcctgtggctgtcagatccaaagttcctgattctgagttccccgtgatgcagtgcttgacagattgcacagaggacgaggcctgcagcttcttcaccgtgtccacgacggagccagagatttcctgtgatttctatgcttggacaagtgacaatgttgcctgcatgacttctgaccagaaacgagatgcactggggaactcaaaggccaccagctttggaagtcttcgctgccaggtgaaagtgaggagccatggtcaagattctccagctgtgtatttgaaaaagggccaaggatccaccacaacacttcagaaacgctttgaacccactggtttccaaaacatgctttctggattgtacaaccccattgtgttctcagcctcaggagccaatctaaccgatgctcacctcttctgtcttcttgcatgcgaccgtgatctgtgttgcgatggcttcgtcctcacacaggttcaaggaggtgccatcatctgtgggttgctgagctcacccagtgtcctgctttgtaatgtcaaagactggatggatccctctgaagcctgggctaatgctacatgtcctggtgtgacatatgaccaggagagccaccaggtgatattgcgtcttggagaccaggagttcatcaagagtctgacacccttagaaggaactcaagacacctttaccaattttcagcaggtttatctctggaaagattctgacatggggtctcggcctgagtctatgggatgtagaaaagacacagtgccaaggccagcatctccaacagaagcaggtttgacaacagaacttttctcccctgtggacctcaaccaggtcattgtcaatggaaatcaatcactatccagccagaagcactggcttttcaagcacctgttttcagcccagcaggcaaacctatggtgcctttctcgttgtgtgcaggagcactctttctgtcagctcgcagagataacagagagtgcatccttgtacttcacctgcaccctctacccagaggcacaggtgtgtgatgacatcatggagtccaatgcccagggctgcagactgatcctgcctcagatgccaaaggccctgttccggaagaaagttatactggaagataaagtgaagaacttttacactcgcctgccgttccaaaaactgatggggatatccattagaaataaagtgcccatgtctgaaaaatctatttctaatgggttctttgaatgtgaacgacggtgcgatgcggacccatgctgcactggctttggatttctaaatgtttcccagttaaaaggaggagaggtgacatgtctcactctgaacagcttgggaattcagatgtgcagtgaggagaatggaggagcctggcgcattttggactgtggctctcctgacattgaagtccacacctatcccttcggatggtaccagaagcccattgctcaaaataatgctcccagtttttgccctttggttgttctgccttccctcacagagaaagtgtctctggactcgtggcagtccctggccctctcttcagtggttgttgatccatccattaggcactttgatgttgcccatgtcagcactgctgccaccagcaatttctctgctgtccgagacctctgtttgtcggaatgttcccaacatgaggcctgtctcatcaccactctgcaaacccaacctggggctgtgagatgtatgttctatgctgatactcaaagctgcacacatagtctgcagggtcagaactgccgacttctgcttcgtgaagaggccacccacatctaccggaagccaggaatctctctgctcagctatgaggcatctgtaccttctgtgcccatttccacccatggccggctgctgggcaggtcccaggccatccaggtgggtacctcatggaagcaagtggaccagttccttggagttccatatgctgccccgcccctggcagagaggcgcttccaggcaccagagcccttgaactggacaggctcctgggatgccagcaagccaagggccagctgctggcagccaggcaccagaacatccacgtctcctggagtcagtgaagattgtttgtatctcaatgtgttcatccctcagaatgtggcccctaacgcgtctgtgctggtgttcttccacaacaccatggacagggaggagagtgaaggatggccggctatcgacggctccttcttggctgctgttggcaacctcatcgtggtcactgccagctaccgagtgggtgtcttcggcttcctgagttctgggtccggagaggtgagtggcaactgggggctgctggaccaggtggcggctctgacctgggtgcagacccacatccgaggatttggcggggaccctcggcgcgtgtccctggcagccgtcgtaggcagagaggggaacctgcagagacgacca

SEQ ID NO: 447621 - DNA, 6683 bp, Homo sapiens
  misc_feature (6646)..(6646): n is a, c, g, or t
catctcagtcgacttagagacccccctggttgttcatcagagggattgaagtgtatggaccgccagctgggaagccaaagcgatgtccaaggagctgtgaaataagaaatcgtcgtcttctccacggggtgggagataagtcaccaccccagtgttctgcggagggagagtttatgcctgtccagtgcaaatttgtcaacaccacagacatgatgatttttgatctggtccacagctacaacaggtttccagatgcatttgtgaccttcagttccttccagaggaggttccctgaggtatctgggtattgccactgtgctgacagccaagggcgggaactggctgagacaggtttggagttgttactggatgaaatttatgacaccatttttgctggcctggaccttccttccaccttcactgaaaccaccctgtaccggatactgcagagacggttcctcgcagttcaatcagtcatctctggcagattccgatgccccacaaaatgtgaagtggagcggtttacagcaaccagctttggtcacccctatgttccaagctgccgccgaaatggcgactatcaggcggtgcagtgccagacggaagggccctgctggtgtgtggacgcccaggggaaggaaatgcatggaacccggcagcaaggggagccgccatcttgtgctgaaggccaatcttgtgcctccgaaaggcagcaggccttgtccagactctactttgggacctcaggctacttcagccagcacgacctgttctcttccccagagaaaagatgggcctctccaagagtagccagatttgccacatcctgcccacccacgatcaaggagctctttgtggactctgggcttctccgcccaatggtggagggacagagccaacagttttctgtctcagaaaatcttctcaaagaagccatccgagcaatttttccctcccgagggctggctcgtcttgcccttcagtttaccaccaacccaaagagactccagcaaaacctttttggagggaaatttttggtgaatgttggccagtttaacttgtctggagcccttggcacaagaggcacatttaacttcagtcaatttttccagcaacttggtcttgcaagcttcttgaatggagggagacaagaagatttggccaagccactctctgtgggattagattcaaattcttccacaggaacccctgaagctgctaagaaggatggtactatgaataagccaactgtgggcagctttggctttgaaattaacctacaagagaaccaaaatgccctcaaattccttgcttctctcctggagcttccagaattccttctcttcttgcaacatgctatctctgtgccagaagatgtggcaagagatttaggtgatgtgatggaaacggtactcagctcccagacctgtgagcagacacctgaaaggctatttgtcccatcatgcacgacagaaggaagctatgaggatgtccaatgcttttccggagagtgctggtgtgtgaattcctggggcaaagagcttccaggctcaagagtcagaggtggacagccaaggtgccccacagactgtgaaaagcaaagggctcgcatgcaaagcctcatgggcagccagcctgctggctccaccttgtttgtccctgcttgtactagtgagggacatttcctgcctgtccagtgcttcaactcagagtgctactgtgttgatgctgagggtcaggccattcctggaactcgaagtgcaatagggaagcccaagaaatgccccacgccctgtcaattacagtctgagcaagctttcctcaggacggtgcaggccctgctctctaactccagcatgctacccaccctttccgacacctacatcccacagtgcagcaccgatgggcagtggagacaagtgcaatgcaatgggcctcctgagcaggtcttcgagttgtaccaacgatgggaggctcagaacaagggccaggatctgacgcctgccaagctgctagtgaagatcatgagctacagagaagcagcttccggaaacttcagtctctttattcaaagtctgtatgaggctggccagcaagatgtcttcccggtgctgtcacaatacccttctctgcaagatgtcccactagcagcactggaagggaaacggccccagcccagggagaatatcctcctggagccctacctcttctggcagatcttaaatggccaactcagccaatacccggggtcctactcagacttcagcactcctttggcacattttgatcttcggaactgctggtgtgtggatgaggctggccaagaactggaaggaatgcggtctgagccaagcaagctcccaacatgtcctggctcctgtgaggaagcaaagctccgtgtactgcagttcattagggaaacggaagagattgtttcagcttccaacagttctcggttccctctgggggagagtttcctggtggccaagggaatccggctgaggaatgaggacctcggccttcctccgctcttcccgccccgggaggctttcgcggagcagtttctgcgtgggagtgattacgccattcgcctggcggctcagtctaccttaagcttctatcagagacgccgcttttccccggacgactcggctggagcatccgcccttctgcggtcgggcccctacatgccacagtgtgatgcgtttggaagttgggagcctgtgcagtgccacgctgggactgggcactgctggtgtgtagatgagaaaggagggttcatccctggctcactgactgcccgctctctgcagattccacagtgcccgacaacctgcgagaaatctcgaaccagtgggctgctttccagttggaaacaggctagatcccaagaaaacccatctccaaaagacctgttcgtcccagcctgcctagaaacaggagagtatgccaggctgcaggcatcgggggctggcacctggtgtgtggaccctgcatcaggagaagagttgcggcctggctcgagcagcagtgcccagtgcccaagcctctgcaatgtgctcaagagtggagtcctctccaggagagtcagcccaggctatgtcccagcctgcagggcagaggatgggggcttttccccagtgcaatgtgaccaggcccagggcagctgctggtgtgtcatggacagcggagaagaggtgcctgggacgcgcgtgaccgggggccagcccgcctgtgagagcccgcggtgtccgctgccattcaacgcgtcggaggtggttggtggaacaatcctgtgtgagacaatctcgggccccacaggctctgccatgcagcagtgccaattgctgtgccgccagggctcctggagcgtgtttccaccagggccattgatatgtagcctggagagcggacgctgggagtcacagctgcctcagccccgggcctgccaacggccccagctgtggcagaccatccagacccaagggcactttcagctccagctcccgccgggcaagatgtgcagtgctgactacgcggatttgctgcagactttccaggttttcatattggatgagctgacagcccgcggcttctgccagatccaggtgaagacttttggcaccctggtttccattcctgtctgcaacaactcctctgtgcaggtgggttgtctgaccagggagcgtttaggagtgaatgttacatggaaatcacggcttgaggacatcccagtggcttctcttcctgacttacatgacattgagagagccttggtgggcaaggatctccttgggcgcttcacagatctgatccagagtggctcattccagcttcatctggactccaagacgttcccagcggaaaccatccgcttcctccaaggggaccactttggcacctctcccaggacatggtttgggtgctcggaaggattctaccaagtcttgacaagtgaggccagtcaggacggactgggatgcgttaagtgtcctgaaggaagctattcccaagatgaggaatgcattccttgtcctgttggattctaccaagaacaggcagggagcttggcctgtgtcccatgtcctgtgggcagaacgaccatttctgctggagctttcagccagactcactgtgtcactgactgtcagaggaacgaagcaggcctgcaatgtgaccagaatggccagtatcgagccagccagaaggacaggggcagtgggaaggccttctgtgtggacggcgaggggcggaggctgccatggtgggaaacagaggcccctcttgaggactcacagtgtttgatgatgcagaagtttgagaaggttccagaatcaaaggtgatcttcgacgccaatgctcctgtggctgtcagatccaaagttcctgattctgagttccccgtgatgcagtgcttgacagattgcacagaggacgaggcctgcagcttcttcaccgtgtccacgacggagccagagatttcctgtgatttctatgcttggacaagtgacaatgttgcctgcatgacttctgaccagaaacgagatgcactggggaactcaaaggccaccagctttggaagtcttcgctgccaggtgaaagtgaggagccatggtcaagattctccagctgtgtatttgaaaaagggccaaggatccaccacaacacttcagaaacgctttgaacccactggtttccaaaacatgctttctggattgtacaaccccattgtgttctcagcctcaggagccaatctaaccgatgctcacctcttctgtcttcttgcatgcgaccgtgatctgtgttgcgatggcttcgtcctcacacaggttcaaggaggtgccatcatctgtgggttgctgagctcacccagtgtcctgctttgtaatgtcaaagactggatggatccctctgaagcctgggctaatgctacatgtcctggtgtgacatatgaccaggagagccaccaggtgatattgcgtcttggagaccaggagttcatcaagagtctgacacccttagaaggaactcaagacacctttaccaattttcagcaggtttatctctggaaagattctgacatggggtctcggcctgagtctatgggatgtagaaaagacacagtgccaaggccagcatctccaacagaagcaggtttgacaacagaacttttctcccctgtggacctcaaccaggtcattgtcaatggaaatcaatcactatccagccagaagcactggcttttcaagcacctgttttcagcccagcaggcaaacctatggtgcctttctcgttgtgtgcaggagcactctttctgtcagctcgcagagataacagagagtgcatccttgtacttcacctgcaccctctacccagaggcacaggtgtgtgatgacatcatggagtccaatgcccagggctgcagactgatcctgcctcagatgccaaaggccctgttccggaagaaagttatactggaagataaagtgaagaacttttacactcgcctgccgttccaaaaactgatggggatatccattagaaataaagtgcccatgtctgaaaaatctatttctaatgggttctttgaatgtgaacgacggtgcgatgcggacccatgctgcactggctttggatttctaaatgtttcccagttaaaaggaggagaggtgacatgtctcactctgaacagcttgggaattcagatgtgcagtgaggagaatggaggagcctggcgcattttggactgtggctctcctgacattgaagtccacacctatcccttcggatggtaccagaagcccattgctcaaaataatgctcccagtttttgccctttggttgttctgccttccctcacagagaaagtgtctctggactcgtggcagtccctggccctctcttcagtggttgttgatccatccattaggcactttgatgttgcccatgtcagcactgctgccaccagcaatttctctgctgtccgagacctctgtttgtcggaatgttcccaacatgaggcctgtctcatcaccactctgcaaacccaacctggggctgtgagatgtatgttctatgctgatactcaaagctgcacacatagtctgcagggtcagaactgccgacttctgcttcgtgaagaggccacccacatctaccggaagccaggaatctctctgctcagctatgaggcatctgtaccttctgtgcccatttccacccatggccggctgctgggcaggtcccaggccatccaggtgggtacctcatggaagcaagtggaccagttccttggagttccatatgctgccccgcccctggcagagaggcgcttccaggcaccagagcccttgaactggacaggctcctgggatgccagcaagccaagggccagctgctggcagccaggcaccagaacatccacgtctcctggagtcagtgaagattgtttgtatctcaatgtgttcatccctcagaatgtggcccctaacgcgtctgtgctggtgttcttccacaacaccatggacagggaggagagtgaaggatggccggctatcgacggctccttcttggctgctgttggcaacctcatcgtggtcactgccagctaccgagtgggtgtcttcggcttcctgagttctggggnccgaaagtaatgcactggggctgtgacagtgcggttt

SEQ ID NO: 447622 - DNA, 893 bp, Homo sapiens
  misc_feature (12)..(12): n is a, c, g, or t
aatgttgatccnctgccccgactatagaggatcccgtctgagcagctgggaagcaatttgaggaaagtcgaggccggaccagtagcaaaacagccttttaccaggcactgcagaattctctgggtggcgaggactcagatgcccgcgtcgaggctgctgctacatggtattactctctggagcactccacggatgactatgcctccttctcccgggctctggagaatgccacccgggactactttatcatctgccctataatcgacatggccagtgcctgggcaaagagggcccgaggaaacgtcttcatgtaccatgctcctgaaaactacggccatggcagcctggagctgctggcggatgttcagtttgccttggggcttcccttctacccagcctacgaggggcagttttctctggaggagaagagcctgtcgctgaaaatcatgcagtacttttcccacttcatcagatcaggaaatcccaactacccttatgagttctcacggaaagtacccacatttgcaaccccctggcctgactttgtaccccgtgctggtggagagaactacaaggagttcagtgagctgctccccaatcgacagggcctgaagaaagccgactgctccttctggtccaagtacatctcgtctctgaagacatctgcagatggagccaagggcgggcagtcagcagagagtgaagaggaggagttgacggctggatctgggctaagagaagatctcctaagcctccaggaaccaggctctaagacctacagcaagtgaccagcccttgagctccccaaaaacctcacccgaggctgcccactatggtcatctttttctctaaaatagccacttaccttcaataaagtatctacatgcggtgaa

SEQ ID NO: 447623 - DNA, 900 bp, Homo sapiens
attcctgctggctgattctagagtatccccgcacgggccatcacagagcaagctgggaagcaatttgaggaaagtcgaggccggaccagtagcaaaacagccttttaccaggcactgcagaattctctgggtggcgaggactcagatgcccgcgtcgaggctgctgctacatggtattactctctggagcactccacggatgactatgcctccttctcccgggctctggagaatgccacccgggactactttatcatctgccctataatcgacatggccagtgcctgggcaaagagggcccgaggaaacgtcttcatgtaccatgctcctgaaaactacggccatggcagcctggagctgctggcggatgttcagtttgccttggggcttcccttctacccagcctacgaggggcagttttctctggaggagaagagcctgtcgctgaaaatcatgcagtacttttcccacttcatcagatcaggaaatcccaactacccttatgagttctcacggaaagtacccacatttgcaaccccctggcctgactttgtaccccgtgctggtggagagaactacaaggagttcagtgagctgctccccaatcgacagggcctgaagaaagccgactgctccttctggtccaagtacatctcgtctctgaagacatctgcagatggagccaagggcgggcagtcagcagagagtgaagaggaggagttgacggctggatctgggctaagagaagatctcctaagcctccaggaaccaggctctaagacctacagcaagtgaccagcccttgagctccccaaaaacctcacccgaggctgcccactatggtcatctttttctctaaaatagccacttaccttcaataaagtatctacatgcggtgaa

SEQ ID NO: 447624 - DNA, 6394 bp, Homo sapiens
  misc_feature (6361)..(6361): n is a, c, g, or t
  misc_feature (6363)..(6363): n is a, c, g, or t
  misc_feature (6393)..(6393): n is a, c, g, or t
catctcagtcgacttagagacccccctggttgttcatcagagggattgaagtgtatggaccgccagctgggaagccaaagcgatgtccaaggagctgtgaaataagaaatcgtcgtcttctccacggggtgggagataagtcaccaccccagtgttctgcggagggagagtttatgcctgtccagtgcaaatttgtcaacaccacagacatgatgatttttgatctggtccacagctacaacaggtttccagatgcatttgtgaccttcagttccttccagaggaggttccctgaggtatctgggtattgccactgtgctgacagccaagggcgggaactggctgagacaggtttggagttgttactggatgaaatttatgacaccatttttgctggcctggaccttccttccaccttcactgaaaccaccctgtaccggatactgcagagacggttcctcgcagttcaatcagtcatctctggcagattccgatgccccacaaaatgtgaagtggagcggtttacagcaaccagctttggtcacccctatgttccaagctgccgccgaaatggcgactatcaggcggtgcagtgccagacggaagggccctgctggtgtgtggacgcccaggggaaggaaatgcatggaacccggcagcaaggggagccgccatcttgtgctgaaggccaatcttgtgcctccgaaaggcagcaggccttgtccagactctactttgggacctcaggctacttcagccagcacgacctgttctcttccccagagaaaagatgggcctctccaagagtagccagatttgccacatcctgcccacccacgatcaaggagctctttgtggactctgggcttctccgcccaatggtggagggacagagccaacagttttctgtctcagaaaatcttctcaaagaagccatccgagcaatttttccctcccgagggctggctcgtcttgcccttcagtttaccaccaacccaaagagactccagcaaaacctttttggagggaaatttttggtgaatgttggccagtttaacttgtctggagcccttggcacaagaggcacatttaacttcagtcaatttttccagcaacttggtcttgcaagcttcttgaatggagggagacaagaagatttggccaagccactctctgtgggattagattcaaattcttccacaggaacccctgaagctgctaagaaggatggtactatgaataagccaactgtgggcagctttggctttgaaattaacctacaagagaaccaaaatgccctcaaattccttgcttctctcctggagcttccagaattccttctcttcttgcaacatgctatctctgtgccagaagatgtggcaagagatttaggtgatgtgatggaaacggtactcagctcccagacctgtgagcagacacctgaaaggctatttgtcccatcatgcacgacagaaggaagctatgaggatgtccaatgcttttccggagagtgctggtgtgtgaattcctggggcaaagagcttccaggctcaagagtcagaggtggacagccaaggtgccccacagactgtgaaaagcaaagggctcgcatgcaaagcctcatgggcagccagcctgctggctccaccttgtttgtccctgcttgtactagtgagggacatttcctgcctgtccagtgcttcaactcagagtgctactgtgttgatgctgagggtcaggccattcctggaactcgaagtgcaatagggaagcccaagaaatgccccacgccctgtcaattacagtctgagcaagctttcctcaggacggtgcaggccctgctctctaactccagcatgctacccaccctttccgacacctacatcccacagtgcagcaccgatgggcagtggagacaagtgcaatgcaatgggcctcctgagcaggtcttcgagttgtaccaacgatgggaggctcagaacaagggccaggatctgacgcctgccaagctgctagtgaagatcatgagctacagagaagcagcttccggaaacttcagtctctttattcaaagtctgtatgaggctggccagcaagatgtcttcccggtgctgtcacaatacccttctctgcaagatgtcccactagcagcactggaagggaaacggccccagcccagggagaatatcctcctggagccctacctcttctggcagatcttaaatggccaactcagccaatacccggggtcctactcagacttcagcactcctttggcacattttgatcttcggaactgctggtgtgtggatgaggctggccaagaactggaaggaatgcggtctgagccaagcaagctcccaacatgtcctggctcctgtgaggaagcaaagctccgtgtactgcagttcattagggaaacggaagagattgtttcagcttccaacagttctcggttccctctgggggagagtttcctggtggccaagggaatccggctgaggaatgaggacctcggccttcctccgctcttcccgccccgggaggctttcgcggagcagtttctgcgtgggagtgattacgccattcgcctggcggctcagtctaccttaagcttctatcagagacgccgcttttccccggacgactcggctggagcatccgcccttctgcggtcgggcccctacatgccacagtgtgatgcgtttggaagttgggagcctgtgcagtgccacgctgggactgggcactgctggtgtgtagatgagaaaggagggttcatccctggctcactgactgcccgctctctgcagattccacagtgcccgacaacctgcgagaaatctcgaaccagtgggctgctttccagttggaaacaggctagatcccaagaaaacccatctccaaaagacctgttcgtcccagcctgcctagaaacaggagagtatgccaggctgcaggcatcgggggctggcacctggtgtgtggaccctgcatcaggagaagagttgcggcctggctcgagcagcagtgcccagtgcccaagcctctgcaatgtgctcaagagtggagtcctctccaggagagtcagcccaggctatgtcccagcctgcagggcagaggatgggggcttttccccagtgcaatgtgaccaggcccagggcagctgctggtgtgtcatggacagcggagaagaggtgcctgggacgcgcgtgaccgggggccagcccgcctgtgagagcccgcggtgtccgctgccattcaacgcgtcggaggtggttggtggaacaatcctgtgtgagacaatctcgggccccacaggctctgccatgcagcagtgccaattgctgtgccgccagggctcctggagcgtgtttccaccagggccattgatatgtagcctggagagcggacgctgggagtcacagctgcctcagccccgggcctgccaacggccccagctgtggcagaccatccagacccaagggcactttcagctccagctcccgccgggcaagatgtgcagtgctgactacgcggatttgctgcagactttccaggttttcatattggatgagctgacagcccgcggcttctgccagatccaggtgaagacttttggcaccctggtttccattcctgtctgcaacaactcctctgtgcaggtgggttgtctgaccagggagcgtttaggagtgaatgttacatggaaatcacggcttgaggacatcccagtggcttctcttcctgacttacatgacattgagagagccttggtgggcaaggatctccttgggcgcttcacagatctgatccagagtggctcattccagcttcatctggactccaagacgttcccagcggaaaccatccgcttcctccaaggggaccactttggcacctctcccaggacatggtttgggtgctcggaaggattctaccaagtcttgacaagtgaggccagtcaggacggactgggatgcgttaagtgtcctgaaggaagctattcccaagatgaggaatgcattccttgtcctgttggattctaccaagaacaggcagggagcttggcctgtgtcccatgtcctgtgggcagaacgaccatttctgctggagctttcagccagactcactgtgtcactgactgtcagaggaacgaagcaggcctgcaatgtgaccagaatggccagtatcgagccagccagaaggacaggggcagtgggaaggccttctgtgtggacggcgaggggcggaggctgccatggtgggaaacagaggcccctcttgaggactcacagtgtttgatgatgcagaagtttgagaaggttccagaatcaaaggtgatcttcgacgccaatgctcctgtggctgtcagatccaaagttcctgattctgagttccccgtgatgcagtgcttgacagattgcacagaggacgaggcctgcagcttcttcaccgtgtccacgacggagccagagatttcctgtgatttctatgcttggacaagtgacaatgttgcctgcatgacttctgaccagaaacgagatgcactggggaactcaaaggccaccagctttggaagtcttcgctgccaggtgaaagtgaggagccatggtcaagattctccagctgtgtatttgaaaaagggccaaggatccaccacaacacttcagaaacgctttgaacccactggtttccaaaacatgctttctggattgtacaaccccattgtgttctcagcctcaggagccaatctaaccgatgctcacctcttctgtcttcttgcatgcgaccgtgatctgtgttgcgatggcttcgtcctcacacaggttcaaggaggtgccatcatctgtgggttgctgagctcacccagtgtcctgctttgtaatgtcaaagactggatggatccctctgaagcctgggctaatgctacatgtcctggtgtgacatatgaccaggagagccaccaggtgatattgcgtcttggagaccaggagttcatcaagagtctgacacccttagaaggaactcaagacacctttaccaattttcagcaggtttatctctggaaagattctgacatggggtctcggcctgagtctatgggatgtagaaaagacacagtgccaaggccagcatctccaacagaagcaggtttgacaacagaacttttctcccctgtggacctcaaccaggtcattgtcaatggaaatcaatcactatccagccagaagcactggcttttcaagcacctgttttcagcccagcaggcaaacctatggtgcctttctcgttgtgtgcaggagcactctttctgtcagctcgcagagataacagagagtgcatccttgtacttcacctgcaccctctacccagaggcacaggtgtgtgatgacatcatggagtccaatgcccagggctgcagactgatcctgcctcagatgccaaaggccctgttccggaagaaagttatactggaagataaagtgaagaacttttacactcgcctgccgttccaaaaactgatggggatatccattagaaataaagtgcccatgtctgaaaaatctatttctaatgggttctttgaatgtgaacgacggtgcgatgcggacccatgctgcactggctttggatttctaaatgtttcccagttaaaaggaggagaggtgacatgtctcactctgaacagcttgggaattcagatgtgcagtgaggagaatggaggagcctggcgcattttggactgtggctctcctgacattgaagtccacacctatcccttcggatggtaccagaagcccattgctcaaaataatgctcccagtttttgccctttggttgttctgccttccctcacagagaaagtgtctctggactcgtggcagtccctggccctctcttcagtggttgttgatccatccattaggcactttgatgttgcccatgtcagcactgctgccaccagcaatttctctgctgtccgagacctctgtttgtcggaatgttcccaacatgaggcctgtctcatcaccactctgcaaacccaacctggggctgtgagatgtatgttctatgctgatactcaaagctgcacacatagtctgcagggtcagaactgccgacttctgcttcgtgaagaggccacccacatctaccggaagccaggaatctctctgctcagctatgaggcatctgtaccttctgtgcccatttccacccatggccggctgctgggcaggtcccaggccatccaggtgggtacctcatggaagcaagtggaccagttccttggagttccatatgctgccccgccctgcaaaaggccttcagcccaaaccctgactggcagctctggatncncagcaaggcactgtgagcagcccaacatcnc

SEQ ID NO: 447625 - DNA, 644 bp, Homo sapiens
gagcgatctagaggatcccatccccgggttgggcaaagagggcccgaggaaacgtcttcatgtaccatgctcctgaaaactacggccatggcagcctggagctgctggcggatgttcagtttgccttggggcttcccttctacccagcctacgaggggcagttttctctggaggagaagagcctgtcgctgaaaatcatgcagtacttttcccacttcatcagatcaggaaatcccaactacccttatgagttctcacggaaagtacccacatttgcaaccccctggcctgactttgtaccccgtgctggtggagagaactacaaggagttcagtgagctgctccccaatcgacagggcctgaagaaagccgactgctccttctggtccaagtacatctcgtctctgaagacatctgcagatggagccaagggcgggcagtcagcagagagtgaagaggaggagttgacggctggatctgggctaagagaagatctcctaagcctccaggaaccaggctctaagacctacagcaagtgaccagcccttgagctccccaaaaacctcacccgaggctgcccactatggtcatctttttctctaaaatagccacttaccttcaataaagtatctacatgcggtgaa

SEQ ID NO: 447626 - DNA, 6055 bp, Homo sapiens
catctcagtcgacttagagacccccctggttgttcatcagagggattgaagtgtatggaccgccagctgggaagccaaagcgatgtccaaggagctgtgaaataagaaatcgtcgtcttctccacggggtgggagataagtcaccaccccagtgttctgcggagggagagtttatgcctgtccagtgcaaatttgtcaacaccacagacatgatgatttttgatctggtccacagctacaacaggtttccagatgcatttgtgaccttcagttccttccagaggaggttccctgaggtatctgggtattgccactgtgctgacagccaagggcgggaactggctgagacaggtttggagttgttactggatgaaatttatgacaccatttttgctggcctggaccttccttccaccttcactgaaaccaccctgtaccggatactgcagagacggttcctcgcagttcaatcagtcatctctggcagattccgatgccccacaaaatgtgaagtggagcggtttacagcaaccagctttggtcacccctatgttccaagctgccgccgaaatggcgactatcaggcggtgcagtgccagacggaagggccctgctggtgtgtggacgcccaggggaaggaaatgcatggaacccggcagcaaggggagccgccatcttgtgctgaaggccaatcttgtgcctccgaaaggcagcaggccttgtccagactctactttgggacctcaggctacttcagccagcacgacctgttctcttccccagagaaaagatgggcctctccaagagtagccagatttgccacatcctgcccacccacgatcaaggagctctttgtggactctgggcttctccgcccaatggtggagggacagagccaacagttttctgtctcagaaaatcttctcaaagaagccatccgagcaatttttccctcccgagggctggctcgtcttgcccttcagtttaccaccaacccaaagagactccagcaaaacctttttggagggaaatttttggtgaatgttggccagtttaacttgtctggagcccttggcacaagaggcacatttaacttcagtcaatttttccagcaacttggtcttgcaagcttcttgaatggagggagacaagaagatttggccaagccactctctgtgggattagattcaaattcttccacaggaacccctgaagctgctaagaaggatggtactatgaataagccaactgtgggcagctttggctttgaaattaacctacaagagaaccaaaatgccctcaaattccttgcttctctcctggagcttccagaattccttctcttcttgcaacatgctatctctgtgccagaagatgtggcaagagatttaggtgatgtgatggaaacggtactcagctcccagacctgtgagcagacacctgaaaggctatttgtcccatcatgcacgacagaaggaagctatgaggatgtccaatgcttttccggagagtgctggtgtgtgaattcctggggcaaagagcttccaggctcaagagtcagaggtggacagccaaggtgccccacagactgtgaaaagcaaagggctcgcatgcaaagcctcatgggcagccagcctgctggctccaccttgtttgtccctgcttgtactagtgagggacatttcctgcctgtccagtgcttcaactcagagtgctactgtgttgatgctgagggtcaggccattcctggaactcgaagtgcaatagggaagcccaagaaatgccccacgccctgtcaattacagtctgagcaagctttcctcaggacggtgcaggccctgctctctaactccagcatgctacccaccctttccgacacctacatcccacagtgcagcaccgatgggcagtggagacaagtgcaatgcaatgggcctcctgagcaggtcttcgagttgtaccaacgatgggaggctcagaacaagggccaggatctgacgcctgccaagctgctagtgaagatcatgagctacagagaagcagcttccggaaacttcagtctctttattcaaagtctgtatgaggctggccagcaagatgtcttcccggtgctgtcacaatacccttctctgcaagatgtcccactagcagcactggaagggaaacggccccagcccagggagaatatcctcctggagccctacctcttctggcagatcttaaatggccaactcagccaatacccggggtcctactcagacttcagcactcctttggcacattttgatcttcggaactgctggtgtgtggatgaggctggccaagaactggaaggaatgcggtctgagccaagcaagctcccaacatgtcctggctcctgtgaggaagcaaagctccgtgtactgcagttcattagggaaacggaagagattgtttcagcttccaacagttctcggttccctctgggggagagtttcctggtggccaagggaatccggctgaggaatgaggacctcggccttcctccgctcttcccgccccgggaggctttcgcggagcagtttctgcgtgggagtgattacgccattcgcctggcggctcagtctaccttaagcttctatcagagacgccgcttttccccggacgactcggctggagcatccgcccttctgcggtcgggcccctacatgccacagtgtgatgcgtttggaagttgggagcctgtgcagtgccacgctgggactgggcactgctggtgtgtagatgagaaaggagggttcatccctggctcactgactgcccgctctctgcagattccacagtgcccgacaacctgcgagaaatctcgaaccagtgggctgctttccagttggaaacaggctagatcccaagaaaacccatctccaaaagacctgttcgtcccagcctgcctagaaacaggagagtatgccaggctgcaggcatcgggggctggcacctggtgtgtggaccctgcatcaggagaagagttgcggcctggctcgagcagcagtgcccagtgcccaagcctctgcaatgtgctcaagagtggagtcctctccaggagagtcagcccaggctatgtcccagcctgcagggcagaggatgggggcttttccccagtgcaatgtgaccaggcccagggcagctgctggtgtgtcatggacagcggagaagaggtgcctgggacgcgcgtgaccgggggccagcccgcctgtgagagcccgcggtgtccgctgccattcaacgcgtcggaggtggttggtggaacaatcctgtgtgagacaatctcgggccccacaggctctgccatgcagcagtgccaattgctgtgccgccagggctcctggagcgtgtttccaccagggccattgatatgtagcctggagagcggacgctgggagtcacagctgcctcagccccgggcctgccaacggccccagctgtggcagaccatccagacccaagggcactttcagctccagctcccgccgggcaagatgtgcagtgctgactacgcggatttgctgcagactttccaggttttcatattggatgagctgacagcccgcggcttctgccagatccaggtgaagacttttggcaccctggtttccattcctgtctgcaacaactcctctgtgcaggtgggttgtctgaccagggagcgtttaggagtgaatgttacatggaaatcacggcttgaggacatcccagtggcttctcttcctgacttacatgacattgagagagccttggtgggcaaggatctccttgggcgcttcacagatctgatccagagtggctcattccagcttcatctggactccaagacgttcccagcggaaaccatccgcttcctccaaggggaccactttggcacctctcccaggacatggtttgggtgctcggaaggattctaccaagtcttgacaagtgaggccagtcaggacggactgggatgcgttaagtgtcctgaaggaagctattcccaagatgaggaatgcattccttgtcctgttggattctaccaagaacaggcagggagcttggcctgtgtcccatgtcctgtgggcagaacgaccatttctgctggagctttcagccagactcactgtgtcactgactgtcagaggaacgaagcaggcctgcaatgtgaccagaatggccagtatcgagccagccagaaggacaggggcagtgggaaggccttctgtgtggacggcgaggggcggaggctgccatggtgggaaacagaggcccctcttgaggactcacagtgtttgatgatgcagaagtttgagaaggttccagaatcaaaggtgatcttcgacgccaatgctcctgtggctgtcagatccaaagttcctgattctgagttccccgtgatgcagtgcttgacagattgcacagaggacgaggcctgcagcttcttcaccgtgtccacgacggagccagagatttcctgtgatttctatgcttggacaagtgacaatgttgcctgcatgacttctgaccagaaacgagatgcactggggaactcaaaggccaccagctttggaagtcttcgctgccaggtgaaagtgaggagccatggtcaagattctccagctgtgtatttgaaaaagggccaaggatccaccacaacacttcagaaacgctttgaacccactggtttccaaaacatgctttctggattgtacaaccccattgtgttctcagcctcaggagccaatctaaccgatgctcacctcttctgtcttcttgcatgcgaccgtgatctgtgttgcgatggcttcgtcctcacacaggttcaaggaggtgccatcatctgtgggttgctgagctcacccagtgtcctgctttgtaatgtcaaagactggatggatccctctgaagcctgggctaatgctacatgtcctggtgtgacatatgaccaggagagccaccaggtgatattgcgtcttggagaccaggagttcatcaagagtctgacacccttagaaggaactcaagacacctttaccaattttcagcaggtttatctctggaaagattctgacatggggtctcggcctgagtctatgggatgtagaaaagacacagtgccaaggccagcatctccaacagaagcaggtttgacaacagaacttttctcccctgtggacctcaaccaggtcattgtcaatggaaatcaatcactatccagccagaagcactggcttttcaagcacctgttttcagcccagcaggcaaacctatggtgcctttctcgttgtgtgcaggagcactctttctgtcagctcgcagagataacagagagtgcatccttgtacttcacctgcaccctctacccagaggcacaggtgtgtgatgacatcatggagtccaatgcccagggctgcagactgatcctgcctcagatgccaaaggccctgttccggaagaaagttatactggaagataaagtgaagaacttttacactcgcctgccgttccaaaaactgatggggatatccattagaaataaagtgcccatgtctgaaaaatctatttctaatgggttctttgaatgtgaacgacggtgcgatgcggacccatgctgcactggctttggatttctaaatgtttcccagttaaaaggaggagaggtgacatgtctcactctgaacagcttgggaattcagatgtgcagtgaggagaatggaggagcctggcgcattttggactgtggctctcctgacattgaagtccacacctatcccttcggatggtaccagaagcccattgctcaaaataatgctcccagtttttgccctttggttgttctgccttccctcacagagaaagtgtctctggactcgtggcagtccctggccctctcttcagtggttgttgatccatccattaggcactttgatgttgcccatgtcagcactgctgccaccagcaatttctctgctgtccgagacctctgtttgtcggaatgttctcaacatccggcctgtttccttcagtctgggtgcgagctcgattg

SEQ ID NO: 447627 - DNA, 7062 bp, Homo sapiens
catctcagtcgacttagagacccccctggttgttcatcagagggattgaagtgtatggaccgccagctgggaagccaaagcgatgtccaaggagctgtgaaataagaaatcgtcgtcttctccacggggtgggagataagtcaccaccccagtgttctgcggagggagagtttatgcctgtccagtgcaaatttgtcaacaccacagacatgatgatttttgatctggtccacagctacaacaggtttccagatgcatttgtgaccttcagttccttccagaggaggttccctgaggtatctgggtattgccactgtgctgacagccaagggcgggaactggctgagacaggtttggagttgttactggatgaaatttatgacaccatttttgctggcctggaccttccttccaccttcactgaaaccaccctgtaccggatactgcagagacggttcctcgcagttcaatcagtcatctctggcagattccgatgccccacaaaatgtgaagtggagcggtttacagcaaccagctttggtcacccctatgttccaagctgccgccgaaatggcgactatcaggcggtgcagtgccagacggaagggccctgctggtgtgtggacgcccaggggaaggaaatgcatggaacccggcagcaaggggagccgccatcttgtgctgaaggccaatcttgtgcctccgaaaggcagcaggccttgtccagactctactttgggacctcaggctacttcagccagcacgacctgttctcttccccagagaaaagatgggcctctccaagagtagccagatttgccacatcctgcccacccacgatcaaggagctctttgtggactctgggcttctccgcccaatggtggagggacagagccaacagttttctgtctcagaaaatcttctcaaagaagccatccgagcaatttttccctcccgagggctggctcgtcttgcccttcagtttaccaccaacccaaagagactccagcaaaacctttttggagggaaatttttggtgaatgttggccagtttaacttgtctggagcccttggcacaagaggcacatttaacttcagtcaatttttccagcaacttggtcttgcaagcttcttgaatggagggagacaagaagatttggccaagccactctctgtgggattagattcaaattcttccacaggaacccctgaagctgctaagaaggatggtactatgaataagccaactgtgggcagctttggctttgaaattaacctacaagagaaccaaaatgccctcaaattccttgcttctctcctggagcttccagaattccttctcttcttgcaacatgctatctctgtgccagaagatgtggcaagagatttaggtgatgtgatggaaacggtactcagctcccagacctgtgagcagacacctgaaaggctatttgtcccatcatgcacgacagaaggaagctatgaggatgtccaatgcttttccggagagtgctggtgtgtgaattcctggggcaaagagcttccaggctcaagagtcagaggtggacagccaaggtgccccacagactgtgaaaagcaaagggctcgcatgcaaagcctcatgggcagccagcctgctggctccaccttgtttgtccctgcttgtactagtgagggacatttcctgcctgtccagtgcttcaactcagagtgctactgtgttgatgctgagggtcaggccattcctggaactcgaagtgcaatagggaagcccaagaaatgccccacgccctgtcaattacagtctgagcaagctttcctcaggacggtgcaggccctgctctctaactccagcatgctacccaccctttccgacacctacatcccacagtgcagcaccgatgggcagtggagacaagtgcaatgcaatgggcctcctgagcaggtcttcgagttgtaccaacgatgggaggctcagaacaagggccaggatctgacgcctgccaagctgctagtgaagatcatgagctacagagaagcagcttccggaaacttcagtctctttattcaaagtctgtatgaggctggccagcaagatgtcttcccggtgctgtcacaatacccttctctgcaagatgtcccactagcagcactggaagggaaacggccccagcccagggagaatatcctcctggagccctacctcttctggcagatcttaaatggccaactcagccaatacccggggtcctactcagacttcagcactcctttggcacattttgatcttcggaactgctggtgtgtggatgaggctggccaagaactggaaggaatgcggtctgagccaagcaagctcccaacatgtcctggctcctgtgaggaagcaaagctccgtgtactgcagttcattagggaaacggaagagattgtttcagcttccaacagttctcggttccctctgggggagagtttcctggtggccaagggaatccggctgaggaatgaggacctcggccttcctccgctcttcccgccccgggaggctttcgcggagcagtttctgcgtgggagtgattacgccattcgcctggcggctcagtctaccttaagcttctatcagagacgccgcttttccccggacgactcggctggagcatccgcccttctgcggtcgggcccctacatgccacagtgtgatgcgtttggaagttgggagcctgtgcagtgccacgctgggactgggcactgctggtgtgtagatgagaaaggagggttcatccctggctcactgactgcccgctctctgcagattccacagtgcccgacaacctgcgagaaatctcgaaccagtgggctgctttccagttggaaacaggctagatcccaagaaaacccatctccaaaagacctgttcgtcccagcctgcctagaaacaggagagtatgccaggctgcaggcatcgggggctggcacctggtgtgtggaccctgcatcaggagaagagttgcggcctggctcgagcagcagtgcccagtgcccaagcctctgcaatgtgctcaagagtggagtcctctccaggagagtcagcccaggctatgtcccagcctgcagggcagaggatgggggcttttccccagtgcaatgtgaccaggcccagggcagctgctggtgtgtcatggacagcggagaagaggtgcctgggacgcgcgtgaccgggggccagcccgcctgtgagagcccgcggtgtccgctgccattcaacgcgtcggaggtggttggtggaacaatcctgtgtgagacaatctcgggccccacaggctctgccatgcagcagtgccaattgctgtgccgccagggctcctggagcgtgtttccaccagggccattgatatgtagcctggagagcggacgctgggagtcacagctgcctcagccccgggcctgccaacggccccagctgtggcagaccatccagacccaagggcactttcagctccagctcccgccgggcaagatgtgcagtgctgactacgcggatttgctgcagactttccaggttttcatattggatgagctgacagcccgcggcttctgccagatccaggtgaagacttttggcaccctggtttccattcctgtctgcaacaactcctctgtgcaggtgggttgtctgaccagggagcgtttaggagtgaatgttacatggaaatcacggcttgaggacatcccagtggcttctcttcctgacttacatgacattgagagagccttggtgggcaaggatctccttgggcgcttcacagatctgatccagagtggctcattccagcttcatctggactccaagacgttcccagcggaaaccatccgcttcctccaaggggaccactttggcacctctcccaggacatggtttgggtgctcggaaggattctaccaagtcttgacaagtgaggccagtcaggacggactgggatgcgttaagtgtcctgaaggaagctattcccaagatgaggaatgcattccttgtcctgttggattctaccaagaacaggcagggagcttggcctgtgtcccatgtcctgtgggcagaacgaccatttctgctggagctttcagccagactcactgtgtcactgactgtcagaggaacgaagcaggcctgcaatgtgaccagaatggccagtatcgagccagccagaaggacaggggcagtgggaaggccttctgtgtggacggcgaggggcggaggctgccatggtgggaaacagaggcccctcttgaggactcacagtgtttgatgatgcagaagtttgagaaggttccagaatcaaaggtgatcttcgacgccaatgctcctgtggctgtcagatccaaagttcctgattctgagttccccgtgatgcagtgcttgacagattgcacagaggacgaggcctgcagcttcttcaccgtgtccacgacggagccagagatttcctgtgatttctatgcttggacaagtgacaatgttgcctgcatgacttctgaccagaaacgagatgcactggggaactcaaaggccaccagctttggaagtcttcgctgccaggtgaaagtgaggagccatggtcaagattctccagctgtgtatttgaaaaagggccaaggatccaccacaacacttcagaaacgctttgaacccactggtttccaaaacatgctttctggattgtacaaccccattgtgttctcagcctcaggagccaatctaaccgatgctcacctcttctgtcttcttgcatgcgaccgtgatctgtgttgcgatggcttcgtcctcacacaggttcaaggaggtgccatcatctgtgggttgctgagctcacccagtgtcctgctttgtaatgtcaaagactggatggatccctctgaagcctgggctaatgctacatgtcctggtgtgacatatgaccaggagagccaccaggtgatattgcgtcttggagaccaggagttcatcaagagtctgacacccttagaaggaactcaagacacctttaccaattttcagcaggtttatctctggaaagattctgacatggggtctcggcctgagtctatgggatgtagaaaagacacagtgccaaggccagcatctccaacagaagcaggtttgacaacagaacttttctcccctgtggacctcaaccaggtcattgtcaatggaaatcaatcactatccagccagaagcactggcttttcaagcacctgttttcagcccagcaggcaaacctatggtgcctttctcgttgtgtgcaggagcactctttctgtcagctcgcagagataacagagagtgcatccttgtacttcacctgcaccctctacccagaggcacaggtgtgtgatgacatcatggagtccaatgcccagggctgcagactgatcctgcctcagatgccaaaggccctgttccggaagaaagttatactggaagataaagtgaagaacttttacactcgcctgccgttccaaaaactgatggggatatccattagaaataaagtgcccatgtctgaaaaatctatttctaatgggttctttgaatgtgaacgacggtgcgatgcggacccatgctgcactggctttggatttctaaatgtttcccagttaaaaggaggagaggtgacatgtctcactctgaacagcttgggaattcagatgtgcagtgaggagaatggaggagcctggcgcattttggactgtggctctcctgacattgaagtccacacctatcccttcggatggtaccagaagcccattgctcaaaataatgctcccagtttttgccctttggttgttctgccttccctcacagagaaagtgtttaaagtccgggaggtgagagggacccagctgaagaggatggagtgagggcttccgtataactggagtacctggtgtcatgggaagattcacatgtacctggccaaacgaacaactccatgttttccaaaaggcttggagaacataccaggtacctctcctctttccctttgtgtttgtcattttggcgaattactggaagatggtggttccagctgaaaggctttttggcaatttttaacagctgaaaataaaccttgaaataaacattttctcctttaactgatgtctgggaaggaagaaacaaaaaaagaaagagaagaaaggaaataaggaaggagggagggagagagtgaaggagggaagaaaagagaattaaacacgattatctacatatcaatggaaaatttcaaatatattctagcataatttttttctacttagtatccattaaaaaagggaatcattgtggaatgcttaaatcaatcaaatgaacacagccatccctcggatacttattttttttttttttttgtggtgagaacatttgaaattgattctcttagtagtttcgaaatgtgccatatgttaactatagtcactgtgctgtgtaatagatctcaaaaagtactcctctgcatcatatacatatatcataaccttgtattataccccataaatatgtataattataatctgtccgttaaaaataaaaattaagctttaaaaaaggggatatggtgctttctagaaaggaatagaagtgcctccatgtcacccagaggcccgcctgtgcagagactgcagctgtgctgcctccaggttgtgaggtgacccaagctgcccccatcacctcctgcctctttgctgcccccatcatccctcccagacccttccttctcctctgcccttgtcccctcagcagctctggtttgcagggggtatcaccatatagggctgtcctgggtgcaaacactgacttgctgcctgcctttcagctgtttggtcttgggcaagtcagtggccctctgtgaacctcacttttccctcctataaagtagggttaggacagttcatctcaatgaagtaccattagatggaaccagttaatctttacatgactttttaagcacttcttacctgctaaatagatagtagcactcattgctagtctatctggtcacagaggaaa

SEQ ID NO: 447628 - DNA, 6381 bp, Homo sapiens
catctcagtcgacttagagacccccctggttgttcatcagagggattgaagtgtatggaccgccagctgggaagccaaagcgatgtccaaggagctgtgaaataagaaatcgtcgtcttctccacggggtgggagataagtcaccaccccagtgttctgcggagggagagtttatgcctgtccagtgcaaatttgtcaacaccacagacatgatgatttttgatctggtccacagctacaacaggtttccagatgcatttgtgaccttcagttccttccagaggaggttccctgaggtatctgggtattgccactgtgctgacagccaagggcgggaactggctgagacaggtttggagttgttactggatgaaatttatgacaccatttttgctggcctggaccttccttccaccttcactgaaaccaccctgtaccggatactgcagagacggttcctcgcagttcaatcagtcatctctggcagattccgatgccccacaaaatgtgaagtggagcggtttacagcaaccagctttggtcacccctatgttccaagctgccgccgaaatggcgactatcaggcggtgcagtgccagacggaagggccctgctggtgtgtggacgcccaggggaaggaaatgcatggaacccggcagcaaggggagccgccatcttgtgctgaaggccaatcttgtgcctccgaaaggcagcaggccttgtccagactctactttgggacctcaggctacttcagccagcacgacctgttctcttccccagagaaaagatgggcctctccaagagtagccagatttgccacatcctgcccacccacgatcaaggagctctttgtggactctgggcttctccgcccaatggtggagggacagagccaacagttttctgtctcagaaaatcttctcaaagaagccatccgagcaatttttccctcccgagggctggctcgtcttgcccttcagtttaccaccaacccaaagagactccagcaaaacctttttggagggaaatttttggtgaatgttggccagtttaacttgtctggagcccttggcacaagaggcacatttaacttcagtcaatttttccagcaacttggtcttgcaagcttcttgaatggagggagacaagaagatttggccaagccactctctgtgggattagattcaaattcttccacaggaacccctgaagctgctaagaaggatggtactatgaataagccaactgtgggcagctttggctttgaaattaacctacaagagaaccaaaatgccctcaaattccttgcttctctcctggagcttccagaattccttctcttcttgcaacatgctatctctgtgccagaagatgtggcaagagatttaggtgatgtgatggaaacggtactcagctcccagacctgtgagcagacacctgaaaggctatttgtcccatcatgcacgacagaaggaagctatgaggatgtccaatgcttttccggagagtgctggtgtgtgaattcctggggcaaagagcttccaggctcaagagtcagaggtggacagccaaggtgccccacagactgtgaaaagcaaagggctcgcatgcaaagcctcatgggcagccagcctgctggctccaccttgtttgtccctgcttgtactagtgagggacatttcctgcctgtccagtgcttcaactcagagtgctactgtgttgatgctgagggtcaggccattcctggaactcgaagtgcaatagggaagcccaagaaatgccccacgccctgtcaattacagtctgagcaagctttcctcaggacggtgcaggccctgctctctaactccagcatgctacccaccctttccgacacctacatcccacagtgcagcaccgatgggcagtggagacaagtgcaatgcaatgggcctcctgagcaggtcttcgagttgtaccaacgatgggaggctcagaacaagggccaggatctgacgcctgccaagctgctagtgaagatcatgagctacagagaagcagcttccggaaacttcagtctctttattcaaagtctgtatgaggctggccagcaagatgtcttcccggtgctgtcacaatacccttctctgcaagatgtcccactagcagcactggaagggaaacggccccagcccagggagaatatcctcctggagccctacctcttctggcagatcttaaatggccaactcagccaatacccggggtcctactcagacttcagcactcctttggcacattttgatcttcggaactgctggtgtgtggatgaggctggccaagaactggaaggaatgcggtctgagccaagcaagctcccaacatgtcctggctcctgtgaggaagcaaagctccgtgtactgcagttcattagggaaacggaagagattgtttcagcttccaacagttctcggttccctctgggggagagtttcctggtggccaagggaatccggctgaggaatgaggacctcggccttcctccgctcttcccgccccgggaggctttcgcggagcagtttctgcgtgggagtgattacgccattcgcctggcggctcagtctaccttaagcttctatcagagacgccgcttttccccggacgactcggctggagcatccgcccttctgcggtcgggcccctacatgccacagtgtgatgcgtttggaagttgggagcctgtgcagtgccacgctgggactgggcactgctggtgtgtagatgagaaaggagggttcatccctggctcactgactgcccgctctctgcagattccacagtgcccgacaacctgcgagaaatctcgaaccagtgggctgctttccagttggaaacaggctagatcccaagaaaacccatctccaaaagacctgttcgtcccagcctgcctagaaacaggagagtatgccaggctgcaggcatcgggggctggcacctggtgtgtggaccctgcatcaggagaagagttgcggcctggctcgagcagcagtgcccagtgcccaagcctctgcaatgtgctcaagagtggagtcctctccaggagagtcagcccaggctatgtcccagcctgcagggcagaggatgggggcttttccccagtgcaatgtgaccaggcccagggcagctgctggtgtgtcatggacagcggagaagaggtgcctgggacgcgcgtgaccgggggccagcccgcctgtgagagcccgcggtgtccgctgccattcaacgcgtcggaggtggttggtggaacaatcctgtgtgagacaatctcgggccccacaggctctgccatgcagcagtgccaattgctgtgccgccagggctcctggagcgtgtttccaccagggccattgatatgtagcctggagagcggacgctgggagtcacagctgcctcagccccgggcctgccaacggccccagctgtggcagaccatccagacccaagggcactttcagctccagctcccgccgggcaagatgtgcagtgctgactacgcggatttgctgcagactttccaggttttcatattggatgagctgacagcccgcggcttctgccagatccaggtgaagacttttggcaccctggtttccattcctgtctgcaacaactcctctgtgcaggtgggttgtctgaccagggagcgtttaggagtgaatgttacatggaaatcacggcttgaggacatcccagtggcttctcttcctgacttacatgacattgagagagccttggtgggcaaggatctccttgggcgcttcacagatctgatccagagtggctcattccagcttcatctggactccaagacgttcccagcggaaaccatccgcttcctccaaggggaccactttggcacctctcccaggacatggtttgggtgctcggaaggattctaccaagtcttgacaagtgaggccagtcaggacggactgggatgcgttaagtgtcctgaaggaagctattcccaagatgaggaatgcattccttgtcctgttggattctaccaagaacaggcagggagcttggcctgtgtcccatgtcctgtgggcagaacgaccatttctgctggagctttcagccagactcactgtgtcactgactgtcagaggaacgaagcaggcctgcaatgtgaccagaatggccagtatcgagccagccagaaggacaggggcagtgggaaggccttctgtgtggacggcgaggggcggaggctgccatggtgggaaacagaggcccctcttgaggactcacagtgtttgatgatgcagaagtttgagaaggttccagaatcaaaggtgatcttcgacgccaatgctcctgtggctgtcagatccaaagttcctgattctgagttccccgtgatgcagtgcttgacagattgcacagaggacgaggcctgcagcttcttcaccgtgtccacgacggagccagagatttcctgtgatttctatgcttggacaagtgacaatgttgcctgcatgacttctgaccagaaacgagatgcactggggaactcaaaggccaccagctttggaagtcttcgctgccaggtgaaagtgaggagccatggtcaagattctccagctgtgtatttgaaaaagggccaaggatccaccacaacacttcagaaacgctttgaacccactggtttccaaaacatgctttctggattgtacaaccccattgtgttctcagcctcaggagccaatctaaccgatgctcacctcttctgtcttcttgcatgcgaccgtgatctgtgttgcgatggcttcgtcctcacacaggttcaaggaggtgccatcatctgtgggttgctgagctcacccagtgtcctgctttgtaatgtcaaagactggatggatccctctgaagcctgggctaatgctacatgtcctggtgtgacatatgaccaggagagccaccaggtgatattgcgtcttggagaccaggagttcatcaagagtctgacacccttagaaggaactcaagacacctttaccaattttcagcaggtttatctctggaaagattctgacatggggtctcggcctgagtctatgggatgtagaaaagacacagtgccaaggccagcatctccaacagaagcaggtttgacaacagaacttttctcccctgtggacctcaaccaggtcattgtcaatggaaatcaatcactatccagccagaagcactggcttttcaagcacctgttttcagcccagcaggcaaacctatggtgcctttctcgttgtgtgcaggagcactctttctgtcagctcgcagagataacagagagtgcatccttgtacttcacctgcaccctctacccagaggcacaggtgtgtgatgacatcatggagtccaatgcccagggctgcagactgatcctgcctcagatgccaaaggccctgttccggaagaaagttatactggaagataaagtgaagaacttttacactcgcctgccgttccaaaaactgatggggatatccattagaaataaagtgcccatgtctgaaaaatctatttctaatgggttctttgaatgtgaacgacggtgcgatgcggacccatgctgcactggctttggatttctaaatgtttcccagttaaaaggaggagaggtgacatgtctcactctgaacagcttgggaattcagatgtgcagtgaggagaatggaggagcctggcgcattttggactgtggctctcctgacattgaagtccacacctatcccttcggatggtaccagaagcccattgctcaaaataatgctcccagtttttgccctttggttgttctgccttccctcacagagaaagggatcatgaaggtttgctgggggcctgaaagacttttcctgcctgaaaggtttcagaatgtcacggtttaccccagccagcctgtgcaggtgtggaaaccgcctcttctatttcccagctattccatattcaggagcaatcacttgatgagtgctgagcagctgaaagaaattcctcttggttttgattgcgggaagaagggtgaggatcctgaagacttttggatgccttggactcactgtttatttttgatgagtcctaagaaagtcatgtgatctttttatacaataaatgggatgggtctgtgattatttgaacgttggagagagtgtcaggcatttgctgccggtttgacattctgcccttggatctgatacaaaaatgcttggaggcactttccgcctgtttttcaaatgagggaggcaatggccagagcagaagctcacctgtcattacctgccagcaagcggcagacctctgcctgtggggtgcatgcagctctatagtgatgtg

SEQ ID NO: 447629 - DNA, 6172 bp, Homo sapiens
catctcagtcgacttagagacccccctggttgttcatcagagggattgaagtgtatggaccgccagctgggaagccaaagcgatgtccaaggagctgtgaaataagaaatcgtcgtcttctccacggggtgggagataagtcaccaccccagtgttctgcggagggagagtttatgcctgtccagtgcaaatttgtcaacaccacagacatgatgatttttgatctggtccacagctacaacaggtttccagatgcatttgtgaccttcagttccttccagaggaggttccctgaggtatctgggtattgccactgtgctgacagccaagggcgggaactggctgagacaggtttggagttgttactggatgaaatttatgacaccatttttgctggcctggaccttccttccaccttcactgaaaccaccctgtaccggatactgcagagacggttcctcgcagttcaatcagtcatctctggcagattccgatgccccacaaaatgtgaagtggagcggtttacagcaaccagctttggtcacccctatgttccaagctgccgccgaaatggcgactatcaggcggtgcagtgccagacggaagggccctgctggtgtgtggacgcccaggggaaggaaatgcatggaacccggcagcaaggggagccgccatcttgtgctgaaggccaatcttgtgcctccgaaaggcagcaggccttgtccagactctactttgggacctcaggctacttcagccagcacgacctgttctcttccccagagaaaagatgggcctctccaagagtagccagatttgccacatcctgcccacccacgatcaaggagctctttgtggactctgggcttctccgcccaatggtggagggacagagccaacagttttctgtctcagaaaatcttctcaaagaagccatccgagcaatttttccctcccgagggctggctcgtcttgcccttcagtttaccaccaacccaaagagactccagcaaaacctttttggagggaaatttttggtgaatgttggccagtttaacttgtctggagcccttggcacaagaggcacatttaacttcagtcaatttttccagcaacttggtcttgcaagcttcttgaatggagggagacaagaagatttggccaagccactctctgtgggattagattcaaattcttccacaggaacccctgaagctgctaagaaggatggtactatgaataagccaactgtgggcagctttggctttgaaattaacctacaagagaaccaaaatgccctcaaattccttgcttctctcctggagcttccagaattccttctcttcttgcaacatgctatctctgtgccagaagatgtggcaagagatttaggtgatgtgatggaaacggtactcagctcccagacctgtgagcagacacctgaaaggctatttgtcccatcatgcacgacagaaggaagctatgaggatgtccaatgcttttccggagagtgctggtgtgtgaattcctggggcaaagagcttccaggctcaagagtcagaggtggacagccaaggtgccccacagactgtgaaaagcaaagggctcgcatgcaaagcctcatgggcagccagcctgctggctccaccttgtttgtccctgcttgtactagtgagggacatttcctgcctgtccagtgcttcaactcagagtgctactgtgttgatgctgagggtcaggccattcctggaactcgaagtgcaatagggaagcccaagaaatgccccacgccctgtcaattacagtctgagcaagctttcctcaggacggtgcaggccctgctctctaactccagcatgctacccaccctttccgacacctacatcccacagtgcagcaccgatgggcagtggagacaagtgcaatgcaatgggcctcctgagcaggtcttcgagttgtaccaacgatgggaggctcagaacaagggccaggatctgacgcctgccaagctgctagtgaagatcatgagctacagagaagcagcttccggaaacttcagtctctttattcaaagtctgtatgaggctggccagcaagatgtcttcccggtgctgtcacaatacccttctctgcaagatgtcccactagcagcactggaagggaaacggccccagcccagggagaatatcctcctggagccctacctcttctggcagatcttaaatggccaactcagccaatacccggggtcctactcagacttcagcactcctttggcacattttgatcttcggaactgctggtgtgtggatgaggctggccaagaactggaaggaatgcggtctgagccaagcaagctcccaacatgtcctggctcctgtgaggaagcaaagctccgtgtactgcagttcattagggaaacggaagagattgtttcagcttccaacagttctcggttccctctgggggagagtttcctggtggccaagggaatccggctgaggaatgaggacctcggccttcctccgctcttcccgccccgggaggctttcgcggagcagtttctgcgtgggagtgattacgccattcgcctggcggctcagtctaccttaagcttctatcagagacgccgcttttccccggacgactcggctggagcatccgcccttctgcggtcgggcccctacatgccacagtgtgatgcgtttggaagttgggagcctgtgcagtgccacgctgggactgggcactgctggtgtgtagatgagaaaggagggttcatccctggctcactgactgcccgctctctgcagattccacagtgcccgacaacctgcgagaaatctcgaaccagtgggctgctttccagttggaaacaggctagatcccaagaaaacccatctccaaaagacctgttcgtcccagcctgcctagaaacaggagagtatgccaggctgcaggcatcgggggctggcacctggtgtgtggaccctgcatcaggagaagagttgcggcctggctcgagcagcagtgcccagtgcccaagcctctgcaatgtgctcaagagtggagtcctctccaggagagtcagcccaggctatgtcccagcctgcagggcagaggatgggggcttttccccagtgcaatgtgaccaggcccagggcagctgctggtgtgtcatggacagcggagaagaggtgcctgggacgcgcgtgaccgggggccagcccgcctgtgagagcccgcggtgtccgctgccattcaacgcgtcggaggtggttggtggaacaatcctgtgtgagacaatctcgggccccacaggctctgccatgcagcagtgccaattgctgtgccgccagggctcctggagcgtgtttccaccagggccattgatatgtagcctggagagcggacgctgggagtcacagctgcctcagccccgggcctgccaacggccccagctgtggcagaccatccagacccaagggcactttcagctccagctcccgccgggcaagatgtgcagtgctgactacgcggatttgctgcagactttccaggttttcatattggatgagctgacagcccgcggcttctgccagatccaggtgaagacttttggcaccctggtttccattcctgtctgcaacaactcctctgtgcaggtgggttgtctgaccagggagcgtttaggagtgaatgttacatggaaatcacggcttgaggacatcccagtggcttctcttcctgacttacatgacattgagagagccttggtgggcaaggatctccttgggcgcttcacagatctgatccagagtggctcattccagcttcatctggactccaagacgttcccagcggaaaccatccgcttcctccaaggggaccactttggcacctctcccaggacatggtttgggtgctcggaaggattctaccaagtcttgacaagtgaggccagtcaggacggactgggatgcgttaagtgtcctgaaggaagctattcccaagatgaggaatgcattccttgtcctgttggattctaccaagaacaggcagggagcttggcctgtgtcccatgtcctgtgggcagaacgaccatttctgctggagctttcagccagactcactgtgtcactgactgtcagaggaacgaagcaggcctgcaatgtgaccagaatggccagtatcgagccagccagaaggacaggggcagtgggaaggccttctgtgtggacggcgaggggcggaggctgccatggtgggaaacagaggcccctcttgaggactcacagtgtttgatgatgcagaagtttgagaaggttccagaatcaaaggtgatcttcgacgccaatgctcctgtggctgtcagatccaaagttcctgattctgagttccccgtgatgcagtgcttgacagattgcacagaggacgaggcctgcagcttcttcaccgtgtccacgacggagccagagatttcctgtgatttctatgcttggacaagtgacaatgttgcctgcatgacttctgaccagaaacgagatgcactggggaactcaaaggccaccagctttggaagtcttcgctgccaggtgaaagtgaggagccatggtcaagattctccagctgtgtatttgaaaaagggccaaggatccaccacaacacttcagaaacgctttgaacccactggtttccaaaacatgctttctggattgtacaaccccattgtgttctcagcctcaggagccaatctaaccgatgctcacctcttctgtcttcttgcatgcgaccgtgatctgtgttgcgatggcttcgtcctcacacaggttcaaggaggtgccatcatctgtgggttgctgagctcacccagtgtcctgctttgtaatgtcaaagactggatggatccctctgaagcctgggctaatgctacatgtcctggtgtgacatatgaccaggagagccaccaggtgatattgcgtcttggagaccaggagttcatcaagagtctgacacccttagaaggaactcaagacacctttaccaattttcagcaggtttatctctggaaagattctgacatggggtctcggcctgagtctatgggatgtagaaaagacacagtgccaaggccagcatctccaacagaagcaggtttgacaacagaacttttctcccctgtggacctcaaccaggtcattgtcaatggaaatcaatcactatccagccagaagcactggcttttcaagcacctgttttcagcccagcaggcaaacctatggtgcctttctcgttgtgtgcaggagcactctttctgtcagctcgcagagataacagagagtgcatccttgtacttcacctgcaccctctacccagaggcacaggtgtgtgatgacatcatggagtccaatgcccagggctgcagactgatcctgcctcagatgccaaaggccctgttccggaagaaagttatactggaagataaagtgaagaacttttacactcgcctgccgttccaaaaactgatggggatatccattagaaataaagtgcccatgtctgaaaaatctatttctaatgggttctttgaatgtgaacgacggtgcgatgcggacccatgctgcactggctttggatttctaaatgtttcccagttaaaaggaggagaggtgacatgtctcactctgaacagcttgggaattcagatgtgcagtgaggagaatggaggagcctggcgcattttggactgtggctctcctgacattgaagtccacacctatcccttcggatggtaccagaagcccattgctcaaaataatgctcccagtttttgccctttggttgttctgccttccctcacagagaaaggtaagttcattgtctttttatctcttggatgagagtaccccctcattcatcttctttctcctcttcccccttgcttttgtacagaagttgatagcttgcatatcactcgcattaattccagctcctatgaattaaacacatgtataagtggggtgagtaccagcaacatgcccactttgcagatgagaaaattgactcacgggaatgaaatgatttgtggaaattatgtggctgattgaagcagagtaagacctaagtcgcgtctcccagttttcattttaaggattatttcgccctatcgagt

SEQ ID NO: 447630 - DNA, 5118 bp, Homo sapiens
catctcagtcgacttagagacccccctggttgttcatcagagggattgaagtgtatggaccgccagctgggaagccaaagcgatgtccaaggagctgtgaaataagaaatcgtcgtcttctccacggggtgggagataagtcaccaccccagtgttctgcggagggagagtttatgcctgtccagtgcaaatttgtcaacaccacagacatgatgatttttgatctggtccacagctacaacaggtttccagatgcatttgtgaccttcagttccttccagaggaggttccctgaggtatctgggtattgccactgtgctgacagccaagggcgggaactggctgagacaggtttggagttgttactggatgaaatttatgacaccatttttgctggcctggaccttccttccaccttcactgaaaccaccctgtaccggatactgcagagacggttcctcgcagttcaatcagtcatctctggcagattccgatgccccacaaaatgtgaagtggagcggtttacagcaaccagctttggtcacccctatgttccaagctgccgccgaaatggcgactatcaggcggtgcagtgccagacggaagggccctgctggtgtgtggacgcccaggggaaggaaatgcatggaacccggcagcaaggggagccgccatcttgtgctgaaggccaatcttgtgcctccgaaaggcagcaggccttgtccagactctactttgggacctcaggctacttcagccagcacgacctgttctcttccccagagaaaagatgggcctctccaagagtagccagatttgccacatcctgcccacccacgatcaaggagctctttgtggactctgggcttctccgcccaatggtggagggacagagccaacagttttctgtctcagaaaatcttctcaaagaagccatccgagcaatttttccctcccgagggctggctcgtcttgcccttcagtttaccaccaacccaaagagactccagcaaaacctttttggagggaaatttttggtgaatgttggccagtttaacttgtctggagcccttggcacaagaggcacatttaacttcagtcaatttttccagcaacttggtcttgcaagcttcttgaatggagggagacaagaagatttggccaagccactctctgtgggattagattcaaattcttccacaggaacccctgaagctgctaagaaggatggtactatgaataagccaactgtgggcagctttggctttgaaattaacctacaagagaaccaaaatgccctcaaattccttgcttctctcctggagcttccagaattccttctcttcttgcaacatgctatctctgtgccagaagatgtggcaagagatttaggtgatgtgatggaaacggtactcagctcccagacctgtgagcagacacctgaaaggctatttgtcccatcatgcacgacagaaggaagctatgaggatgtccaatgcttttccggagagtgctggtgtgtgaattcctggggcaaagagcttccaggctcaagagtcagaggtggacagccaaggtgccccacagactgtgaaaagcaaagggctcgcatgcaaagcctcatgggcagccagcctgctggctccaccttgtttgtccctgcttgtactagtgagggacatttcctgcctgtccagtgcttcaactcagagtgctactgtgttgatgctgagggtcaggccattcctggaactcgaagtgcaatagggaagcccaagaaatgccccacgccctgtcaattacagtctgagcaagctttcctcaggacggtgcaggccctgctctctaactccagcatgctacccaccctttccgacacctacatcccacagtgcagcaccgatgggcagtggagacaagtgcaatgcaatgggcctcctgagcaggtcttcgagttgtaccaacgatgggaggctcagaacaagggccaggatctgacgcctgccaagctgctagtgaagatcatgagctacagagaagcagcttccggaaacttcagtctctttattcaaagtctgtatgaggctggccagcaagatgtcttcccggtgctgtcacaatacccttctctgcaagatgtcccactagcagcactggaagggaaacggccccagcccagggagaatatcctcctggagccctacctcttctggcagatcttaaatggccaactcagccaatacccggggtcctactcagacttcagcactcctttggcacattttgatcttcggaactgctggtgtgtggatgaggctggccaagaactggaaggaatgcggtctgagccaagcaagctcccaacatgtcctggctcctgtgaggaagcaaagctccgtgtactgcagttcattagggaaacggaagagattgtttcagcttccaacagttctcggttccctctgggggagagtttcctggtggccaagggaatccggctgaggaatgaggacctcggccttcctccgctcttcccgccccgggaggctttcgcggagcagtttctgcgtgggagtgattacgccattcgcctggcggctcagtctaccttaagcttctatcagagacgccgcttttccccggacgactcggctggagcatccgcccttctgcggtcgggcccctacatgccacagtgtgatgcgtttggaagttgggagcctgtgcagtgccacgctgggactgggcactgctggtgtgtagatgagaaaggagggttcatccctggctcactgactgcccgctctctgcagattccacagtgcccgacaacctgcgagaaatctcgaaccagtgggctgctttccagttggaaacaggctagatcccaagaaaacccatctccaaaagacctgttcgtcccagcctgcctagaaacaggagagtatgccaggctgcaggcatcgggggctggcacctggtgtgtggaccctgcatcaggagaagagttgcggcctggctcgagcagcagtgcccagtgcccaagcctctgcaatgtgctcaagagtggagtcctctccaggagagtcagcccaggctatgtcccagcctgcagggcagaggatgggggcttttccccagtgcaatgtgaccaggcccagggcagctgctggtgtgtcatggacagcggagaagaggtgcctgggacgcgcgtgaccgggggccagcccgcctgtgagagcccgcggtgtccgctgccattcaacgcgtcggaggtggttggtggaacaatcctgtgtgagacaatctcgggccccacaggctctgccatgcagcagtgccaattgctgtgccgccagggctcctggagcgtgtttccaccagggccattgatatgtagcctggagagcggacgctgggagtcacagctgcctcagccccgggcctgccaacggccccagctgtggcagaccatccagacccaagggcactttcagctccagctcccgccgggcaagatgtgcagtgctgactacgcggatttgctgcagactttccaggttttcatattggatgagctgacagcccgcggcttctgccagatccaggtgaagacttttggcaccctggtttccattcctgtctgcaacaactcctctgtgcaggtgggttgtctgaccagggagcgtttaggagtgaatgttacatggaaatcacggcttgaggacatcccagtggcttctcttcctgacttacatgacattgagagagccttggtgggcaaggatctccttgggcgcttcacagatctgatccagagtggctcattccagcttcatctggactccaagacgttcccagcggaaaccatccgcttcctccaaggggaccactttggcacctctcccaggacatggtttgggtgctcggaaggattctaccaagtcttgacaagtgaggccagtcaggacggactgggatgcgttaagtgtcctgaaggaagctattcccaagatgaggaatgcattccttgtcctgttggattctaccaagaacaggcagggagcttggcctgtgtcccatgtcctgtgggcagaacgaccatttctgctggagctttcagccagactcactgtgtcactgactgtcagaggaacgaagcaggcctgcaatgtgaccagaatggccagtatcgagccagccagaaggacaggggcagtgggaaggccttctgtgtggacggcgaggggcggaggctgccatggtgggaaacagaggcccctcttgaggactcacagtgtttgatgatgcagaagtttgagaaggttccagaatcaaaggtgatcttcgacgccaatgctcctgtggctgtcagatccaaagttcctgattctgagttccccgtgatgcagtgcttgacagattgcacagaggacgaggcctgcagcttcttcaccgtgtccacgacggagccagagatttcctgtgatttctatgcttggacaagtgacaatgttgcctgcatgacttctgaccagaaacgagatgcactggggaactcaaaggccaccagctttggaagtcttcgctgccaggtgaaagtgaggagccatggtcaagattctccagctgtgtatttgaaaaagggccaaggatccaccacaacacttcagaaacgctttgaacccactggtttccaaaacatgctttctggattgtacaaccccattgtgttctcagcctcaggagccaatctaaccgatgctcacctcttctgtcttcttgcatgcgaccgtgatctgtgttgcgatggcttcgtcctcacacaggttcaaggaggtgccatcatctgtgggttgctgagctcacccagtgtcctgctttgtaatgtcaaagactggatggatccctctgaagcctgggctaatgctacatgtcctggtgtgacatatgaccaggagagccaccaggtgatattgcgtcttggagaccaggagttcatcaagagtaagtctttgccatttgtccatattctttcaaaattactcttcacacgagcaaggccctctgctactttcttatgagccctccttgtggcctgaggagcttatacttctg

SEQ ID NO: 447631 - DNA, 4711 bp, Homo sapiens
  misc_feature (4650)..(4650): n is a, c, g, or t
  misc_feature (4653)..(4653): n is a, c, g, or t
  misc_feature (4678)..(4678): n is a, c, g, or t
  misc_feature (4690)..(4690): n is a, c, g, or t
catctcagtcgacttagagacccccctggttgttcatcagagggattgaagtgtatggaccgccagctgggaagccaaagcgatgtccaaggagctgtgaaataagaaatcgtcgtcttctccacggggtgggagataagtcaccaccccagtgttctgcggagggagagtttatgcctgtccagtgcaaatttgtcaacaccacagacatgatgatttttgatctggtccacagctacaacaggtttccagatgcatttgtgaccttcagttccttccagaggaggttccctgaggtatctgggtattgccactgtgctgacagccaagggcgggaactggctgagacaggtttggagttgttactggatgaaatttatgacaccatttttgctggcctggaccttccttccaccttcactgaaaccaccctgtaccggatactgcagagacggttcctcgcagttcaatcagtcatctctggcagattccgatgccccacaaaatgtgaagtggagcggtttacagcaaccagctttggtcacccctatgttccaagctgccgccgaaatggcgactatcaggcggtgcagtgccagacggaagggccctgctggtgtgtggacgcccaggggaaggaaatgcatggaacccggcagcaaggggagccgccatcttgtgctgaaggccaatcttgtgcctccgaaaggcagcaggccttgtccagactctactttgggacctcaggctacttcagccagcacgacctgttctcttccccagagaaaagatgggcctctccaagagtagccagatttgccacatcctgcccacccacgatcaaggagctctttgtggactctgggcttctccgcccaatggtggagggacagagccaacagttttctgtctcagaaaatcttctcaaagaagccatccgagcaatttttccctcccgagggctggctcgtcttgcccttcagtttaccaccaacccaaagagactccagcaaaacctttttggagggaaatttttggtgaatgttggccagtttaacttgtctggagcccttggcacaagaggcacatttaacttcagtcaatttttccagcaacttggtcttgcaagcttcttgaatggagggagacaagaagatttggccaagccactctctgtgggattagattcaaattcttccacaggaacccctgaagctgctaagaaggatggtactatgaataagccaactgtgggcagctttggctttgaaattaacctacaagagaaccaaaatgccctcaaattccttgcttctctcctggagcttccagaattccttctcttcttgcaacatgctatctctgtgccagaagatgtggcaagagatttaggtgatgtgatggaaacggtactcagctcccagacctgtgagcagacacctgaaaggctatttgtcccatcatgcacgacagaaggaagctatgaggatgtccaatgcttttccggagagtgctggtgtgtgaattcctggggcaaagagcttccaggctcaagagtcagaggtggacagccaaggtgccccacagactgtgaaaagcaaagggctcgcatgcaaagcctcatgggcagccagcctgctggctccaccttgtttgtccctgcttgtactagtgagggacatttcctgcctgtccagtgcttcaactcagagtgctactgtgttgatgctgagggtcaggccattcctggaactcgaagtgcaatagggaagcccaagaaatgccccacgccctgtcaattacagtctgagcaagctttcctcaggacggtgcaggccctgctctctaactccagcatgctacccaccctttccgacacctacatcccacagtgcagcaccgatgggcagtggagacaagtgcaatgcaatgggcctcctgagcaggtcttcgagttgtaccaacgatgggaggctcagaacaagggccaggatctgacgcctgccaagctgctagtgaagatcatgagctacagagaagcagcttccggaaacttcagtctctttattcaaagtctgtatgaggctggccagcaagatgtcttcccggtgctgtcacaatacccttctctgcaagatgtcccactagcagcactggaagggaaacggccccagcccagggagaatatcctcctggagccctacctcttctggcagatcttaaatggccaactcagccaatacccggggtcctactcagacttcagcactcctttggcacattttgatcttcggaactgctggtgtgtggatgaggctggccaagaactggaaggaatgcggtctgagccaagcaagctcccaacatgtcctggctcctgtgaggaagcaaagctccgtgtactgcagttcattagggaaacggaagagattgtttcagcttccaacagttctcggttccctctgggggagagtttcctggtggccaagggaatccggctgaggaatgaggacctcggccttcctccgctcttcccgccccgggaggctttcgcggagcagtttctgcgtgggagtgattacgccattcgcctggcggctcagtctaccttaagcttctatcagagacgccgcttttccccggacgactcggctggagcatccgcccttctgcggtcgggcccctacatgccacagtgtgatgcgtttggaagttgggagcctgtgcagtgccacgctgggactgggcactgctggtgtgtagatgagaaaggagggttcatccctggctcactgactgcccgctctctgcagattccacagtgcccgacaacctgcgagaaatctcgaaccagtgggctgctttccagttggaaacaggctagatcccaagaaaacccatctccaaaagacctgttcgtcccagcctgcctagaaacaggagagtatgccaggctgcaggcatcgggggctggcacctggtgtgtggaccctgcatcaggagaagagttgcggcctggctcgagcagcagtgcccagtgcccaagcctctgcaatgtgctcaagagtggagtcctctccaggagagtcagcccaggctatgtcccagcctgcagggcagaggatgggggcttttccccagtgcaatgtgaccaggcccagggcagctgctggtgtgtcatggacagcggagaagaggtgcctgggacgcgcgtgaccgggggccagcccgcctgtgagagcccgcggtgtccgctgccattcaacgcgtcggaggtggttggtggaacaatcctgtgtgagacaatctcgggccccacaggctctgccatgcagcagtgccaattgctgtgccgccagggctcctggagcgtgtttccaccagggccattgatatgtagcctggagagcggacgctgggagtcacagctgcctcagccccgggcctgccaacggccccagctgtggcagaccatccagacccaagggcactttcagctccagctcccgccgggcaagatgtgcagtgctgactacgcggatttgctgcagactttccaggttttcatattggatgagctgacagcccgcggcttctgccagatccaggtgaagacttttggcaccctggtttccattcctgtctgcaacaactcctctgtgcaggtgggttgtctgaccagggagcgtttaggagtgaatgttacatggaaatcacggcttgaggacatcccagtggcttctcttcctgacttacatgacattgagagagccttggtgggcaaggatctccttgggcgcttcacagatctgatccagagtggctcattccagcttcatctggactccaagacgttcccagcggaaaccatccgcttcctccaaggggaccactttggcacctctcccaggacatggtttgggtgctcggaaggattctaccaagtcttgacaagtgaggccagtcaggacggactgggatgcgttaagtgtcctgaaggaagctattcccaagatgaggaatgcattccttgtcctgttggattctaccaagaacaggcagggagcttggcctgtgtcccatgtcctgtgggcagaacgaccatttctgctggagctttcagccagactcactgtgtcactgactgtcagaggaacgaagcaggcctgcaatgtgaccagaatggccagtatcgagccagccagaaggacaggggcagtgggaaggccttctgtgtggacggcgaggggcggaggctgccatggtgggaaacagaggcccctcttgaggactcacagtgtttgatgatgcagaagtttgagaaggttccagaatcaaaggtgatcttcgacgccaatgctcctgtggctgtcagatccaaagttcctgattctgagttccccgtgatgcagtgcttgacagattgcacagaggacgaggcctgcagcttcttcaccgtgtccacgacggagccagagatttcctgtgatttctatgcttggacaagtgacaatgttgcctgcatgacttctgaccagaaacgagatgcactggggaactcaaaggccaccagctttggaagtcttcgctgccaggtgaaagtgaggagccatggtcaagattctccagctgtgtatttgaaaaaggggncangatcaccacacttaaaccttgaccntggttcaaaatntttgtgcaccatggttactag

SEQ ID NO: 447632 - DNA, 4367 bp, Homo sapiens
  misc_feature (4255)..(4256): n is a, c, g, or t
  misc_feature (4260)..(4260): n is a, c, g, or t
  misc_feature (4271)..(4271): n is a, c, g, or t
  misc_feature (4280)..(4280): n is a, c, g, or t
  misc_feature (4286)..(4286): n is a, c, g, or t
catctcagtcgacttagagacccccctggttgttcatcagagggattgaagtgtatggaccgccagctgggaagccaaagcgatgtccaaggagctgtgaaataagaaatcgtcgtcttctccacggggtgggagataagtcaccaccccagtgttctgcggagggagagtttatgcctgtccagtgcaaatttgtcaacaccacagacatgatgatttttgatctggtccacagctacaacaggtttccagatgcatttgtgaccttcagttccttccagaggaggttccctgaggtatctgggtattgccactgtgctgacagccaagggcgggaactggctgagacaggtttggagttgttactggatgaaatttatgacaccatttttgctggcctggaccttccttccaccttcactgaaaccaccctgtaccggatactgcagagacggttcctcgcagttcaatcagtcatctctggcagattccgatgccccacaaaatgtgaagtggagcggtttacagcaaccagctttggtcacccctatgttccaagctgccgccgaaatggcgactatcaggcggtgcagtgccagacggaagggccctgctggtgtgtggacgcccaggggaaggaaatgcatggaacccggcagcaaggggagccgccatcttgtgctgaaggccaatcttgtgcctccgaaaggcagcaggccttgtccagactctactttgggacctcaggctacttcagccagcacgacctgttctcttccccagagaaaagatgggcctctccaagagtagccagatttgccacatcctgcccacccacgatcaaggagctctttgtggactctgggcttctccgcccaatggtggagggacagagccaacagttttctgtctcagaaaatcttctcaaagaagccatccgagcaatttttccctcccgagggctggctcgtcttgcccttcagtttaccaccaacccaaagagactccagcaaaacctttttggagggaaatttttggtgaatgttggccagtttaacttgtctggagcccttggcacaagaggcacatttaacttcagtcaatttttccagcaacttggtcttgcaagcttcttgaatggagggagacaagaagatttggccaagccactctctgtgggattagattcaaattcttccacaggaacccctgaagctgctaagaaggatggtactatgaataagccaactgtgggcagctttggctttgaaattaacctacaagagaaccaaaatgccctcaaattccttgcttctctcctggagcttccagaattccttctcttcttgcaacatgctatctctgtgccagaagatgtggcaagagatttaggtgatgtgatggaaacggtactcagctcccagacctgtgagcagacacctgaaaggctatttgtcccatcatgcacgacagaaggaagctatgaggatgtccaatgcttttccggagagtgctggtgtgtgaattcctggggcaaagagcttccaggctcaagagtcagaggtggacagccaaggtgccccacagactgtgaaaagcaaagggctcgcatgcaaagcctcatgggcagccagcctgctggctccaccttgtttgtccctgcttgtactagtgagggacatttcctgcctgtccagtgcttcaactcagagtgctactgtgttgatgctgagggtcaggccattcctggaactcgaagtgcaatagggaagcccaagaaatgccccacgccctgtcaattacagtctgagcaagctttcctcaggacggtgcaggccctgctctctaactccagcatgctacccaccctttccgacacctacatcccacagtgcagcaccgatgggcagtggagacaagtgcaatgcaatgggcctcctgagcaggtcttcgagttgtaccaacgatgggaggctcagaacaagggccaggatctgacgcctgccaagctgctagtgaagatcatgagctacagagaagcagcttccggaaacttcagtctctttattcaaagtctgtatgaggctggccagcaagatgtcttcccggtgctgtcacaatacccttctctgcaagatgtcccactagcagcactggaagggaaacggccccagcccagggagaatatcctcctggagccctacctcttctggcagatcttaaatggccaactcagccaatacccggggtcctactcagacttcagcactcctttggcacattttgatcttcggaactgctggtgtgtggatgaggctggccaagaactggaaggaatgcggtctgagccaagcaagctcccaacatgtcctggctcctgtgaggaagcaaagctccgtgtactgcagttcattagggaaacggaagagattgtttcagcttccaacagttctcggttccctctgggggagagtttcctggtggccaagggaatccggctgaggaatgaggacctcggccttcctccgctcttcccgccccgggaggctttcgcggagcagtttctgcgtgggagtgattacgccattcgcctggcggctcagtctaccttaagcttctatcagagacgccgcttttccccggacgactcggctggagcatccgcccttctgcggtcgggcccctacatgccacagtgtgatgcgtttggaagttgggagcctgtgcagtgccacgctgggactgggcactgctggtgtgtagatgagaaaggagggttcatccctggctcactgactgcccgctctctgcagattccacagtgcccgacaacctgcgagaaatctcgaaccagtgggctgctttccagttggaaacaggctagatcccaagaaaacccatctccaaaagacctgttcgtcccagcctgcctagaaacaggagagtatgccaggctgcaggcatcgggggctggcacctggtgtgtggaccctgcatcaggagaagagttgcggcctggctcgagcagcagtgcccagtgcccaagcctctgcaatgtgctcaagagtggagtcctctccaggagagtcagcccaggctatgtcccagcctgcagggcagaggatgggggcttttccccagtgcaatgtgaccaggcccagggcagctgctggtgtgtcatggacagcggagaagaggtgcctgggacgcgcgtgaccgggggccagcccgcctgtgagagcccgcggtgtccgctgccattcaacgcgtcggaggtggttggtggaacaatcctgtgtgagacaatctcgggccccacaggctctgccatgcagcagtgccaattgctgtgccgccagggctcctggagcgtgtttccaccagggccattgatatgtagcctggagagcggacgctgggagtcacagctgcctcagccccgggcctgccaacggccccagctgtggcagaccatccagacccaagggcactttcagctccagctcccgccgggcaagatgtgcagtgctgactacgcggatttgctgcagactttccaggttttcatattggatgagctgacagcccgcggcttctgccagatccaggtgaagacttttggcaccctggtttccattcctgtctgcaacaactcctctgtgcaggtgggttgtctgaccagggagcgtttaggagtgaatgttacatggaaatcacggcttgaggacatcccagtggcttctcttcctgacttacatgacattgagagagccttggtgggcaaggatctccttgggcgcttcacagatctgatccagagtggctcattccagcttcatctggactccaagacgttcccagcggaaaccatccgcttcctccaaggggaccactttggcacctctcccaggacatggtttgggtgctcggaaggattctaccaagtcttgacaagtgaggccagtcaggacggactgggatgcgttaagtgtcctgaaggaagctattcccaagatgaggaatgcattccttgtcctgttggattctaccaagaacaggcagggagcttggcctgtgtcccatgtcctgtgggcagaacgaccatttctgctggagctttcagccagactcacttgatgcagaagtttgagaaggttccagaatcaaaggtgatcttcgacgccaatgctcctgtggctgtcagatccaaagttcctgattctgagttccccgtgatgcagtgcttgacagattnnacanaggacgaggcntgcagcttnttcacngtgtccagcgacggtagccagagatattcctgtgaatgctatgcttgtacacgaatgtttcggtaccgtgctgaatcgtat

SEQ ID NO: 447633 - DNA, 3026 bp, Homo sapiens
catctcagtcgacttagagacccccctggttgttcatcagagggattgaagtgtatggaccgccagctgggaagccaaagcgatgtccaaggagctgtgaaataagaaatcgtcgtcttctccacggggtgggagataagtcaccaccccagtgttctgcggagggagagtttatgcctgtccagtgcaaatttgtcaacaccacagacatgatgatttttgatctggtccacagctacaacaggtttccagatgcatttgtgaccttcagttccttccagaggaggttccctgaggtatctgggtattgccactgtgctgacagccaagggcgggaactggctgagacaggtttggagttgttactggatgaaatttatgacaccatttttgctggcctggaccttccttccaccttcactgaaaccaccctgtaccggatactgcagagacggttcctcgcagttcaatcagtcatctctggcagattccgatgccccacaaaatgtgaagtggagcggtttacagcaaccagctttggtcacccctatgttccaagctgccgccgaaatggcgactatcaggcggtgcagtgccagacggaagggccctgctggtgtgtggacgcccaggggaaggaaatgcatggaacccggcagcaaggggagccgccatcttgtgctgaaggccaatcttgtgcctccgaaaggcagcaggccttgtccagactctactttgggacctcaggctacttcagccagcacgacctgttctcttccccagagaaaagatgggcctctccaagagtagccagatttgccacatcctgcccacccacgatcaaggagctctttgtggactctgggcttctccgcccaatggtggagggacagagccaacagttttctgtctcagaaaatcttctcaaagaagccatccgagcaatttttccctcccgagggctggctcgtcttgcccttcagtttaccaccaacccaaagagactccagcaaaacctttttggagggaaatttttggtgaatgttggccagtttaacttgtctggagcccttggcacaagaggcacatttaacttcagtcaatttttccagcaacttggtcttgcaagcttcttgaatggagggagacaagaagatttggccaagccactctctgtgggattagattcaaattcttccacaggaacccctgaagctgctaagaaggatggtactatgaataagccaactgtgggcagctttggctttgaaattaacctacaagagaaccaaaatgccctcaaattccttgcttctctcctggagcttccagaattccttctcttcttgcaacatgctatctctgtgccagaagatgtggcaagagatttaggtgatgtgatggaaacggtactcagctcccagacctgtgagcagacacctgaaaggctatttgtcccatcatgcacgacagaaggaagctatgaggatgtccaatgcttttccggagagtgctggtgtgtgaattcctggggcaaagagcttccaggctcaagagtcagaggtggacagccaaggtgccccacagactgtgaaaagcaaagggctcgcatgcaaagcctcatgggcagccagcctgctggctccaccttgtttgtccctgcttgtactagtgagggacatttcctgcctgtccagtgcttcaactcagagtgctactgtgttgatgctgagggtcaggccattcctggaactcgaagtgcaatagggaagcccaagaaatgccccacgccctgtcaattacagtctgagcaagctttcctcaggacggtgcaggccctgctctctaactccagcatgctacccaccctttccgacacctacatcccacagtgcagcaccgatgggcagtggagacaagtgcaatgcaatgggcctcctgagcaggtcttcgagttgtaccaacgatgggaggctcagaacaagggccaggatctgacgcctgccaagctgctagtgaagatcatgagctacagagaagcagcttccggaaacttcagtctctttattcaaagtctgtatgaggctggccagcaagatgtcttcccggtgctgtcacaatacccttctctgcaagatgtcccactagcagcactggaagggaaacggccccagcccagggagaatatcctcctggagccctacctcttctggcagatcttaaatggccaactcagccaatacccggggtcctactcagacttcagcactcctttggcacattttgatcttcggaactgctggtgtgtggatgaggctggccaagaactggaaggaatgcggtctgagccaagcaagctcccaacatgtcctggctcctgtgaggaagcaaagctccgtgtactgcagttcattagggaaacggaagagattgtttcagcttccaacagttctcggttccctctgggggagagtttcctggtggccaagggaatccggctgaggaatgaggacctcggccttcctccgctcttcccgccccgggaggctttcgcggagcagtttctgcgtgggagtgattacgccattcgcctggcggctcagtctaccttaagcttctatcagagacgccgcttttccccggacgactcggctggagcatccgcccttctgcggtcgggcccctacatgccacagtgtgatgcgtttggaagttgggagcctgtgcagtgccacgctgggactgggcactgctggtgtgtagatgagaaaggagggttcatccctggctcactgactgcccgctctctgcagattccacagtgcccgacaacctgcgagaaatctcgaaccagtgggctgctttccagttggaaacaggctagatcccaagaaaacccatctccaaaagacctgttcgtcccagcctgcctagaagtaagggtctggaagcacaggattggagccgggacttgtccccgctggtcagagatgatttttctttttgttcaatacgttcagcttagt

SEQ ID NO: 447634 - DNA, 525 bp, Homo sapiens
gctcctttcgcgtctgcaaccctggcttgttccccgcttagaggatccgtctgagcaagctgggaagcaatttgaggaaagtcgaggccggaccagtagcaaaacagccttttaccaggcactgcagaattctctgggtggcgaggactcagatgcccgcgtcgaggctgctgctacatggtattactctctggagcactccacggatgactatgcctccttctcccgggctctggagaatgccacccgggactactttatcatctgccctataatcgacatggccagtgcctgggcaaagagggcccgaggaaacgtcttcatgtaccatgctcctgaaaactacggccatggcagcctggagctgctggcggatgttcagtttgccttggggcttcccttctacccagcctacgaggggcagttttctctggaggagaagagcctgtcgctgaaaatcatgcagtacttttcccacttcatcagatcagggctgctcagacggtaccagctcgatctaagttg

SEQ ID NO: 447635 - DNA, 1801 bp, Homo sapiens
catctcagtcgacttagagacccccctggttgttcatcagagggattgaagtgtatggaccgccagctgggaagccaaagcgatgtccaaggagctgtgaaataagaaatcgtcgtcttctccacggggtgggagataagtcaccaccccagtgttctgcggagggagagtttatgcctgtccagtgcaaatttgtcaacaccacagacatgatgatttttgatctggtccacagctacaacaggtttccagatgcatttgtgaccttcagttccttccagaggaggttccctgaggtatctgggtattgccactgtgctgacagccaagggcgggaactggctgagacaggtttggagttgttactggatgaaatttatgacaccatttttgctggcctggaccttccttccaccttcactgaaaccaccctgtaccggatactgcagagacggttcctcgcagttcaatcagtcatctctggcagattccgatgccccacaaaatgtgaagtggagcggtttacagcaaccagctttggtcacccctatgttccaagctgccgccgaaatggcgactatcaggcggtgcagtgccagacggaagggccctgctggtgtgtggacgcccaggggaaggaaatgcatggaacccggcagcaaggggagccgccatcttgtgctgaaggccaatcttgtgcctccgaaaggcagcaggccttgtccagactctactttgggacctcaggctacttcagccagcacgacctgttctcttccccagagaaaagatgggcctctccaagagtagccagatttgccacatcctgcccacccacgatcaaggagctctttgtggactctgggcttctccgcccaatggtggagggacagagccaacagttttctgtctcagaaaatcttctcaaagaagccatccgagcaatttttccctcccgagggctggctcgtcttgcccttcagtttaccaccaacccaaagagactccagcaaaacctttttggagggaaatttttggtgaatgttggccagtttaacttgtctggagcccttggcacaagaggcacatttaacttcagtcaatttttccagcaacttggtcttgcaagcttcttgaatggagggagacaagaagatttggccaagccactctctgtgggattagattcaaattcttccacaggaacccctgaagctgctaagaaggatggtactatgaataagccaactgtgggcagctttggctttgaaattaactacaaggagttcagtgagctgctccccaatcgacagggcctgaagaaagccgactgctccttctggtccaagtacatctcgtctctgaagacatctgcagatggagccaagggcgggcagtcagcagagagtgaagaggaggagttgacggctggatctgggctaagagaagatctcctaagcctccaggaaccaggctctaagacctacagcaagtgaccagcccttgagctccccaaaaacctcacccgaggctgcccactatggtcatctttttctctaaaatagccacttaccttcaataaagtatctacatgcggtgaatgcggtgaagcattgttgactctaatgtgtgaatccaaggcaattcgttggtaacaccaactatatcttaataatctttctaaggtttgaatcccaggctgctgtttccattcaacaaatgtttatgagcatctgttatgcaccaggccctgtgctgggtgctggagaaacaaggactttgctcctccagaaggagagaa

SEQ ID NO: 447636 - DNA, 1056 bp, Homo sapiens
catctcagtcgacttagagacccccctggttgttcatcagagggattgaagtgtatggaccgccagctgggaagccaaagcgatgtccaaggagctgtgaaataagaaatcgtcgtcttctccacggggtgggagataagtcaccaccccagtgttctgcggagggagagtttatgcctgtccagtgcaaatttgtcaacaccacagacatgatgatttttgatctggtccacagctacaacaggtttccagatgcatttgtgaccttcagttccttccagaggaggttccctgaggtatctgggtattgccactgtgctgacagccaagggcgggaactggctgagacaggtttggagttgttactggatgaaatttatgacaccatttttgctggcctggaccttccttccaccttcactgaaaccaccctgtaccggatactgcagagacggttcctcgcagttcaatcagtcatctctggcagattccgatgccccacaaaatgtgaagtggagcggtttacagcaaccagctttggtcacccctatgttccaagctgccgccgaaatggcgactatcaggcggtgcagtgccagacggaagggccctgctggtgtgtggacgcccaggggaaggaaatgcatggaacccggcagcaaggggagccgccatcttgtggtgggtttcctctgggggcttcctctttcggcctcggatcatattactttggcggtcctccagaccaacctctctggaccccattaattcaactgccttctagtgtgcccctctggcccttcaagctcaacctgtctgagaaccagtttatcatcattaacttccaacatgtttctcatcttgtgtcagacctcgttgcattttcagggagctcagggaatattaggaggctcatagatgaagaaaaataaaagagaattgagttcccatgtgcggtgagacaggagcatgcacataactaaaggagcatggtgaggtgggcattcgatcttgcagcaggtatgggaaggaggcatttaggaagaatgcatggaa

SEQ ID NO: 447637 - DNA, 481 bp, Homo sapiens
ggtgggctttgaggtgaagagaccaggtggtaactaattggctttagagatgagaagaagctcgagtgcctgagctggacatcaagctacacgagacattcatgcttaggtgtctgttaaaactgagagcagatgggctcatccaagtagagggcagggcagagagaaaggggagcaggcccaggccaggccctgagagcttgacaggtccagggaaggggagaggaggagggcccagtgtgagtgagaaggagacacccacaagcaggcatgctcagtcgtcccgaggctgggcaggtgcccaccacggctccactttccttctcccaggcccgcggtgtccgctgccattcaacgcgtcggaggtggttggtggaacaatcctgtgtgagacaatctcgggccccacaggctctgccatgcagcagtgccaattgctgtgccgccagggctcctggagcgtgtttccaccagggccatt

SEQ ID NO: 447638 - DNA, 653 bp, Homo sapiens
taatgatgttctatcactgagaggttggatgatgttccatataaaaaagagtgcagatccatgtcagggcatctgttgcagatcttctctaagtcacctggctttagggcctgatttttctcacattgctactaccattttgttgaccagtggagtactacccattctccccaacattgcaacaactcttttttttcctcctagattctgacatggggtctcggcctgagtctatgggatgtagaaaagacacagtgccaaggccagcatctccaacagaagcaggtactgacccccaaaccttcttacacacttgggtgtctgaatgcagagactaaatgggtgcaccaagagtttaatcaatgaacggatgtattgacatcactctattctgtatccatggactctcctttaatcttttaacccaattatccagctcataaatatgggaagctcctcagatgggcaattgtcacagaaagtaaggcaaaatcactgcaaattcataagtgttactggaaatgaagacaaccataataataaaacctgaaaaaagaaacaaagagcaaggttcacctgactgtggccaatgggcttcacttatgtcagccctgaaaagtataaacaaagtgtaaatattctgaaattgtttc

SEQ ID NO: 447639 - DNA, 530 bp, Homo sapiens
ctggtggatgggaacggcaggcgagtgtaaaagttcttcactttatcttccagccaacttttccggagagctgtgctgatgggaggctccgcactctccccggccgccgtcatcagccatgagagggctcagcagcaggcaattgctttggcaaaggaggtcagttgccccatgtcatccagccaagaagtggtgtcctgcctccgccagaagcctgccaatgtcctcaatgatgcccagaccaagctcctggccgtgagtggccctttccactactggggtcctgtgatcgatggccacttcctccgtgagcctccagccagagcactgaagaggtctttacgggtagaggtcgatctgctcattgggagttgccatggccgtagttttcaggagcatggtacatgaagacgtttcctcgggccctctttgcccaggcactggccatgtcgattatagggcagatgataaagtagtcccgggtggcattctccagagcccgggagaaggaggcatagtcatccgtggag

SEQ ID NO: 447640 - DNA, 535 bp, Homo sapiens
  misc_feature (12)..(12): n is a, c, g, or t
aatgttgatccnctgccccgactatagaggatcccgtctgagcagctgggaattcaacgaagcaacctgctgtcctagtaggatgaagtccatcacacagttccagaacagccaaggagggcagtgcggagctggctcaaagtgacagggagctaccagaagaagcagttcagaagaagagaatgtgagagtcagccaggaagtccagctcttctctgacatgattttcatgtaccatgctcctgaaaactacggccatggcagcctggagctgctggcggatgttcagtttgccttggggcttcccttctacccagcctacgaggggcagttttctctggaggagaagagcctgtcgctgaaaatcatgcagtacttttcccacttcatcagatcaggaaatccccaaataacccttatgagttcccagcttgctcaggtctgagcaagcgggcattccaggtatgcaccatcacgtagggctacttcaaaaattttttttcgtagggacagggtcttactgaattgctcagaa

SEQ ID NO: 447641 - DNA, 8457 bp, Homo sapiens
gcaagcagtggtttctcctccttcctcccaggaagggccaggaaaatggccctggtcctggagatcttcaccctgctggcctccatctgctgggtgtcggccaatatcttcgagtaccaggtggatgcccagccccttcgtccctgtgagctgcagagggaaacggcctttctgaagcaagcagactacgtgccccagtgtgcagaggatggcagcttccagactgtccagtgccagaacgacggccgctcctgctggtgtgtgggtgccaacggcagtgaagtgctgggcagcaggcagccaggacggcctgtggcttgtctgtcattttgtcagctacagaaacagcagatcttactgagtggctacattaacagcacagacacctcctacctccctcagtgtcaggattcaggggactacgcgcctgttcagtgtgatgtgcagcaggtccagtgctggtgtgtggacgcagaggggatggaggtgtatgggacccgccagctggggaggccaaagcgatgtccaaggagctgtgaaataagaaatcgtcgtcttctccacggggtgggagataagtcaccaccccagtgttctgcggagggagagtttatgcctgtccagtgcaaatttgtcaacaccacagacatgatgatttttgatctggtccacagctacaacaggtttccagatgcatttgtgaccttcagttccttccagaggaggttccctgaggtatctgggtattgccactgtgctgacagccaagggcgggaactggctgagacaggtttggagttgttactggatgaaatttatgacaccatttttgctggcctggaccttccttccaccttcactgaaaccaccctgtaccggatactgcagagacggttcctcgcagttcaatcagtcatctctggcagattccgatgccccacaaaatgtgaagtggagcggtttacagcaaccagctttggtcacccctatgttccaagctgccgccgaaatggcgactatcaggcggtgcagtgccagacggaagggccctgctggtgtgtggacgcccaggggaaggaaatgcatggaacccggcagcaaggggagccgccatcttgtgctgaaggccaatcttgtgcctccgaaaggcagcaggccttgtccagactctactttgggacctcaggctacttcagccagcacgacctgttctcttccccagagaaaagatgggcctctccaagagtagccagatttgccacatcctgcccacccacgatcaaggagctctttgtggactctgggcttctccgcccaatggtggagggacagagccaacagttttctgtctcagaaaatcttctcaaagaagccatccgagcaatttttccctcccgagggctggctcgtcttgcccttcagtttaccaccaacccaaagagactccagcaaaacctttttggagggaaatttttggtgaatgttggccagtttaacttgtctggagcccttggcacaagaggcacatttaacttcagtcaatttttccagcaacttggtcttgcaagcttcttgaatggagggagacaagaagatttggccaagccactctctgtgggattagattcaaattcttccacaggaacccctgaagctgctaagaaggatggtactatgaataagccaactgtgggcagctttggctttgaaattaacctacaagagaaccaaaatgccctcaaattccttgcttctctcctggagcttccagaattccttctcttcttgcaacatgctatctctgtgccagaagatgtggcaagagatttaggtgatgtgatggaaacggtactcagctcccagacctgtgagcagacacctgaaaggctatttgtcccatcatgcacgacagaaggaagctatgaggatgtccaatgcttttccggagagtgctggtgtgtgaattcctggggcaaagagcttccaggctcaagagtcagaggtggacagccaaggtgccccacagactgtgaaaagcaaagggctcgcatgcaaagcctcatgggcagccagcctgctggctccaccttgtttgtccctgcttgtactagtgagggacatttcctgcctgtccagtgcttcaactcagagtgctactgtgttgatgctgagggtcaggccattcctggaactcgaagtgcaatagggaagcccaagaaatgccccacgccctgtcaattacagtctgagcaagctttcctcaggacggtgcaggccctgctctctaactccagcatgctacccaccctttccgacacctacatcccacagtgcagcaccgatgggcagtggagacaagtgcaatgcaatgggcctcctgagcaggtcttcgagttgtaccaacgatgggaggctcagaacaagggccaggatctgacgcctgccaagctgctagtgaagatcatgagctacagagaagcagcttccggaaacttcagtctctttattcaaagtctgtatgaggctggccagcaagatgtcttcccggtgctgtcacaatacccttctctgcaagatgtcccactagcagcactggaagggaaacggccccagcccagggagaatatcctcctggagccctacctcttctggcagatcttaaatggccaactcagccaatacccggggtcctactcagacttcagcactcctttggcacattttgatcttcggaactgctggtgtgtggatgaggctggccaagaactggaaggaatgcggtctgagccaagcaagctcccaacatgtcctggctcctgtgaggaagcaaagctccgtgtactgcagttcattagggaaacggaagagattgtttcagcttccaacagttctcggttccctctgggggagagtttcctggtggccaagggaatccggctgaggaatgaggacctcggccttcctccgctcttcccgccccgggaggctttcgcggagcagtttctgcgtgggagtgattacgccattcgcctggcggctcagtctaccttaagcttctatcagagacgccgcttttccccggacgactcggctggagcatccgcccttctgcggtcgggcccctacatgccacagtgtgatgcgtttggaagttgggagcctgtgcagtgccacgctgggactgggcactgctggtgtgtagatgagaaaggagggttcatccctggctcactgactgcccgctctctgcagattccacagtgcccgacaacctgcgagaaatctcgaaccagtgggctgctttccagttggaaacaggctagatcccaagaaaacccatctccaaaagacctgttcgtcccagcctgcctagaaacaggagagtatgccaggctgcaggcatcgggggctggcacctggtgtgtggaccctgcatcaggagaagagttgcggcctggctcgagcagcagtgcccagtgcccaagcctctgcaatgtgctcaagagtggagtcctctccaggagagtcagcccaggctatgtcccagcctgcagggcagaggatgggggcttttccccagtgcaatgtgaccaggcccagggcagctgctggtgtgtcatggacagcggagaagaggtgcctgggacgcgcgtgaccgggggccagcccgcctgtgagagcccgcggtgtccgctgccattcaacgcgtcggaggtggttggtggaacaatcctgtgtgagacaatctcgggccccacaggctctgccatgcagcagtgccaattgctgtgccgccagggctcctggagcgtgtttccaccagggccattgatatgtagcctggagagcggacgctgggagtcacagctgcctcagccccgggcctgccaacggccccagctgtggcagaccatccagacccaagggcactttcagctccagctcccgccgggcaagatgtgcagtgctgactacgcggatttgctgcagactttccaggttttcatattggatgagctgacagcccgcggcttctgccagatccaggtgaagacttttggcaccctggtttccattcctgtctgcaacaactcctctgtgcaggtgggttgtctgaccagggagcgtttaggagtgaatgttacatggaaatcacggcttgaggacatcccagtggcttctcttcctgacttacatgacattgagagagccttggtgggcaaggatctccttgggcgcttcacagatctgatccagagtggctcattccagcttcatctggactccaagacgttcccagcggaaaccatccgcttcctccaaggggaccactttggcacctctcccaggacatggtttgggtgctcggaaggattctaccaagtcttgacaagtgaggccagtcaggacggactgggatgcgttaagtgtcctgaaggaagctattcccaagatgaggaatgcattccttgtcctgttggattctaccaagaacaggcagggagcttggcctgtgtcccatgtcctgtgggcagaacgaccatttctgctggagctttcagccagactcactgtgtcactgactgtcagaggaacgaagcaggcctgcaatgtgaccagaatggccagtatcgagccagccagaaggacaggggcagtgggaaggccttctgtgtggacggcgaggggcggaggctgccatggtgggaaacagaggcccctcttgaggactcacagtgtttgatgatgcagaagtttgagaaggttccagaatcaaaggtgatcttcgacgccaatgctcctgtggctgtcagatccaaagttcctgattctgagttccccgtgatgcagtgcttgacagattgcacagaggacgaggcctgcagcttcttcaccgtgtccacgacggagccagagatttcctgtgatttctatgcttggacaagtgacaatgttgcctgcatgacttctgaccagaaacgagatgcactggggaactcaaaggccaccagctttggaagtcttcgctgccaggtgaaagtgaggagccatggtcaagattctccagctgtgtatttgaaaaagggccaaggatccaccacaacacttcagaaacgctttgaacccactggtttccaaaacatgctttctggattgtacaaccccattgtgttctcagcctcaggagccaatctaaccgatgctcacctcttctgtcttcttgcatgcgaccgtgatctgtgttgcgatggcttcgtcctcacacaggttcaaggaggtgccatcatctgtgggttgctgagctcacccagtgtcctgctttgtaatgtcaaagactggatggatccctctgaagcctgggctaatgctacatgtcctggtgtgacatatgaccaggagagccaccaggtgatattgcgtcttggagaccaggagttcatcaagagtctgacacccttagaaggaactcaagacacctttaccaattttcagcaggtttatctctggaaagattctgacatggggtctcggcctgagtctatgggatgtagaaaagacacagtgccaaggccagcatctccaacagaagcaggtttgacaacagaacttttctcccctgtggacctcaaccaggtcattgtcaatggaaatcaatcactatccagccagaagcactggcttttcaagcacctgttttcagcccagcaggcaaacctatggtgcctttctcgttgtgtgcaggagcactctttctgtcagctcgcagagataacagagagtgcatccttgtacttcacctgcaccctctacccagaggcacaggtgtgtgatgacatcatggagtccaatgcccagggctgcagactgatcctgcctcagatgccaaaggccctgttccggaagaaagttatactggaagataaagtgaagaacttttacactcgcctgccgttccaaaaactgatggggatatccattagaaataaagtgcccatgtctgaaaaatctatttctaatgggttctttgaatgtgaacgacggtgcgatgcggacccatgctgcactggctttggatttctaaatgtttcccagttaaaaggaggagaggtgacatgtctcactctgaacagcttgggaattcagatgtgcagtgaggagaatggaggagcctggcgcattttggactgtggctctcctgacattgaagtccacacctatcccttcggatggtaccagaagcccattgctcaaaataatgctcccagtttttgccctttggttgttctgccttccctcacagagaaagtgtctctggactcgtggcagtccctggccctctcttcagtggttgttgatccatccattaggcactttgatgttgcccatgtcagcactgctgccaccagcaatttctctgctgtccgagacctctgtttgtcggaatgttcccaacatgaggcctgtctcatcaccactctgcaaacccaacctggggctgtgagatgtatgttctatgctgatactcaaagctgcacacatagtctgcagggtcagaactgccgacttctgcttcgtgaagaggccacccacatctaccggaagccaggaatctctctgctcagctatgaggcatctgtaccttctgtgcccatttccacccatggccggctgctgggcaggtcccaggccatccaggtgggtacctcatggaagcaagtggaccagttccttggagttccatatgctgccccgcccctggcagagaggcgcttccaggcaccagagcccttgaactggacaggctcctgggatgccagcaagccaagggccagctgctggcagccaggcaccagaacatccacgtctcctggagtcagtgaagattgtttgtatctcaatgtgttcatccctcagaatgtggcccctaacgcgtctgtgctggtgttcttccacaacaccatggacagggaggagagtgaaggatggccggctatcgacggctccttcttggctgctgttggcaacctcatcgtggtcactgccagctaccgagtgggtgtcttcggcttcctgagttctgggtccggagaggtgagtggcaactgggggctgctggaccaggtggcggctctgacctgggtgcagacccacatccgaggatttggcggggaccctcggcgcgtgtccctggcagcagaccgtggcggggctgatgtggccagcatccaccttctcacggccagggccaccaactcccaacttttccggagagctgtgctgatgggaggctccgcactctccccggccgccgtcatcagccatgagagggctcagcagcaggcaattgctttggcaaaggaggtcagttgccccatgtcatccagccaagaagtggtgtcctgcctccgccagaagcctgccaatgtcctcaatgatgcccagaccaagctcctggccgtgagtggccctttccactactggggtcctgtgatcgatggccacttcctccgtgagcctccagccagagcactgaagaggtctttacgggtagaggtcgatctgctcattgggagttctcaggacgacgggctcatcaacagagcaaaggctgtgaagcaatttgaggaaagtcgaggccggaccagtagcaaaacagccttttaccaggcactgcagaattctctgggtggcgaggactcagatgcccgcgtcgaggctgctgctacatggtattactctctggagcactccacggatgactatgcctccttctcccgggctctggagaatgccacccgggactactttatcatctgccctataatcgacatggccagtgcctgggcaaagagggcccgaggaaacgtcttcatgtaccatgctcctgaaaactacggccatggcagcctggagctgctggcggatgttcagtttgccttggggcttcccttctacccagcctacgaggggcagttttctctggaggagaagagcctgtcgctgaaaatcatgcagtacttttcccacttcatcagatcaggaaatcccaactacccttatgagttctcacggaaagtacccacatttgcaaccccctggcctgactttgtaccccgtgctggtggagagaactacaaggagttcagtgagctgctccccaatcgacagggcctgaagaaagccgactgctccttctggtccaagtacatctcgtctctgaagacatctgcagatggagccaagggcgggcagtcagcagagagtgaagaggaggagttgacggctggatctgggctaagagaagatctcctaagcctccaggaaccaggctctaagacctacagcaagtgaccagcccttgagctccccaaaaacctcacccgaggctgcccactatggtcatctttttctctaaaatagccacttaccttcaataaagtatctacatgcggtgaa

SEQ ID NO: 447642 - DNA, 669 bp, Homo sapiens
  misc_feature (12)..(13): n is a, c, g, or t
cgatgctgcggnnatttagaggatcccgcacgaggggtgtccctggccctctcttcagtggttgttgatccatccattaggcactttgatgttgcccatgtcagcactgctgccaccagcaatttctctgctgtccgagacctctgtttgtcggaatgttcccaacatgaggcctgtctcatcaccactctgcaaacccaacctggggctgtgagatgtatgttctatgctgatactcaaagctgcacacatagtctgcagggtcagaactgccgacttctgcttcgtgaagaggccacccacatctaccggaagccaggaatctctctgctcagctatgaggcatctgtaccttctgtgcccatttccacccatggccggctgctgggcaggtcccaggccatccaggtgggtacctcatggaagcaagtggaccagttccttggagttccatatgctgccccgcccctggcagagaggcgcttccaggcaccagagcccttgaactggacaggctcctgggatgccagcaagccaagggccagctgctggcagccaggcaccagaacatccacgtctcctggagtcagtgaagattgtttgtatctcaatgtgttcatccctcagaatgtggccctaaccgtctggctggggtctccacacaccatg

SEQ ID NO: 447643 - DNA, 8018 bp, Homo sapiens
catctcagtcgacttagagacccccctggttgttcatcagagggattgaagtgtatggaccgccagctgggaagccaaagcgatgtccaaggagctgtgaaataagaaatcgtcgtcttctccacggggtgggagataagtcaccaccccagtgttctgcggagggagagtttatgcctgtccagtgcaaatttgtcaacaccacagacatgatgatttttgatctggtccacagctacaacaggtttccagatgcatttgtgaccttcagttccttccagaggaggttccctgaggtatctgggtattgccactgtgctgacagccaagggcgggaactggctgagacaggtttggagttgttactggatgaaatttatgacaccatttttgctggcctggaccttccttccaccttcactgaaaccaccctgtaccggatactgcagagacggttcctcgcagttcaatcagtcatctctggcagattccgatgccccacaaaatgtgaagtggagcggtttacagcaaccagctttggtcacccctatgttccaagctgccgccgaaatggcgactatcaggcggtgcagtgccagacggaagggccctgctggtgtgtggacgcccaggggaaggaaatgcatggaacccggcagcaaggggagccgccatcttgtgctgaaggccaatcttgtgcctccgaaaggcagcaggccttgtccagactctactttgggacctcaggctacttcagccagcacgacctgttctcttccccagagaaaagatgggcctctccaagagtagccagatttgccacatcctgcccacccacgatcaaggagctctttgtggactctgggcttctccgcccaatggtggagggacagagccaacagttttctgtctcagaaaatcttctcaaagaagccatccgagcaatttttccctcccgagggctggctcgtcttgcccttcagtttaccaccaacccaaagagactccagcaaaacctttttggagggaaatttttggtgaatgttggccagtttaacttgtctggagcccttggcacaagaggcacatttaacttcagtcaatttttccagcaacttggtcttgcaagcttcttgaatggagggagacaagaagatttggccaagccactctctgtgggattagattcaaattcttccacaggaacccctgaagctgctaagaaggatggtactatgaataagccaactgtgggcagctttggctttgaaattaacctacaagagaaccaaaatgccctcaaattccttgcttctctcctggagcttccagaattccttctcttcttgcaacatgctatctctgtgccagaagatgtggcaagagatttaggtgatgtgatggaaacggtactcagctcccagacctgtgagcagacacctgaaaggctatttgtcccatcatgcacgacagaaggaagctatgaggatgtccaatgcttttccggagagtgctggtgtgtgaattcctggggcaaagagcttccaggctcaagagtcagaggtggacagccaaggtgccccacagactgtgaaaagcaaagggctcgcatgcaaagcctcatgggcagccagcctgctggctccaccttgtttgtccctgcttgtactagtgagggacatttcctgcctgtccagtgcttcaactcagagtgctactgtgttgatgctgagggtcaggccattcctggaactcgaagtgcaatagggaagcccaagaaatgccccacgccctgtcaattacagtctgagcaagctttcctcaggacggtgcaggccctgctctctaactccagcatgctacccaccctttccgacacctacatcccacagtgcagcaccgatgggcagtggagacaagtgcaatgcaatgggcctcctgagcaggtcttcgagttgtaccaacgatgggaggctcagaacaagggccaggatctgacgcctgccaagctgctagtgaagatcatgagctacagagaagcagcttccggaaacttcagtctctttattcaaagtctgtatgaggctggccagcaagatgtcttcccggtgctgtcacaatacccttctctgcaagatgtcccactagcagcactggaagggaaacggccccagcccagggagaatatcctcctggagccctacctcttctggcagatcttaaatggccaactcagccaatacccggggtcctactcagacttcagcactcctttggcacattttgatcttcggaactgctggtgtgtggatgaggctggccaagaactggaaggaatgcggtctgagccaagcaagctcccaacatgtcctggctcctgtgaggaagcaaagctccgtgtactgcagttcattagggaaacggaagagattgtttcagcttccaacagttctcggttccctctgggggagagtttcctggtggccaagggaatccggctgaggaatgaggacctcggccttcctccgctcttcccgccccgggaggctttcgcggagcagtttctgcgtgggagtgattacgccattcgcctggcggctcagtctaccttaagcttctatcagagacgccgcttttccccggacgactcggctggagcatccgcccttctgcggtcgggcccctacatgccacagtgtgatgcgtttggaagttgggagcctgtgcagtgccacgctgggactgggcactgctggtgtgtagatgagaaaggagggttcatccctggctcactgactgcccgctctctgcagattccacagtgcccgacaacctgcgagaaatctcgaaccagtgggctgctttccagttggaaacaggctagatcccaagaaaacccatctccaaaagacctgttcgtcccagcctgcctagaaacaggagagtatgccaggctgcaggcatcgggggctggcacctggtgtgtggaccctgcatcaggagaagagttgcggcctggctcgagcagcagtgcccagtgcccaagcctctgcaatgtgctcaagagtggagtcctctccaggagagtcagcccaggctatgtcccagcctgcagggcagaggatgggggcttttccccagtgcaatgtgaccaggcccagggcagctgctggtgtgtcatggacagcggagaagaggtgcctgggacgcgcgtgaccgggggccagcccgcctgtgagagcccgcggtgtccgctgccattcaacgcgtcggaggtggttggtggaacaatcctgtgtgagacaatctcgggccccacaggctctgccatgcagcagtgccaattgctgtgccgccagggctcctggagcgtgtttccaccagggccattgatatgtagcctggagagcggacgctgggagtcacagctgcctcagccccgggcctgccaacggccccagctgtggcagaccatccagacccaagggcactttcagctccagctcccgccgggcaagatgtgcagtgctgactacgcggatttgctgcagactttccaggttttcatattggatgagctgacagcccgcggcttctgccagatccaggtgaagacttttggcaccctggtttccattcctgtctgcaacaactcctctgtgcaggtgggttgtctgaccagggagcgtttaggagtgaatgttacatggaaatcacggcttgaggacatcccagtggcttctcttcctgacttacatgacattgagagagccttggtgggcaaggatctccttgggcgcttcacagatctgatccagagtggctcattccagcttcatctggactccaagacgttcccagcggaaaccatccgcttcctccaaggggaccactttggcacctctcccaggacatggtttgggtgctcggaaggattctaccaagtcttgacaagtgaggccagtcaggacggactgggatgcgttaagtgtcctgaaggaagctattcccaagatgaggaatgcattccttgtcctgttggattctaccaagaacaggcagggagcttggcctgtgtcccatgtcctgtgggcagaacgaccatttctgctggagctttcagccagactcactgtgtcactgactgtcagaggaacgaagcaggcctgcaatgtgaccagaatggccagtatcgagccagccagaaggacaggggcagtgggaaggccttctgtgtggacggcgaggggcggaggctgccatggtgggaaacagaggcccctcttgaggactcacagtgtttgatgatgcagaagtttgagaaggttccagaatcaaaggtgatcttcgacgccaatgctcctgtggctgtcagatccaaagttcctgattctgagttccccgtgatgcagtgcttgacagattgcacagaggacgaggcctgcagcttcttcaccgtgtccacgacggagccagagatttcctgtgatttctatgcttggacaagtgacaatgttgcctgcatgacttctgaccagaaacgagatgcactggggaactcaaaggccaccagctttggaagtcttcgctgccaggtgaaagtgaggagccatggtcaagattctccagctgtgtatttgaaaaagggccaaggatccaccacaacacttcagaaacgctttgaacccactggtttccaaaacatgctttctggattgtacaaccccattgtgttctcagcctcaggagccaatctaaccgatgctcacctcttctgtcttcttgcatgcgaccgtgatctgtgttgcgatggcttcgtcctcacacaggttcaaggaggtgccatcatctgtgggttgctgagctcacccagtgtcctgctttgtaatgtcaaagactggatggatccctctgaagcctgggctaatgctacatgtcctggtgtgacatatgaccaggagagccaccaggtgatattgcgtcttggagaccaggagttcatcaagagtctgacacccttagaaggaactcaagacacctttaccaattttcagcaggtttatctctggaaagattctgacatggggtctcggcctgagtctatgggatgtagaaaagacacagtgccaaggccagcatctccaacagaagcaggtttgacaacagaacttttctcccctgtggacctcaaccaggtcattgtcaatggaaatcaatcactatccagccagaagcactggcttttcaagcacctgttttcagcccagcaggcaaacctatggtgcctttctcgttgtgtgcaggagcactctttctgtcagctcgcagagataacagagagtgcatccttgtacttcacctgcaccctctacccagaggcacaggtgtgtgatgacatcatggagtccaatgcccagggctgcagactgatcctgcctcagatgccaaaggccctgttccggaagaaagttatactggaagataaagtgaagaacttttacactcgcctgccgttccaaaaactgatggggatatccattagaaataaagtgcccatgtctgaaaaatctatttctaatgggttctttgaatgtgaacgacggtgcgatgcggacccatgctgcactggctttggatttctaaatgtttcccagttaaaaggaggagaggtgacatgtctcactctgaacagcttgggaattcagatgtgcagtgaggagaatggaggagcctggcgcattttggactgtggctctcctgacattgaagtccacacctatcccttcggatggtaccagaagcccattgctcaaaataatgctcccagtttttgccctttggttgttctgccttccctcacagagaaagtgtctctggactcgtggcagtccctggccctctcttcagtggttgttgatccatccattaggcactttgatgttgcccatgtcagcactgctgccaccagcaatttctctgctgtccgagacctctgtttgtcggaatgttcccaacatgaggcctgtctcatcaccactctgcaaacccaacctggggctgtgagatgtatgttctatgctgatactcaaagctgcacacatagtctgcagggtcagaactgccgacttctgcttcgtgaagaggccacccacatctaccggaagccaggaatctctctgctcagctatgaggcatctgtaccttctgtgcccatttccacccatggccggctgctgggcaggtcccaggccatccaggtgggtacctcatggaagcaagtggaccagttccttggagttccatatgctgccccgcccctggcagagaggcgcttccaggcaccagagcccttgaactggacaggctcctgggatgccagcaagccaagggccagctgctggcagccaggcaccagaacatccacgtctcctggagtcagtgaagattgtttgtatctcaatgtgttcatccctcagaatgtggcccctaacgcgtctgtgctggtgttcttccacaacaccatggacagggaggagagtgaaggatggccggctatcgacggctccttcttggctgctgttggcaacctcatcgtggtcactgccagctaccgagtgggtgtcttcggcttcctgagttctgggtccggagaggtgagtggcaactgggggctgctggaccaggtggcggctctgacctgggtgcagacccacatccgaggatttggcggggaccctcggcgcgtgtccctggcagcagaccgtggcggggctgatgtggccagcatccaccttctcacggccagggccaccaactcccaacttttccggagagctgtgctgatgggaggctccgcactctccccggccgccgtcatcagccatgagagggctcagcagcaggcaattgctttggcaaaggaggtcagttgccccatgtcatccagccaagaagtggtgtcctgcctccgccagaagcctgccaatgtcctcaatgatgcccagaccaagctcctggccgtgagtggccctttccactactggggtcctgtgatcgatggccacttcctccgtgagcctccagccagagcactgaagaggtctttacgggtagaggtcgatctgctcattgggagttctcaggacgacgggctcatcaacagagcaaaggctgtgaagcaatttgaggaaagtcgaggccggaccagtagcaaaacagccttttaccaggcactgcagaattctctgggtggcgaggactcagatgcccgcgtcgaggctgctgctacatggtattactctctggagcactccacggatgactatgcctccttctcccgggctctggagaatgccacccgggactactttatcatctgccctataatcgacatggccagtgcctgggcaaagagggcccgaggaaacgtcttcatgtaccatgctcctgaaaactacggccatggcagcctggagctgctggcggatgttcagtttgccttggggcttcccttctacccagcctacgaggggcagttttctctggaggagaagagcctgtcgctgaaaatcatgcagtacttttcccacttcatcagatcaggaaatcccaactacccttatgagttctcacggaaagtacccacatttgcaaccccctggcctgactttgtaccccgtgctggtggagagaactacaaggagttcagtgagctgctccccaatcgacagggcctgaagaaagccgactgctccttctggtccaagtacatctcgtctctgaagacatctgcagatggagccaagggcgggcagtcagcagagagtgaagaggaggagttgacggctggatctgggctaagagaagatctcctaagcctccaggaaccaggctctaagacctacagcaagtgaccagcccttgagctccccaaaaacctcacccgaggctgcccactatggtcatctttttctctaaaatagccacttaccttcaataaagtatctacatgcggtgaa

SEQ ID NO: 447644 - DNA, 4647 bp, Homo sapiens
  misc_feature (12)..(12): n is a, c, g, or t
aatgttgatccnctgccccgactatagaggatcccgtctgagcagctgggaatcacagctgcctcagccccgggcctgccaaggccccagctgtggcagaccatccagacccaagggcactttcagctccagctcccgccgggcaagatgtgcagtgctgactacgcggatttgctgcagactttccaggttttcatattggatgagctgacagcccgcggcttctgccagatccaggtgaagacttttggcaccctggtttccattcctgtctgcaacaactcctctgtgcaggtgggttgtctgaccagggagcgtttaggagtgaatgttacatggaaatcacggcttgaggacatcccagtggcttctcttcctgacttacatgacattgagagagccttggtgggcaaggatctccttgggcgcttcacagatctgatccagagtggctcattccagcttcatctggactccaagacgttcccagcggaaaccatccgcttcctccaaggggaccactttggcacctctcccaggacatggtttgggtgctcggaaggattctaccaagtcttgacaagtgaggccagtcaggacggactgggatgcgttaagtgtcctgaaggaagctattcccaagatgaggaatgcattccttgtcctgttggattctaccaagaacaggcagggagcttggcctgtgtcccatgtcctgtgggcagaacgaccatttctgctggagctttcagccagactcactgtgtcactgactgtcagaggaacgaagcaggcctgcaatgtgaccagaatggccagtatcgagccagccagaaggacaggggcagtgggaaggccttctgtgtggacggcgaggggcggaggctgccatggtgggaaacagaggcccctcttgaggactcacagtgtttgatgatgcagaagtttgagaaggttccagaatcaaaggtgatcttcgacgccaatgctcctgtggctgtcagatccaaagttcctgattctgagttccccgtgatgcagtgcttgacagattgcacagaggacgaggcctgcagcttcttcaccgtgtccacgacggagccagagatttcctgtgatttctatgcttggacaagtgacaatgttgcctgcatgacttctgaccagaaacgagatgcactggggaactcaaaggccaccagctttggaagtcttcgctgccaggtgaaagtgaggagccatggtcaagattctccagctgtgtatttgaaaaagggccaaggatccaccacaacacttcagaaacgctttgaacccactggtttccaaaacatgctttctggattgtacaaccccattgtgttctcagcctcaggagccaatctaaccgatgctcacctcttctgtcttcttgcatgcgaccgtgatctgtgttgcgatggcttcgtcctcacacaggttcaaggaggtgccatcatctgtgggttgctgagctcacccagtgtcctgctttgtaatgtcaaagactggatggatccctctgaagcctgggctaatgctacatgtcctggtgtgacatatgaccaggagagccaccaggtgatattgcgtcttggagaccaggagttcatcaagagtctgacacccttagaaggaactcaagacacctttaccaattttcagcaggtttatctctggaaagattctgacatggggtctcggcctgagtctatgggatgtagaaaagacacagtgccaaggccagcatctccaacagaagcaggtttgacaacagaacttttctcccctgtggacctcaaccaggtcattgtcaatggaaatcaatcactatccagccagaagcactggcttttcaagcacctgttttcagcccagcaggcaaacctatggtgcctttctcgttgtgtgcaggagcactctttctgtcagctcgcagagataacagagagtgcatccttgtacttcacctgcaccctctacccagaggcacaggtgtgtgatgacatcatggagtccaatgcccagggctgcagactgatcctgcctcagatgccaaaggccctgttccggaagaaagttatactggaagataaagtgaagaacttttacactcgcctgccgttccaaaaactgatggggatatccattagaaataaagtgcccatgtctgaaaaatctatttctaatgggttctttgaatgtgaacgacggtgcgatgcggacccatgctgcactggctttggatttctaaatgtttcccagttaaaaggaggagaggtgacatgtctcactctgaacagcttgggaattcagatgtgcagtgaggagaatggaggagcctggcgcattttggactgtggctctcctgacattgaagtccacacctatcccttcggatggtaccagaagcccattgctcaaaataatgctcccagtttttgccctttggttgttctgccttccctcacagagaaagtgtctctggactcgtggcagtccctggccctctcttcagtggttgttgatccatccattaggcactttgatgttgcccatgtcagcactgctgccaccagcaatttctctgctgtccgagacctctgtttgtcggaatgttcccaacatgaggcctgtctcatcaccactctgcaaacccaacctggggctgtgagatgtatgttctatgctgatactcaaagctgcacacatagtctgcagggtcagaactgccgacttctgcttcgtgaagaggccacccacatctaccggaagccaggaatctctctgctcagctatgaggcatctgtaccttctgtgcccatttccacccatggccggctgctgggcaggtcccaggccatccaggtgggtacctcatggaagcaagtggaccagttccttggagttccatatgctgccccgcccctggcagagaggcgcttccaggcaccagagcccttgaactggacaggctcctgggatgccagcaagccaagggccagctgctggcagccaggcaccagaacatccacgtctcctggagtcagtgaagattgtttgtatctcaatgtgttcatccctcagaatgtggcccctaacgcgtctgtgctggtgttcttccacaacaccatggacagggaggagagtgaaggatggccggctatcgacggctccttcttggctgctgttggcaacctcatcgtggtcactgccagctaccgagtgggtgtcttcggcttcctgagttctgggtccggagaggtgagtggcaactgggggctgctggaccaggtggcggctctgacctgggtgcagacccacatccgaggatttggcggggaccctcggcgcgtgtccctggcagcagaccgtggcggggctgatgtggccagcatccaccttctcacggccagggccaccaactcccaacttttccggagagctgtgctgatgggaggctccgcactctccccggccgccgtcatcagccatgagagggctcagcagcaggcaattgctttggcaaaggaggtcagttgccccatgtcatccagccaagaagtggtgtcctgcctccgccagaagcctgccaatgtcctcaatgatgcccagaccaagctcctggccgtgagtggccctttccactactggggtcctgtgatcgatggccacttcctccgtgagcctccagccagagcactgaagaggtctttacgggtagaggtcgatctgctcattgggagttctcaggacgacgggctcatcaacagagcaaaggctgtgaagcaatttgaggaaagtcgaggccggaccagtagcaaaacagccttttaccaggcactgcagaattctctgggtggcgaggactcagatgcccgcgtcgaggctgctgctacatggtattactctctggagcactccacggatgactatgcctccttctcccgggctctggagaatgccacccgggactactttatcatctgccctataatcgacatggccagtgcctgggcaaagagggcccgaggaaacgtcttcatgtaccatgctcctgaaaactacggccatggcagcctggagctgctggcggatgttcagtttgccttggggcttcccttctacccagcctacgaggggcagttttctctggaggagaagagcctgtcgctgaaaatcatgcagtacttttcccacttcatcagatcaggaaatcccaactacccttatgagttctcacggaaagtacccacatttgcaaccccctggcctgactttgtaccccgtgctggtggagagaactacaaggagttcagtgagctgctccccaatcgacagggcctgaagaaagccgactgctccttctggtccaagtacatctcgtctctgaagacatctgcagatggagccaagggcgggcagtcagcagagagtgaagaggaggagttgacggctggatctgggctaagagaagatctcctaagcctccaggaaccaggctctaagacctacagcaagtgaccagcccttgagctccccaaaaacctcacccgaggctgcccactatggtcatctttttctctaaaatagccacttaccttcaataaagtatctacatgcggtgaa

SEQ ID NO: 447645 - DNA, 2762 bp, Homo sapiens
atccagccagaagcactggcttatggtgcctttctcgttgtgtgcaggagcactctttctgtcagctcgcagagataacagagagtgcatccttgtacttcacctgcaccctctacccagaggcacaggtgtgtgatgacatcatggagtccaatgcccagggctgcagactgatcctgcctcagatgccaaaggccctgttccggaagaaagttatactggaagataaagtgaagaacttttacactcgcctgccgttccaaaaactgatggggatatccattagaaataaagtgcccatgtctgaaaaatctatttctaatgggttctttgaatgtgaacgacggtgcgatgcggacccatgctgcactggctttggatttctaaatgtttcccagttaaaaggaggagaggtgacatgtctcactctgaacagcttgggaattcagatgtgcagtgaggagaatggaggagcctggcgcattttggactgtggctctcctgacattgaagtccacacctatcccttcggatggtaccagaagcccattgctcaaaataatgctcccagtttttgccctttggttgttctgccttccctcacagagaaagtgtctctggactcgtggcagtccctggccctctcttcagtggttgttgatccatccattaggcactttgatgttgcccatgtcagcactgctgccaccagcaatttctctgctgtccgagacctctgtttgtcggaatgttcccaacatgaggcctgtctcatcaccactctgcaaacccaacctggggctgtgagatgtatgttctatgctgatactcaaagctgcacacatagtctgcagggtcagaactgccgacttctgcttcgtgaagaggccacccacatctaccggaagccaggaatctctctgctcagctatgaggcatctgtaccttctgtgcccatttccacccatggccggctgctgggcaggtcccaggccatccaggtgggtacctcatggaagcaagtggaccagttccttggagttccatatgctgccccgcccctggcagagaggcgcttccaggcaccagagcccttgaactggacaggctcctgggatgccagcaagccaagggccagctgctggcagccaggcaccagaacatccacgtctcctggagtcagtgaagattgtttgtatctcaatgtgttcatccctcagaatgtggcccctaacgcgtctgtgctggtgttcttccacaacaccatggacagggaggagagtgaaggatggccggctatcgacggctccttcttggctgctgttggcaacctcatcgtggtcactgccagctaccgagtgggtgtcttcggcttcctgagttctgggtccggagaggtgagtggcaactgggggctgctggaccaggtggcggctctgacctgggtgcagacccacatccgaggatttggcggggaccctcggcgcgtgtccctggcagcagaccgtggcggggctgatgtggccagcatccaccttctcacggccagggccaccaactcccaacttttccggagagctgtgctgatgggaggctccgcactctccccggccgccgtcatcagccatgagagggctcagcagcaggcaattgctttggcaaaggaggtcagttgccccatgtcatccagccaagaagtggtgtcctgcctccgccagaagcctgccaatgtcctcaatgatgcccagaccaagctcctggccgtgagtggccctttccactactggggtcctgtgatcgatggccacttcctccgtgagcctccagccagagcactgaagaggtctttacgggtagaggtcgatctgctcattgggagttctcaggacgacgggctcatcaacagagcaaaggctgtgaagcaatttgaggaaagtcgaggccggaccagtagcaaaacagccttttaccaggcactgcagaattctctgggtggcgaggactcagatgcccgcgtcgaggctgctgctacatggtattactctctggagcactccacggatgactatgcctccttctcccgggctctggagaatgccacccgggactactttatcatctgccctataatcgacatggccagtgcctgggcaaagagggcccgaggaaacgtcttcatgtaccatgctcctgaaaactacggccatggcagcctggagctgctggcggatgttcagtttgccttggggcttcccttctacccagcctacgaggggcagttttctctggaggagaagagcctgtcgctgaaaatcatgcagtacttttcccacttcatcagatcaggaaatcccaactacccttatgagttctcacggaaagtacccacatttgcaaccccctggcctgactttgtaccccgtgctggtggagagaactacaaggagttcagtgagctgctccccaatcgacagggcctgaagaaagccgactgctccttctggtccaagtacatctcgtctctgaagacatctgcagatggagccaagggcgggcagtcagcagagagtgaagaggaggagttgacggctggatctgggctaagagaagatctcctaagcctccaggaaccaggctctaagacctacagcaagtgaccagcccttgagctccccaaaaacctcacccgaggctgcccactatggtcatctttttctctaaaatagccacttaccttcaataaagtatctacatgcggtgaa

SEQ ID NO: 447646 - DNA, 8107 bp, Homo sapiens
catctcagtcgacttagagacccccctggttgttcatcagagggattgaagtgtatggaccgccagctgggaagccaaagcgatgtccaaggagctgtgaaataagaaatcgtcgtcttctccacggggtgggagataagtcaccaccccagtgttctgcggagggagagtttatgcctgtccagtgcaaatttgtcaacaccacagacatgatgatttttgatctggtccacagctacaacaggtttccagatgcatttgtgaccttcagttccttccagaggaggttccctgaggtatctgggtattgccactgtgctgacagccaagggcgggaactggctgagacaggtttggagttgttactggatgaaatttatgacaccatttttgctggcctggaccttccttccaccttcactgaaaccaccctgtaccggatactgcagagacggttcctcgcagttcaatcagtcatctctggcagattccgatgccccacaaaatgtgaagtggagcggtttacagcaaccagctttggtcacccctatgttccaagctgccgccgaaatggcgactatcaggcggtgcagtgccagacggaagggccctgctggtgtgtggacgcccaggggaaggaaatgcatggaacccggcagcaaggggagccgccatcttgtgctgaaggccaatcttgtgcctccgaaaggcagcaggccttgtccagactctactttgggacctcaggctacttcagccagcacgacctgttctcttccccagagaaaagatgggcctctccaagagtagccagatttgccacatcctgcccacccacgatcaaggagctctttgtggactctgggcttctccgcccaatggtggagggacagagccaacagttttctgtctcagaaaatcttctcaaagaagccatccgagcaatttttccctcccgagggctggctcgtcttgcccttcagtttaccaccaacccaaagagactccagcaaaacctttttggagggaaatttttggtgaatgttggccagtttaacttgtctggagcccttggcacaagaggcacatttaacttcagtcaatttttccagcaacttggtcttgcaagcttcttgaatggagggagacaagaagatttggccaagccactctctgtgggattagattcaaattcttccacaggaacccctgaagctgctaagaaggatggtactatgaataagccaactgtgggcagctttggctttgaaattaacctacaagagaaccaaaatgccctcaaattccttgcttctctcctggagcttccagaattccttctcttcttgcaacatgctatctctgtgccagaagatgtggcaagagatttaggtgatgtgatggaaacggtactcagctcccagacctgtgagcagacacctgaaaggctatttgtcccatcatgcacgacagaaggaagctatgaggatgtccaatgcttttccggagagtgctggtgtgtgaattcctggggcaaagagcttccaggctcaagagtcagaggtggacagccaaggtgccccacagactgtgaaaagcaaagggctcgcatgcaaagcctcatgggcagccagcctgctggctccaccttgtttgtccctgcttgtactagtgagggacatttcctgcctgtccagtgcttcaactcagagtgctactgtgttgatgctgagggtcaggccattcctggaactcgaagtgcaatagggaagcccaagaaatgccccacgccctgtcaattacagtctgagcaagctttcctcaggacggtgcaggccctgctctctaactccagcatgctacccaccctttccgacacctacatcccacagtgcagcaccgatgggcagtggagacaagtgcaatgcaatgggcctcctgagcaggtcttcgagttgtaccaacgatgggaggctcagaacaagggccaggatctgacgcctgccaagctgctagtgaagatcatgagctacagagaagcagcttccggaaacttcagtctctttattcaaagtctgtatgaggctggccagcaagatgtcttcccggtgctgtcacaatacccttctctgcaagatgtcccactagcagcactggaagggaaacggccccagcccagggagaatatcctcctggagccctacctcttctggcagatcttaaatggccaactcagccaatacccggggtcctactcagacttcagcactcctttggcacattttgatcttcggaactgctggtgtgtggatgaggctggccaagaactggaaggaatgcggtctgagccaagcaagctcccaacatgtcctggctcctgtgaggaagcaaagctccgtgtactgcagttcattagggaaacggaagagattgtttcagcttccaacagttctcggttccctctgggggagagtttcctggtggccaagggaatccggctgaggaatgaggacctcggccttcctccgctcttcccgccccgggaggctttcgcggagcagtttctgcgtgggagtgattacgccattcgcctggcggctcagtctaccttaagcttctatcagagacgccgcttttccccggacgactcggctggagcatccgcccttctgcggtcgggcccctacatgccacagtgtgatgcgtttggaagttgggagcctgtgcagtgccacgctgggactgggcactgctggtgtgtagatgagaaaggagggttcatccctggctcactgactgcccgctctctgcagattccacagtgcccgacaacctgcgagaaatctcgaaccagtgggctgctttccagttggaaacaggctagatcccaagaaaacccatctccaaaagacctgttcgtcccagcctgcctagaaacaggagagtatgccaggctgcaggcatcgggggctggcacctggtgtgtggaccctgcatcaggagaagagttgcggcctggctcgagcagcagtgcccagtgcccaagcctctgcaatgtgctcaagagtggagtcctctccaggagagtcagcccaggctatgtcccagcctgcagggcagaggatgggggcttttccccagtgcaatgtgaccaggcccagggcagctgctggtgtgtcatggacagcggagaagaggtgcctgggacgcgcgtgaccgggggccagcccgcctgtgagagcccgcggtgtccgctgccattcaacgcgtcggaggtggttggtggaacaatcctgtgtgagacaatctcgggccccacaggctctgccatgcagcagtgccaattgctgtgccgccagggctcctggagcgtgtttccaccagggccattgatatgtagcctggagagcggacgctgggagtcacagctgcctcagccccgggcctgccaacggccccagctgtggcagaccatccagacccaagggcactttcagctccagctcccgccgggcaagatgtgcagtgctgactacgcggatttgctgcagactttccaggttttcatattggatgagctgacagcccgcggcttctgccagatccaggtgaagacttttggcaccctggtttccattcctgtctgcaacaactcctctgtgcaggtgggttgtctgaccagggagcgtttaggagtgaatgttacatggaaatcacggcttgaggacatcccagtggcttctcttcctgacttacatgacattgagagagccttggtgggcaaggatctccttgggcgcttcacagatctgatccagagtggctcattccagcttcatctggactccaagacgttcccagcggaaaccatccgcttcctccaaggggaccactttggcacctctcccaggacatggtttgggtgctcggaaggattctaccaagtcttgacaagtgaggccagtcaggacggactgggatgcgttaagtgtcctgaaggaagctattcccaagatgaggaatgcattccttgtcctgttggattctaccaagaacaggcagggagcttggcctgtgtcccatgtcctgtgggcagaacgaccatttctgctggagctttcagccagactcactgtgtcactgactgtcagaggaacgaagcaggcctgcaatgtgaccagaatggccagtatcgagccagccagaaggacaggggcagtgggaaggccttctgtgtggacggcgaggggcggaggctgccatggtgggaaacagaggcccctcttgaggactcacagtgtttgatgatgcagaagtttgagaaggttccagaatcaaaggtgatcttcgacgccaatgctcctgtggctgtcagatccaaagttcctgattctgagttccccgtgatgcagtgcttgacagattgcacagaggacgaggcctgcagcttcttcaccgtgtccacgacggagccagagatttcctgtgatttctatgcttggacaagtgacaatgttgcctgcatgacttctgaccagaaacgagatgcactggggaactcaaaggccaccagctttggaagtcttcgctgccaggtgaaagtgaggagccatggtcaagattctccagctgtgtatttgaaaaagggccaaggatccaccacaacacttcagaaacgctttgaacccactggtttccaaaacatgctttctggattgtacaaccccattgtgttctcagcctcaggagccaatctaaccgatgctcacctcttctgtcttcttgcatgcgaccgtgatctgtgttgcgatggcttcgtcctcacacaggttcaaggaggtgccatcatctgtgggttgctgagctcacccagtgtcctgctttgtaatgtcaaagactggatggatccctctgaagcctgggctaatgctacatgtcctggtgtgacatatgaccaggagagccaccaggtgatattgcgtcttggagaccaggagttcatcaagagtctgacacccttagaaggaactcaagacacctttaccaattttcagcaggtttatctctggaaagattctgacatggggtctcggcctgagtctatgggatgtagaaaagacacagtgccaaggccagcatctccaacagaagcaggtttgacaacagaacttttctcccctgtggacctcaaccaggtcattgtcaatggaaatcaatcactatccagccagaagcactggcttttcaagcacctgttttcagcccagcaggcaaacctatggtgcctttctcgttgtgtgcaggagcactctttctgtcagctcgcagagataacagagagtgcatccttgtacttcacctgcaccctctacccagaggcacaggtgtgtgatgacatcatggagtccaatgcccagggctgcagactgatcctgcctcagatgccaaaggccctgttccggaagaaagttatactggaagataaagtgaagaacttttacactcgcctgccgttccaaaaactgatggggatatccattagaaataaagtgcccatgtctgaaaaatctatttctaatgggttctttgaatgtgaacgacggtgcgatgcggacccatgctgcactggctttggatttctaaatgtttcccagttaaaaggaggagaggtgacatgtctcactctgaacagcttgggaattcagatgtgcagtgaggagaatggaggagcctggcgcattttggactgtggctctcctgacattgaagtccacacctatcccttcggatggtaccagaagcccattgctcaaaataatgctcccagtttttgccctttggttgttctgccttccctcacagagaaagtgtttaaagtccgggaggtgagagggacccagctgaagaggatggagtgagggcttccgtataactggagtacctggtgtcatgggaagtgtctctggactcgtggcagtccctggccctctcttcagtggttgttgatccatccattaggcactttgatgttgcccatgtcagcactgctgccaccagcaatttctctgctgtccgagacctctgtttgtcggaatgttcccaacatgaggcctgtctcatcaccactctgcaaacccaacctggggctgtgagatgtatgttctatgctgatactcaaagctgcacacatagtctgcagggtcagaactgccgacttctgcttcgtgaagaggccacccacatctaccggaagccaggaatctctctgctcagctatgaggcatctgtaccttctgtgcccatttccacccatggccggctgctgggcaggtcccaggccatccaggtgggtacctcatggaagcaagtggaccagttccttggagttccatatgctgccccgcccctggcagagaggcgcttccaggcaccagagcccttgaactggacaggctcctgggatgccagcaagccaagggccagctgctggcagccaggcaccagaacatccacgtctcctggagtcagtgaagattgtttgtatctcaatgtgttcatccctcagaatgtggcccctaacgcgtctgtgctggtgttcttccacaacaccatggacagggaggagagtgaaggatggccggctatcgacggctccttcttggctgctgttggcaacctcatcgtggtcactgccagctaccgagtgggtgtcttcggcttcctgagttctgggtccggagaggtgagtggcaactgggggctgctggaccaggtggcggctctgacctgggtgcagacccacatccgaggatttggcggggaccctcggcgcgtgtccctggcagcagaccgtggcggggctgatgtggccagcatccaccttctcacggccagggccaccaactcccaacttttccggagagctgtgctgatgggaggctccgcactctccccggccgccgtcatcagccatgagagggctcagcagcaggcaattgctttggcaaaggaggtcagttgccccatgtcatccagccaagaagtggtgtcctgcctccgccagaagcctgccaatgtcctcaatgatgcccagaccaagctcctggccgtgagtggccctttccactactggggtcctgtgatcgatggccacttcctccgtgagcctccagccagagcactgaagaggtctttacgggtagaggtcgatctgctcattgggagttctcaggacgacgggctcatcaacagagcaaaggctgtgaagcaatttgaggaaagtcgaggccggaccagtagcaaaacagccttttaccaggcactgcagaattctctgggtggcgaggactcagatgcccgcgtcgaggctgctgctacatggtattactctctggagcactccacggatgactatgcctccttctcccgggctctggagaatgccacccgggactactttatcatctgccctataatcgacatggccagtgcctgggcaaagagggcccgaggaaacgtcttcatgtaccatgctcctgaaaactacggccatggcagcctggagctgctggcggatgttcagtttgccttggggcttcccttctacccagcctacgaggggcagttttctctggaggagaagagcctgtcgctgaaaatcatgcagtacttttcccacttcatcagatcaggaaatcccaactacccttatgagttctcacggaaagtacccacatttgcaaccccctggcctgactttgtaccccgtgctggtggagagaactacaaggagttcagtgagctgctccccaatcgacagggcctgaagaaagccgactgctccttctggtccaagtacatctcgtctctgaagacatctgcagatggagccaagggcgggcagtcagcagagagtgaagaggaggagttgacggctggatctgggctaagagaagatctcctaagcctccaggaaccaggctctaagacctacagcaagtgaccagcccttgagctccccaaaaacctcacccgaggctgcccactatggtcatctttttctctaaaatagccacttaccttcaataaagtatctacatgcggtgaa

SEQ ID NO: 447647 - DNA, 8218 bp, Homo sapiens
catctcagtcgacttagagacccccctggttgttcatcagagggattgaagtgtatggaccgccagctgggaagccaaagcgatgtccaaggagctgtgaaataagaaatcgtcgtcttctccacggggtgggagataagtcaccaccccagtgttctgcggagggagagtttatgcctgtccagtgcaaatttgtcaacaccacagacatgatgatttttgatctggtccacagctacaacaggtttccagatgcatttgtgaccttcagttccttccagaggaggttccctgaggtatctgggtattgccactgtgctgacagccaagggcgggaactggctgagacaggtttggagttgttactggatgaaatttatgacaccatttttgctggcctggaccttccttccaccttcactgaaaccaccctgtaccggatactgcagagacggttcctcgcagttcaatcagtcatctctggcagattccgatgccccacaaaatgtgaagtggagcggtttacagcaaccagctttggtcacccctatgttccaagctgccgccgaaatggcgactatcaggcggtgcagtgccagacggaagggccctgctggtgtgtggacgcccaggggaaggaaatgcatggaacccggcagcaaggggagccgccatcttgtgctgaaggccaatcttgtgcctccgaaaggcagcaggccttgtccagactctactttgggacctcaggctacttcagccagcacgacctgttctcttccccagagaaaagatgggcctctccaagagtagccagatttgccacatcctgcccacccacgatcaaggagctctttgtggactctgggcttctccgcccaatggtggagggacagagccaacagttttctgtctcagaaaatcttctcaaagaagccatccgagcaatttttccctcccgagggctggctcgtcttgcccttcagtttaccaccaacccaaagagactccagcaaaacctttttggagggaaatttttggtgaatgttggccagtttaacttgtctggagcccttggcacaagaggcacatttaacttcagtcaatttttccagcaacttggtcttgcaagcttcttgaatggagggagacaagaagatttggccaagccactctctgtgggattagattcaaattcttccacaggaacccctgaagctgctaagaaggatggtactatgaataagccaactgtgggcagctttggctttgaaattaacctacaagagaaccaaaatgccctcaaattccttgcttctctcctggagcttccagaattccttctcttcttgcaacatgctatctctgtgccagaagatgtggcaagagatttaggtgatgtgatggaaacggtactcagctcccagacctgtgagcagacacctgaaaggctatttgtcccatcatgcacgacagaaggaagctatgaggatgtccaatgcttttccggagagtgctggtgtgtgaattcctggggcaaagagcttccaggctcaagagtcagaggtggacagccaaggtgccccacagactgtgaaaagcaaagggctcgcatgcaaagcctcatgggcagccagcctgctggctccaccttgtttgtccctgcttgtactagtgagggacatttcctgcctgtccagtgcttcaactcagagtgctactgtgttgatgctgagggtcaggccattcctggaactcgaagtgcaatagggaagcccaagaaatgccccacgccctgtcaattacagtctgagcaagctttcctcaggacggtgcaggccctgctctctaactccagcatgctacccaccctttccgacacctacatcccacagtgcagcaccgatgggcagtggagacaagtgcaatgcaatgggcctcctgagcaggtcttcgagttgtaccaacgatgggaggctcagaacaagggccaggatctgacgcctgccaagctgctagtgaagatcatgagctacagagaagcagcttccggaaacttcagtctctttattcaaagtctgtatgaggctggccagcaagatgtcttcccggtgctgtcacaatacccttctctgcaagatgtcccactagcagcactggaagggaaacggccccagcccagggagaatatcctcctggagccctacctcttctggcagatcttaaatggccaactcagccaatacccggggtcctactcagacttcagcactcctttggcacattttgatcttcggaactgctggtgtgtggatgaggctggccaagaactggaaggaatgcggtctgagccaagcaagctcccaacatgtcctggctcctgtgaggaagcaaagctccgtgtactgcagttcattagggaaacggaagagattgtttcagcttccaacagttctcggttccctctgggggagagtttcctggtggccaagggaatccggctgaggaatgaggacctcggccttcctccgctcttcccgccccgggaggctttcgcggagcagtttctgcgtgggagtgattacgccattcgcctggcggctcagtctaccttaagcttctatcagagacgccgcttttccccggacgactcggctggagcatccgcccttctgcggtcgggcccctacatgccacagtgtgatgcgtttggaagttgggagcctgtgcagtgccacgctgggactgggcactgctggtgtgtagatgagaaaggagggttcatccctggctcactgactgcccgctctctgcagattccacagtgcccgacaacctgcgagaaatctcgaaccagtgggctgctttccagttggaaacaggctagatcccaagaaaacccatctccaaaagacctgttcgtcccagcctgcctagaaacaggagagtatgccaggctgcaggcatcgggggctggcacctggtgtgtggaccctgcatcaggagaagagttgcggcctggctcgagcagcagtgcccagtgcccaagcctctgcaatgtgctcaagagtggagtcctctccaggagagtcagcccaggctatgtcccagcctgcagggcagaggatgggggcttttccccagtgcaatgtgaccaggcccagggcagctgctggtgtgtcatggacagcggagaagaggtgcctgggacgcgcgtgaccgggggccagcccgcctgtgagagcccgcggtgtccgctgccattcaacgcgtcggaggtggttggtggaacaatcctgtgtgagacaatctcgggccccacaggctctgccatgcagcagtgccaattgctgtgccgccagggctcctggagcgtgtttccaccagggccattgatatgtagcctggagagcggacgctgggagtcacagctgcctcagccccgggcctgccaacggccccagctgtggcagaccatccagacccaagggcactttcagctccagctcccgccgggcaagatgtgcagtgctgactacgcggatttgctgcagactttccaggttttcatattggatgagctgacagcccgcggcttctgccagatccaggtgaagacttttggcaccctggtttccattcctgtctgcaacaactcctctgtgcaggtgggttgtctgaccagggagcgtttaggagtgaatgttacatggaaatcacggcttgaggacatcccagtggcttctcttcctgacttacatgacattgagagagccttggtgggcaaggatctccttgggcgcttcacagatctgatccagagtggctcattccagcttcatctggactccaagacgttcccagcggaaaccatccgcttcctccaaggggaccactttggcacctctcccaggacatggtttgggtgctcggaaggattctaccaagtcttgacaagtgaggccagtcaggacggactgggatgcgttaagtgtcctgaaggaagctattcccaagatgaggaatgcattccttgtcctgttggattctaccaagaacaggcagggagcttggcctgtgtcccatgtcctgtgggcagaacgaccatttctgctggagctttcagccagactcactgtgtcactgactgtcagaggaacgaagcaggcctgcaatgtgaccagaatggccagtatcgagccagccagaaggacaggggcagtgggaaggccttctgtgtggacggcgaggggcggaggctgccatggtgggaaacagaggcccctcttgaggactcacagtgtttgatgatgcagaagtttgagaaggttccagaatcaaaggtgatcttcgacgccaatgctcctgtggctgtcagatccaaagttcctgattctgagttccccgtgatgcagtgcttgacagattgcacagaggacgaggcctgcagcttcttcaccgtgtccacgacggagccagagatttcctgtgatttctatgcttggacaagtgacaatgttgcctgcatgacttctgaccagaaacgagatgcactggggaactcaaaggccaccagctttggaagtcttcgctgccaggtgaaagtgaggagccatggtcaagattctccagctgtgtatttgaaaaagggccaaggatccaccacaacacttcagaaacgctttgaacccactggtttccaaaacatgctttctggattgtacaaccccattgtgttctcagcctcaggagccaatctaaccgatgctcacctcttctgtcttcttgcatgcgaccgtgatctgtgttgcgatggcttcgtcctcacacaggttcaaggaggtgccatcatctgtgggttgctgagctcacccagtgtcctgctttgtaatgtcaaagactggatggatccctctgaagcctgggctaatgctacatgtcctggtgtgacatatgaccaggagagccaccaggtgatattgcgtcttggagaccaggagttcatcaagagtctgacacccttagaaggaactcaagacacctttaccaattttcagcaggtttatctctggaaagattctgacatggggtctcggcctgagtctatgggatgtagaaaagacacagtgccaaggccagcatctccaacagaagcaggtttgacaacagaacttttctcccctgtggacctcaaccaggtcattgtcaatggaaatcaatcactatccagccagaagcactggcttttcaagcacctgttttcagcccagcaggcaaacctatggtgcctttctcgttgtgtgcaggagcactctttctgtcagctcgcagagataacagagagtgcatccttgtacttcacctgcaccctctacccagaggcacaggtgtgtgatgacatcatggagtccaatgcccagggctgcagactgatcctgcctcagatgccaaaggccctgttccggaagaaagttatactggaagataaagtgaagaacttttacactcgcctgccgttccaaaaactgatggggatatccattagaaataaagtgcccatgtctgaaaaatctatttctaatgggttctttgaatgtgaacgacggtgcgatgcggacccatgctgcactggctttggatttctaaatgtttcccagttaaaaggaggagaggtgacatgtctcactctgaacagcttgggaattcagatgtgcagtgaggagaatggaggagcctggcgcattttggactgtggctctcctgacattgaagtccacacctatcccttcggatggtaccagaagcccattgctcaaaataatgctcccagtttttgccctttggttgttctgccttccctcacagagaaagtgtctctggactcgtggcagtccctggccctctcttcagtggttgttgatccatccattaggcactttgatgttgcccatgtcagcactgctgccaccagcaatttctctgctgtccgagacctctgtttgtcggaatgttcccaacatgaggcctgtctcatcaccactctgcaaacccaacctggggctgtgagatgtatgttctatgctgatactcaaagctgcacacatagtctgcagggtcagaactgccgacttctgcttcgtgaagaggccacccacatctaccggaagccaggaatctctctgctcagctatgaggcatctgtaccttctgtgcccatttccacccatggccggctgctgggcaggtcccaggccatccaggtgggtacctcatggaagcaagtggaccagttccttggagttccatatgctgccccgcccctggcagagaggcgcttccaggcaccagagcccttgaactggacaggctcctgggatgccagcaagccaagggccagctgctggcagccaggcaccagaacatccacgtctcctggagtcagtgaagattgtttgtatctcaatgtgttcatccctcagaatgtggcccctaacgcgtctgtgctggtgttcttccacaacaccatggacagggaggagagtgaaggatggccggctatcgacggctccttcttggctgctgttggcaacctcatcgtggtcactgccagctaccgagtgggtgtcttcggcttcctgagttctgggtccggagaggtgagtggcaactgggggctgctggaccaggtggcggctctgacctgggtgcagacccacatccgaggatttggcggggaccctcggcgcgtgtccctggcagcagaccgtggcggggctgatgtggccagcatccaccttctcacggccagggccaccaactcccaacttttccggagagctgtgctgatgggaggctccgcactctccccggccgccgtcatcagccatgagagggctcagcagcaggcaattgctttggcaaaggaggtcagttgccccatgtcatccagccaagaagtggtgtcctgcctccgccagaagcctgccaatgtcctcaatgatgcccagaccaagctcctggccgtgagtggccctttccactactggggtcctgtgatcgatggccacttcctccgtgagcctccagccagagcactgaagaggtctttacgggtagaggtcgatctgctcattgggagttctcaggacgacgggctcatcaacagagcaaaggctgtgaagcaatttgaggaaagtcgaggccggaccagtagcaaaacagccttttaccaggcactgcagaattctctgggtggcgaggactcagatgcccgcgtcgaggctgctgctacatggtattactctctggagcactccacggatgactatgcctccttctcccgggctctggagaatgccacccgggactactttatcatctgccctataatcgacatggccagtgcctgggcaaagagggcccgaggaaacgtcttcatgtaccatgctcctgaaaactacggccatggcagcctggagctgctggcggatgttcagtttgccttggggcttcccttctacccagcctacgaggggcagttttctctggaggagaagagcctgtcgctgaaaatcatgcagtacttttcccacttcatcagatcaggaaatcccaactacccttatgagttctcacggaaagtacccacatttgcaaccccctggcctgactttgtaccccgtgctggtggagagaactacaaggagttcagtgagctgctccccaatcgacagggcctgaagaaagccgactgctccttctggtccaagtacatctcgtctctgaagacatctgcagatggagccaagggcgggcagtcagcagagagtgaagaggaggagttgacggctggatctgggctaagagaagatctcctaagcctccaggaaccaggctctaagacctacagcaagtgaccagcccttgagctccccaaaaacctcacccgaggctgcccactatggtcatctttttctctaaaatagccacttaccttcaataaagtatctacatgcggtgaatgcggtgaagcattgttgactctaatgtgtgaatccaaggcaattcgttggtaacaccaactatatcttaataatctttctaaggtttgaatcccaggctgctgtttccattcaacaaatgtttatgagcatctgttatgcaccaggccctgtgctgggtgctggagaaacaaggactttgctcctccagaaggagagaa

SEQ ID NO: 447648 - DNA, 7981 bp, Homo sapiens
catctcagtcgacttagagacccccctggttgttcatcagagggattgaagtgtatggaccgccagctgggaagccaaagcgatgtccaaggagctgtgaaataagaaatcgtcgtcttctccacggggtgggagataagtcaccaccccagtgttctgcggagggagagtttatgcctgtccagtgcaaatttgtcaacaccacagacatgatgatttttgatctggtccacagctacaacaggtttccagatgcatttgtgaccttcagttccttccagaggaggttccctgaggtatctgggtattgccactgtgctgacagccaagggcgggaactggctgagacaggtttggagttgttactggatgaaatttatgacaccatttttgctggcctggaccttccttccaccttcactgaaaccaccctgtaccggatactgcagagacggttcctcgcagttcaatcagtcatctctggcagattccgatgccccacaaaatgtgaagtggagcggtttacagcaaccagctttggtcacccctatgttccaagctgccgccgaaatggcgactatcaggcggtgcagtgccagacggaagggccctgctggtgtgtggacgcccaggggaaggaaatgcatggaacccggcagcaaggggagccgccatcttgtgctgaaggccaatcttgtgcctccgaaaggcagcaggccttgtccagactctactttgggacctcaggctacttcagccagcacgacctgttctcttccccagagaaaagatgggcctctccaagagtagccagatttgccacatcctgcccacccacgatcaaggagctctttgtggactctgggcttctccgcccaatggtggagggacagagccaacagttttctgtctcagaaaatcttctcaaagaagccatccgagcaatttttccctcccgagggctggctcgtcttgcccttcagtttaccaccaacccaaagagactccagcaaaacctttttggagggaaatttttggtgaatgttggccagtttaacttgtctggagcccttggcacaagaggcacatttaacttcagtcaatttttccagcaacttggtcttgcaagcttcttgaatggagggagacaagaagatttggccaagccactctctgtgggattagattcaaattcttccacaggaacccctgaagctgctaagaaggatggtactatgaataagccaactgtgggcagctttggctttgaaattaacctacaagagaaccaaaatgccctcaaattccttgcttctctcctggagcttccagaattccttctcttcttgcaacatgctatctctgtgccagaagatgtggcaagagatttaggtgatgtgatggaaacggtactcagctcccagacctgtgagcagacacctgaaaggctatttgtcccatcatgcacgacagaaggaagctatgaggatgtccaatgcttttccggagagtgctggtgtgtgaattcctggggcaaagagcttccaggctcaagagtcagaggtggacagccaaggtgccccacagactgtgaaaagcaaagggctcgcatgcaaagcctcatgggcagccagcctgctggctccaccttgtttgtccctgcttgtactagtgagggacatttcctgcctgtccagtgcttcaactcagagtgctactgtgttgatgctgagggtcaggccattcctggaactcgaagtgcaatagggaagcccaagaaatgccccacgccctgtcaattacagtctgagcaagctttcctcaggacggtgcaggccctgctctctaactccagcatgctacccaccctttccgacacctacatcccacagtgcagcaccgatgggcagtggagacaagtgcaatgcaatgggcctcctgagcaggtcttcgagttgtaccaacgatgggaggctcagaacaagggccaggatctgacgcctgccaagctgctagtgaagatcatgagctacagagaagcagcttccggaaacttcagtctctttattcaaagtctgtatgaggctggccagcaagatgtcttcccggtgctgtcacaatacccttctctgcaagatgtcccactagcagcactggaagggaaacggccccagcccagggagaatatcctcctggagccctacctcttctggcagatcttaaatggccaactcagccaatacccggggtcctactcagacttcagcactcctttggcacattttgatcttcggaactgctggtgtgtggatgaggctggccaagaactggaaggaatgcggtctgagccaagcaagctcccaacatgtcctggctcctgtgaggaagcaaagctccgtgtactgcagttcattagggaaacggaagagattgtttcagcttccaacagttctcggttccctctgggggagagtttcctggtggccaagggaatccggctgaggaatgaggacctcggccttcctccgctcttcccgccccgggaggctttcgcggagcagtttctgcgtgggagtgattacgccattcgcctggcggctcagtctaccttaagcttctatcagagacgccgcttttccccggacgactcggctggagcatccgcccttctgcggtcgggcccctacatgccacagtgtgatgcgtttggaagttgggagcctgtgcagtgccacgctgggactgggcactgctggtgtgtagatgagaaaggagggttcatccctggctcactgactgcccgctctctgcagattccacagtgcccgacaacctgcgagaaatctcgaaccagtgggctgctttccagttggaaacaggctagatcccaagaaaacccatctccaaaagacctgttcgtcccagcctgcctagaaacaggagagtatgccaggctgcaggcatcgggggctggcacctggtgtgtggaccctgcatcaggagaagagttgcggcctggctcgagcagcagtgcccagtgcccaagcctctgcaatgtgctcaagagtggagtcctctccaggagagtcagcccaggctatgtcccagcctgcagggcagaggatgggggcttttccccagtgcaatgtgaccaggcccagggcagctgctggtgtgtcatggacagcggagaagaggtgcctgggacgcgcgtgaccgggggccagcccgcctgtgagagcccgcggtgtccgctgccattcaacgcgtcggaggtggttggtggaacaatcctgtgtgagacaatctcgggccccacaggctctgccatgcagcagtgccaattgctgtgccgccagggctcctggagcgtgtttccaccagggccattgatatgtagcctggagagcggacgctgggagtcacagctgcctcagccccgggcctgccaacggccccagctgtggcagaccatccagacccaagggcactttcagctccagctcccgccgggcaagatgtgcagtgctgactacgcggatttgctgcagactttccaggttttcatattggatgagctgacagcccgcggcttctgccagatccaggtgaagacttttggcaccctggtttccattcctgtctgcaacaactcctctgtgcaggtgggttgtctgaccagggagcgtttaggagtgaatgttacatggaaatcacggcttgaggacatcccagtggcttctcttcctgacttacatgacattgagagagccttggtgggcaaggatctccttgggcgcttcacagatctgatccagagtggctcattccagcttcatctggactccaagacgttcccagcggaaaccatccgcttcctccaaggggaccactttggcacctctcccaggacatggtttgggtgctcggaaggattctaccaagtcttgacaagtgaggccagtcaggacggactgggatgcgttaagtgtcctgaaggaagctattcccaagatgaggaatgcattccttgtcctgttggattctaccaagaacaggcagggagcttggcctgtgtcccatgtcctgtgggcagaacgaccatttctgctggagctttcagccagactcactgtgtcactgactgtcagaggaacgaagcaggcctgcaatgtgaccagaatggccagtatcgagccagccagaaggacaggggcagtgggaaggccttctgtgtggacggcgaggggcggaggctgccatggtgggaaacagaggcccctcttgaggactcacagtgtttgatgatgcagaagtttgagaaggttccagaatcaaaggtgatcttcgacgccaatgctcctgtggctgtcagatccaaagttcctgattctgagttccccgtgatgcagtgcttgacagattgcacagaggacgaggcctgcagcttcttcaccgtgtccacgacggagccagagatttcctgtgatttctatgcttggacaagtgacaatgttgcctgcatgacttctgaccagaaacgagatgcactggggaactcaaaggccaccagctttggaagtcttcgctgccaggtgaaagtgaggagccatggtcaagattctccagctgtgtatttgaaaaagggccaaggatccaccacaacacttcagaaacgctttgaacccactggtttccaaaacatgctttctggattgtacaaccccattgtgttctcagcctcaggagccaatctaaccgatgctcacctcttctgtcttcttgcatgcgaccgtgatctgtgttgcgatggcttcgtcctcacacaggttcaaggaggtgccatcatctgtgggttgctgagctcacccagtgtcctgctttgtaatgtcaaagactggatggatccctctgaagcctgggctaatgctacatgtcctggtgtgacatatgaccaggagagccaccaggtgatattgcgtcttggagaccaggagttcatcaagagtctgacacccttagaaggaactcaagacacctttaccaattttcagcaggtttatctctggaaagattctgacatggggtctcggcctgagtctatgggatgtagaaaagacacagtgccaaggccagcatctccaacagaagcaggtttgacaacagaacttttctcccctgtggacctcaaccaggtcattgtcaatggaaatcaatcactatccagccagaagcactggcttttcaagcacctgttttcagcccagcaggcaaacctatggtgcctttctcgttgtgtgcaggagcactctttctgtcagctcgcagagataacagagagtgcatccttgtacttcacctgcaccctctacccagaggcacaggtgtgtgatgacatcatggagtccaatgcccagggctgcagactgatcctgcctcagatgccaaaggccctgttccggaagaaagttatactggaagataaagtgaagaacttttacactcgcctgccgttccaaaaactgatggggatatccattagaaataaagtgcccatgtctgaaaaatctatttctaatgggttctttgaatgtgaacgacggtgcgatgcggacccatgctgcactggctttggatttctaaatgtttcccagttaaaaggaggagaggtgacatgtctcactctgaacagcttgggaattcagatgtgcagtgaggagaatggaggagcctggcgcattttggactgtggctctcctgacattgaagtccacacctatcccttcggatggtaccagaagcccattgctcaaaataatgctcccagtttttgccctttggttgttctgccttccctcacagagaaagtgtctctggactcgtggcagtccctggccctctcttcagtggttgttgatccatccattaggcactttgatgttgcccatgtcagcactgctgccaccagcaatttctctgctgtccgagacctctgtttgtcggaatgttcccaacatgaggcctgtctcatcaccactctgcaaacccaacctggggctgtgagatgtatgttctatgctgatactcaaagctgcacacatagtctgcagggtcagaactgccgacttctgcttcgtgaagaggccacccacatctaccggaagccaggaatctctctgctcagctatgaggcatctgtaccttctgtgcccatttccacccatggccggctgctgggcaggtcccaggccatccaggtgggtacctcatggaagcaagtggaccagttccttggagttccatatgctgccccgcccctggcagagaggcgcttccaggcaccagagcccttgaactggacaggctcctgggatgccagcaagccaagggccagctgctggcagccaggcaccagaacatccacgtctcctggagtcagtgaagattgtttgtatctcaatgtgttcatccctcagaatgtggcccctaacgcgtctgtgctggtgttcttccacaacaccatggacagggaggagagtgaaggatggccggctatcgacggctccttcttggctgctgttggcaacctcatcgtggtcactgccagctaccgagtgggtgtcttcggcttcctgagttctgggtccggagaggtgagtggcaactgggggctgctggaccaggtggcggctctgacctgggtgcagacccacatccgaggatttggcggggaccctcggcgcgtgtccctggcagcagaccgtggcggggctgatgtggccagcatccaccttctcacggccagggccaccaactcccaacttttccggagagctgtgctgatgggaggctccgcactctccccggccgccgtcatcagccatgagagggctcagcagcaggcaattgctttggcaaaggaggtcagttgccccatgtcatccagccaagaagtggtgtcctgcctccgccagaagcctgccaatgtcctcaatgatgcccagaccaagctcctggccgtgagtggccctttccactactggggtcctgtgatcgatggccacttcctccgtgagcctccagccagagcactgaagaggtctttacgggtagaggtcgatctgctcattgggagttctcaggacgacgggctcatcaacagagcaaaggctgtgaagcaatttgaggaaagtcgaggccggaccagtagcaaaacagccttttaccaggcactgcagaattctctgggtggcgaggactcagatgcccgcgtcgaggctgctgctacatggtattactctctggagcactccacggatgactatgcctccttctcccgggctctggagaatgccacccgggactactttatcatctgccctataatcgacatggccagtgcctgggcaaagagggcccgaggaaacgtcttcatgtaccatgctcctgaaaactacggccatggcagcctggagctgctggcggatgttcagtttgccttggggcttcccttctacccagcctacgaggggcagttttctctggaggagaagagcctgtcgctgaaaatcatgcagtacttttcccacttcatcagatcaggaaatcccaactacccttatgagttctcacggaaagtacccacatttgcaaccccctggcctgactttgtaccccgtgctggtggagagaactacaaggagttcagtgagctgctccccaatcgacagggcctgaagaaagccgactgctccttctggtccaagtacatctcgtctctgaagacatctgcagatggagccaagggcgggcagtcagcagagaagaagatctcctaagcctccaggaaccaggctctaagacctacagcaagtgaccagcccttgagctccccaaaaacctcacccgaggctgcccactatggtcatctttttctctaaaatagccacttaccttcaataaagtatctacatgcggtgaa

SEQ ID NO: 447649 - DNA, 7909 bp, Homo sapiens
catctcagtcgacttagagacccccctggttgttcatcagagggattgaagtgtatggaccgccagctgggaagccaaagcgatgtccaaggagctgtgaaataagaaatcgtcgtcttctccacggggtgggagataagtcaccaccccagtgttctgcggagggagagtttatgcctgtccagtgcaaatttgtcaacaccacagacatgatgatttttgatctggtccacagctacaacaggtttccagatgcatttgtgaccttcagttccttccagaggaggttccctgaggtatctgggtattgccactgtgctgacagccaagggcgggaactggctgagacaggtttggagttgttactggatgaaatttatgacaccatttttgctggcctggaccttccttccaccttcactgaaaccaccctgtaccggatactgcagagacggttcctcgcagttcaatcagtcatctctggcagattccgatgccccacaaaatgtgaagtggagcggtttacagcaaccagctttggtcacccctatgttccaagctgccgccgaaatggcgactatcaggcggtgcagtgccagacggaagggccctgctggtgtgtggacgcccaggggaaggaaatgcatggaacccggcagcaaggggagccgccatcttgtgctgaaggccaatcttgtgcctccgaaaggcagcaggccttgtccagactctactttgggacctcaggctacttcagccagcacgacctgttctcttccccagagaaaagatgggcctctccaagagtagccagatttgccacatcctgcccacccacgatcaaggagctctttgtggactctgggcttctccgcccaatggtggagggacagagccaacagttttctgtctcagaaaatcttctcaaagaagccatccgagcaatttttccctcccgagggctggctcgtcttgcccttcagtttaccaccaacccaaagagactccagcaaaacctttttggagggaaatttttggtgaatgttggccagtttaacttgtctggagcccttggcacaagaggcacatttaacttcagtcaatttttccagcaacttggtcttgcaagcttcttgaatggagggagacaagaagatttggccaagccactctctgtgggattagattcaaattcttccacaggaacccctgaagctgctaagaaggatggtactatgaataagccaactgtgggcagctttggctttgaaattaacctacaagagaaccaaaatgccctcaaattccttgcttctctcctggagcttccagaattccttctcttcttgcaacatgctatctctgtgccagaagatgtggcaagagatttaggtgatgtgatggaaacggtactcagctcccagacctgtgagcagacacctgaaaggctatttgtcccatcatgcacgacagaaggaagctatgaggatgtccaatgcttttccggagagtgctggtgtgtgaattcctggggcaaagagcttccaggctcaagagtcagaggtggacagccaaggtgccccacagactgtgaaaagcaaagggctcgcatgcaaagcctcatgggcagccagcctgctggctccaccttgtttgtccctgcttgtactagtgagggacatttcctgcctgtccagtgcttcaactcagagtgctactgtgttgatgctgagggtcaggccattcctggaactcgaagtgcaatagggaagcccaagaaatgccccacgccctgtcaattacagtctgagcaagctttcctcaggacggtgcaggccctgctctctaactccagcatgctacccaccctttccgacacctacatcccacagtgcagcaccgatgggcagtggagacaagtgcaatgcaatgggcctcctgagcaggtcttcgagttgtaccaacgatgggaggctcagaacaagggccaggatctgacgcctgccaagctgctagtgaagatcatgagctacagagaagcagcttccggaaacttcagtctctttattcaaagtctgtatgaggctggccagcaagatgtcttcccggtgctgtcacaatacccttctctgcaagatgtcccactagcagcactggaagggaaacggccccagcccagggagaatatcctcctggagccctacctcttctggcagatcttaaatggccaactcagccaatacccggggtcctactcagacttcagcactcctttggcacattttgatcttcggaactgctggtgtgtggatgaggctggccaagaactggaaggaatgcggtctgagccaagcaagctcccaacatgtcctggctcctgtgaggaagcaaagctccgtgtactgcagttcattagggaaacggaagagattgtttcagcttccaacagttctcggttccctctgggggagagtttcctggtggccaagggaatccggctgaggaatgaggacctcggccttcctccgctcttcccgccccgggaggctttcgcggagcagtttctgcgtgggagtgattacgccattcgcctggcggctcagtctaccttaagcttctatcagagacgccgcttttccccggacgactcggctggagcatccgcccttctgcggtcgggcccctacatgccacagtgtgatgcgtttggaagttgggagcctgtgcagtgccacgctgggactgggcactgctggtgtgtagatgagaaaggagggttcatccctggctcactgactgcccgctctctgcagattccacagtgcccgacaacctgcgagaaatctcgaaccagtgggctgctttccagttggaaacaggctagatcccaagaaaacccatctccaaaagacctgttcgtcccagcctgcctagaaacaggagagtatgccaggctgcaggcatcgggggctggcacctggtgtgtggaccctgcatcaggagaagagttgcggcctggctcgagcagcagtgcccagtgcccaagcctctgcaatgtgctcaagagtggagtcctctccaggagagtcagcccaggctatgtcccagcctgcagggcagaggatgggggcttttccccagtgcaatgtgaccaggcccagggcagctgctggtgtgtcatggacagcggagaagaggtgcctgggacgcgcgtgaccgggggccagcccgcctgtgagagcccgcggtgtccgctgccattcaacgcgtcggaggtggttggtggaacaatcctgtgtgagacaatctcgggccccacaggctctgccatgcagcagtgccaattgctgtgccgccagggctcctggagcgtgtttccaccagggccattgatatgtagcctggagagcggacgctgggagtcacagctgcctcagccccgggcctgccaacggccccagctgtggcagaccatccagacccaagggcactttcagctccagctcccgccgggcaagatgtgcagtgctgactacgcggatttgctgcagactttccaggttttcatattggatgagctgacagcccgcggcttctgccagatccaggtgaagacttttggcaccctggtttccattcctgtctgcaacaactcctctgtgcaggtgggttgtctgaccagggagcgtttaggagtgaatgttacatggaaatcacggcttgaggacatcccagtggcttctcttcctgacttacatgacattgagagagccttggtgggcaaggatctccttgggcgcttcacagatctgatccagagtggctcattccagcttcatctggactccaagacgttcccagcggaaaccatccgcttcctccaaggggaccactttggcacctctcccaggacatggtttgggtgctcggaaggattctaccaagtcttgacaagtgaggccagtcaggacggactgggatgcgttaagtgtcctgaaggaagctattcccaagatgaggaatgcattccttgtcctgttggattctaccaagaacaggcagggagcttggcctgtgtcccatgtcctgtgggcagaacgaccatttctgctggagctttcagccagactcactgtgtcactgactgtcagaggaacgaagcaggcctgcaatgtgaccagaatggccagtatcgagccagccagaaggacaggggcagtgggaaggccttctgtgtggacggcgaggggcggaggctgccatggtgggaaacagaggcccctcttgaggactcacagtgtttgatgatgcagaagtttgagaaggttccagaatcaaaggtgatcttcgacgccaatgctcctgtggctgtcagatccaaagttcctgattctgagttccccgtgatgcagtgcttgacagattgcacagaggacgaggcctgcagcttcttcaccgtgtccacgacggagccagagatttcctgtgatttctatgcttggacaagtgacaatgttgcctgcatgacttctgaccagaaacgagatgcactggggaactcaaaggccaccagctttggaagtcttcgctgccaggtgaaagtgaggagccatggtcaagattctccagctgtgtatttgaaaaagggccaaggatccaccacaacacttcagaaacgctttgaacccactggtttccaaaacatgctttctggattgtacaaccccattgtgttctcagcctcaggagccaatctaaccgatgctcacctcttctgtcttcttgcatgcgaccgtgatctgtgttgcgatggcttcgtcctcacacaggttcaaggaggtgccatcatctgtgggttgctgagctcacccagtgtcctgctttgtaatgtcaaagactggatggatccctctgaagcctgggctaatgctacatgtcctggtgtgacatatgaccaggagagccaccaggtgatattgcgtcttggagaccaggagttcatcaagagtctgacacccttagaaggaactcaagacacctttaccaattttcagcaggtttatctctggaaagattctgacatggggtctcggcctgagtctatgggatgtagaaaagacacagtgccaaggccagcatctccaacagaagcaggtttgacaacagaacttttctcccctgtggacctcaaccaggtcattgtcaatggaaatcaatcactatccagccagaagcactggcttttcaagcacctgttttcagcccagcaggcaaacctatggtgcctttctcgttgtgtgcaggagcactctttctgtcagctcgcagagataacagagagtgcatccttgtacttcacctgcaccctctacccagaggcacaggtgtgtgatgacatcatggagtccaatgcccagggctgcagactgatcctgcctcagatgccaaaggccctgttccggaagaaagttatactggaagataaagtgaagaacttttacactcgcctgccgttccaaaaactgatggggatatccattagaaataaagtgcccatgtctgaaaaatctatttctaatgggttctttgaatgtgaacgacggtgcgatgcggacccatgctgcactggctttggatttctaaatgtttcccagttaaaaggaggagaggtgacatgtctcactctgaacagcttgggaattcagatgtgcagtgaggagaatggaggagcctggcgcattttggactgtggctctcctgacattgaagtccacacctatcccttcggatggtaccagaagcccattgctcaaaataatgctcccagtttttgccctttggttgttctgccttccctcacagagaaagtgtctctggactcgtggcagtccctggccctctcttcagtggttgttgatccatccattaggcactttgatgttgcccatgtcagcactgctgccaccagcaatttctctgctgtccgagacctctgtttgtcggaatgttcccaacatgaggcctgtctcatcaccactctgcaaacccaacctggggctgtgagatgtatgttctatgctgatactcaaagctgcacacatagtctgcagggtcagaactgccgacttctgcttcgtgaagaggccacccacatctaccggaagccaggaatctctctgctcagctatgaggcatctgtaccttctgtgcccatttccacccatggccggctgctgggcaggtcccaggccatccaggtgggtacctcatggaagcaagtggaccagttccttggagttccatatgctgccccgcccctggcagagaggcgcttccaggcaccagagcccttgaactggacaggctcctgggatgccagcaagccaagggccagctgctggcagccaggcaccagaacatccacgtctcctggagtcagtgaagattgtttgtatctcaatgtgttcatccctcagaatgtggcccctaacgcgtctgtgctggtgttcttccacaacaccatggacagggaggagagtgaaggatggccggctatcgacggctccttcttggctgctgttggcaacctcatcgtggtcactgccagctaccgagtgggtgtcttcggcttcctgagttctgggtccggagaggtgagtggcaactgggggctgctggaccaggtggcggctctgacctgggtgcagacccacatccgaggatttggcggggaccctcggcgcgtgtccctggcagcagaccgtggcggggctgatgtggccagcatccaccttctcacggccagggccaccaactcccaacttttccggagagctgtgctgatgggaggctccgcactctccccggccgccgtcatcagccatgagagggctcagcagcaggcaattgctttggcaaaggaggtcagttgccccatgtcatccagccaagaagtggtgtcctgcctccgccagaagcctgccaatgtcctcaatgatgcccagaccaagctcctggccgtgagtggccctttccactactggggtcctgtgatcgatggccacttcctccgtgagcctccagccagagcactgaagaggtctttacgggtagaggtcgatctgctcattgggagttctcaggacgacgggctcatcaacagagcaaaggctgtgaagcaatttgaggaaagtcgaggccggaccagtagcaaaacagccttttaccaggcactgcagaattctctgggtggcgaggactcagatgcccgcgtcgaggctgctgctacatggtattactctctggagcactccacggatgactatgcctccttctcccgggctctggagaatgccacccgggactactttatcatctgccctataatcgacatggccagtgcctgggcaaagagggcccgaggaaacgtcttcatgtaccatgctcctgaaaactacggccatggcagcctggagctgctggcggatgttcagtttgccttggggcttcccttctacccagcctacgaggggcagttttctctggaggagaagagcctgtcgctgaaaatcatgcagtacttttcccacttcatcagatcaggaaatcccaactacccttatgagttctcacggaaagtacccacatttgcaaccccctggcctgactttgtaccccgtgctggtggagagaactacaaggagttcagtgagctgctccccaatcgacagggcctgaagaaagccgactgctccttctggtccaagtacatctcgtctctgaagacatctgcagttccacagtgcccgacaacctgcgagaaatctcgaatccagtgggctgctttccagttggaaacaggctagatcccaagaaacccatctccaaaagacctgttagtcccagcctg

SEQ ID NO: 447650 - DNA, 7872 bp, Homo sapiens
catctcagtcgacttagagacccccctggttgttcatcagagggattgaagtgtatggaccgccagctgggaagccaaagcgatgtccaaggagctgtgaaataagaaatcgtcgtcttctccacggggtgggagataagtcaccaccccagtgttctgcggagggagagtttatgcctgtccagtgcaaatttgtcaacaccacagacatgatgatttttgatctggtccacagctacaacaggtttccagatgcatttgtgaccttcagttccttccagaggaggttccctgaggtatctgggtattgccactgtgctgacagccaagggcgggaactggctgagacaggtttggagttgttactggatgaaatttatgacaccatttttgctggcctggaccttccttccaccttcactgaaaccaccctgtaccggatactgcagagacggttcctcgcagttcaatcagtcatctctggcagattccgatgccccacaaaatgtgaagtggagcggtttacagcaaccagctttggtcacccctatgttccaagctgccgccgaaatggcgactatcaggcggtgcagtgccagacggaagggccctgctggtgtgtggacgcccaggggaaggaaatgcatggaacccggcagcaaggggagccgccatcttgtgctgaaggccaatcttgtgcctccgaaaggcagcaggccttgtccagactctactttgggacctcaggctacttcagccagcacgacctgttctcttccccagagaaaagatgggcctctccaagagtagccagatttgccacatcctgcccacccacgatcaaggagctctttgtggactctgggcttctccgcccaatggtggagggacagagccaacagttttctgtctcagaaaatcttctcaaagaagccatccgagcaatttttccctcccgagggctggctcgtcttgcccttcagtttaccaccaacccaaagagactccagcaaaacctttttggagggaaatttttggtgaatgttggccagtttaacttgtctggagcccttggcacaagaggcacatttaacttcagtcaatttttccagcaacttggtcttgcaagcttcttgaatggagggagacaagaagatttggccaagccactctctgtgggattagattcaaattcttccacaggaacccctgaagctgctaagaaggatggtactatgaataagccaactgtgggcagctttggctttgaaattaacctacaagagaaccaaaatgccctcaaattccttgcttctctcctggagcttccagaattccttctcttcttgcaacatgctatctctgtgccagaagatgtggcaagagatttaggtgatgtgatggaaacggtactcagctcccagacctgtgagcagacacctgaaaggctatttgtcccatcatgcacgacagaaggaagctatgaggatgtccaatgcttttccggagagtgctggtgtgtgaattcctggggcaaagagcttccaggctcaagagtcagaggtggacagccaaggtgccccacagactgtgaaaagcaaagggctcgcatgcaaagcctcatgggcagccagcctgctggctccaccttgtttgtccctgcttgtactagtgagggacatttcctgcctgtccagtgcttcaactcagagtgctactgtgttgatgctgagggtcaggccattcctggaactcgaagtgcaatagggaagcccaagaaatgccccacgccctgtcaattacagtctgagcaagctttcctcaggacggtgcaggccctgctctctaactccagcatgctacccaccctttccgacacctacatcccacagtgcagcaccgatgggcagtggagacaagtgcaatgcaatgggcctcctgagcaggtcttcgagttgtaccaacgatgggaggctcagaacaagggccaggatctgacgcctgccaagctgctagtgaagatcatgagctacagagaagcagcttccggaaacttcagtctctttattcaaagtctgtatgaggctggccagcaagatgtcttcccggtgctgtcacaatacccttctctgcaagatgtcccactagcagcactggaagggaaacggccccagcccagggagaatatcctcctggagccctacctcttctggcagatcttaaatggccaactcagccaatacccggggtcctactcagacttcagcactcctttggcacattttgatcttcggaactgctggtgtgtggatgaggctggccaagaactggaaggaatgcggtctgagccaagcaagctcccaacatgtcctggctcctgtgaggaagcaaagctccgtgtactgcagttcattagggaaacggaagagattgtttcagcttccaacagttctcggttccctctgggggagagtttcctggtggccaagggaatccggctgaggaatgaggacctcggccttcctccgctcttcccgccccgggaggctttcgcggagcagtttctgcgtgggagtgattacgccattcgcctggcggctcagtctaccttaagcttctatcagagacgccgcttttccccggacgactcggctggagcatccgcccttctgcggtcgggcccctacatgccacagtgtgatgcgtttggaagttgggagcctgtgcagtgccacgctgggactgggcactgctggtgtgtagatgagaaaggagggttcatccctggctcactgactgcccgctctctgcagattccacagtgcccgacaacctgcgagaaatctcgaaccagtgggctgctttccagttggaaacaggctagatcccaagaaaacccatctccaaaagacctgttcgtcccagcctgcctagaaacaggagagtatgccaggctgcaggcatcgggggctggcacctggtgtgtggaccctgcatcaggagaagagttgcggcctggctcgagcagcagtgcccagtgcccaagcctctgcaatgtgctcaagagtggagtcctctccaggagagtcagcccaggctatgtcccagcctgcagggcagaggatgggggcttttccccagtgcaatgtgaccaggcccagggcagctgctggtgtgtcatggacagcggagaagaggtgcctgggacgcgcgtgaccgggggccagcccgcctgtgagagcccgcggtgtccgctgccattcaacgcgtcggaggtggttggtggaacaatcctgtgtgagacaatctcgggccccacaggctctgccatgcagcagtgccaattgctgtgccgccagggctcctggagcgtgtttccaccagggccattgatatgtagcctggagagcggacgctgggagtcacagctgcctcagccccgggcctgccaacggccccagctgtggcagaccatccagacccaagggcactttcagctccagctcccgccgggcaagatgtgcagtgctgactacgcggatttgctgcagactttccaggttttcatattggatgagctgacagcccgcggcttctgccagatccaggtgaagacttttggcaccctggtttccattcctgtctgcaacaactcctctgtgcaggtgggttgtctgaccagggagcgtttaggagtgaatgttacatggaaatcacggcttgaggacatcccagtggcttctcttcctgacttacatgacattgagagagccttggtgggcaaggatctccttgggcgcttcacagatctgatccagagtggctcattccagcttcatctggactccaagacgttcccagcggaaaccatccgcttcctccaaggggaccactttggcacctctcccaggacatggtttgggtgctcggaaggattctaccaagtcttgacaagtgaggccagtcaggacggactgggatgcgttaagtgtcctgaaggaagctattcccaagatgaggaatgcattccttgtcctgttggattctaccaagaacaggcagggagcttggcctgtgtcccatgtcctgtgggcagaacgaccatttctgctggagctttcagccagactcactgtgtcactgactgtcagaggaacgaagcaggcctgcaatgtgaccagaatggccagtatcgagccagccagaaggacaggggcagtgggaaggccttctgtgtggacggcgaggggcggaggctgccatggtgggaaacagaggcccctcttgaggactcacagtgtttgatgatgcagaagtttgagaaggttccagaatcaaaggtgatcttcgacgccaatgctcctgtggctgtcagatccaaagttcctgattctgagttccccgtgatgcagtgcttgacagattgcacagaggacgaggcctgcagcttcttcaccgtgtccacgacggagccagagatttcctgtgatttctatgcttggacaagtgacaatgttgcctgcatgacttctgaccagaaacgagatgcactggggaactcaaaggccaccagctttggaagtcttcgctgccaggtgaaagtgaggagccatggtcaagattctccagctgtgtatttgaaaaagggccaaggatccaccacaacacttcagaaacgctttgaacccactggtttccaaaacatgctttctggattgtacaaccccattgtgttctcagcctcaggagccaatctaaccgatgctcacctcttctgtcttcttgcatgcgaccgtgatctgtgttgcgatggcttcgtcctcacacaggttcaaggaggtgccatcatctgtgggttgctgagctcacccagtgtcctgctttgtaatgtcaaagactggatggatccctctgaagcctgggctaatgctacatgtcctggtgtgacatatgaccaggagagccaccaggtgatattgcgtcttggagaccaggagttcatcaagagtctgacacccttagaaggaactcaagacacctttaccaattttcagcaggtttatctctggaaagattctgacatggggtctcggcctgagtctatgggatgtagaaaagacacagtgccaaggccagcatctccaacagaagcaggtttgacaacagaacttttctcccctgtggacctcaaccaggtcattgtcaatggaaatcaatcactatccagccagaagcactggcttttcaagcacctgttttcagcccagcaggcaaacctatggtgcctttctcgttgtgtgcaggagcactctttctgtcagctcgcagagataacagagagtgcatccttgtacttcacctgcaccctctacccagaggcacaggtgtgtgatgacatcatggagtccaatgcccagggctgcagactgatcctgcctcagatgccaaaggccctgttccggaagaaagttatactggaagataaagtgaagaacttttacactcgcctgccgttccaaaaactgatggggatatccattagaaataaagtgcccatgtctgaaaaatctatttctaatgggttctttgaatgtgaacgacggtgcgatgcggacccatgctgcactggctttggatttctaaatgtttcccagttaaaaggaggagaggtgacatgtctcactctgaacagcttgggaattcagatgtgcagtgaggagaatggaggagcctggcgcattttggactgtggctctcctgacattgaagtccacacctatcccttcggatggtaccagaagcccattgctcaaaataatgctcccagtttttgccctttggttgttctgccttccctcacagagaaagtgtctctggactcgtggcagtccctggccctctcttcagtggttgttgatccatccattaggcactttgatgttgcccatgtcagcactgctgccaccagcaatttctctgctgtccgagacctctgtttgtcggaatgttcccaacatgaggcctgtctcatcaccactctgcaaacccaacctggggctgtgagatgtatgttctatgctgatactcaaagctgcacacatagtctgcagggtcagaactgccgacttctgcttcgtgaagaggccacccacatctaccggaagccaggaatctctctgctcagctatgaggcatctgtaccttctgtgcccatttccacccatggccggctgctgggcaggtcccaggccatccaggtgggtacctcatggaagcaagtggaccagttccttggagttccatatgctgccccgcccctggcagagaggcgcttccaggcaccagagcccttgaactggacaggctcctgggatgccagcaagccaagggccagctgctggcagccaggcaccagaacatccacgtctcctggagtcagtgaagattgtttgtatctcaatgtgttcatccctcagaatgtggcccctaacgcgtctgtgctggtgttcttccacaacaccatggacagggaggagagtgaaggatggccggctatcgacggctccttcttggctgctgttggcaacctcatcgtggtcactgccagctaccgagtgggtgtcttcggcttcctgagttctgggtccggagaggtgagtggcaactgggggctgctggaccaggtggcggctctgacctgggtgcagacccacatccgaggatttggcggggaccctcggcgcgtgtccctggcagcagaccgtggcggggctgatgtggccagcatccaccttctcacggccagggccaccaactcccaacttttccggagagctgtgctgatgggaggctccgcactctccccggccgccgtcatcagccatgagagggctcagcagcaggcaattgctttggcaaaggaggtcagttgccccatgtcatccagccaagaagtggtgtcctgcctccgccagaagcctgccaatgtcctcaatgatgcccagaccaagctcctggccgtgagtggccctttccactactggggtcctgtgatcgatggccacttcctccgtgagcctccagccagagcactgaagaggtctttacgggtagaggtcgatctgctcattgggagttctcaggacgacgggctcatcaacagagcaaaggctgtgaagcaatttgaggaaagtcgaggccggaccagtagcaaaacagccttttaccaggcactgcagaattctctgggtggcgaggactcagatgcccgcgtcgaggctgctgctacatggtattactctctggagcactccacggatgactatgcctccttctcccgggctctggagaatgccacccgggactactttatcatctgccctataatcgacatggccagtgcctgggcaaagagggcccgaggaaacgtcttcatgtaccatgctcctgaaaactacggccatggcagcctggagctgctggcggatgttcagtttgccttggggcttcccttctacccagcctacgaggggcagttttctctggaggagaagagcctgtcgctgaaaatcatgcagtacttttcccacttcatcagatcaggaaatcccaactacccttatgagttctcacggaaagtacccacatttgcaacccccttccgagcggaccggtccgctcggaccatcatcacctacccctggttccagaactcctccgtcatcctcttcctcaacaagaaggacctgctggaggacaagatcctgtactcgcacctggtggactacttccccgagttcgatggtccccagcgggacgcccaggcggcgcgggagttcatcctgaagatgttcgtggacctgaaccccgaca

SEQ ID NO: 447651 - DNA, 7778 bp, Homo sapiens
catctcagtcgacttagagacccccctggttgttcatcagagggattgaagtgtatggaccgccagctgggaagccaaagcgatgtccaaggagctgtgaaataagaaatcgtcgtcttctccacggggtgggagataagtcaccaccccagtgttctgcggagggagagtttatgcctgtccagtgcaaatttgtcaacaccacagacatgatgatttttgatctggtccacagctacaacaggtttccagatgcatttgtgaccttcagttccttccagaggaggttccctgaggtatctgggtattgccactgtgctgacagccaagggcgggaactggctgagacaggtttggagttgttactggatgaaatttatgacaccatttttgctggcctggaccttccttccaccttcactgaaaccaccctgtaccggatactgcagagacggttcctcgcagttcaatcagtcatctctggcagattccgatgccccacaaaatgtgaagtggagcggtttacagcaaccagctttggtcacccctatgttccaagctgccgccgaaatggcgactatcaggcggtgcagtgccagacggaagggccctgctggtgtgtggacgcccaggggaaggaaatgcatggaacccggcagcaaggggagccgccatcttgtgctgaaggccaatcttgtgcctccgaaaggcagcaggccttgtccagactctactttgggacctcaggctacttcagccagcacgacctgttctcttccccagagaaaagatgggcctctccaagagtagccagatttgccacatcctgcccacccacgatcaaggagctctttgtggactctgggcttctccgcccaatggtggagggacagagccaacagttttctgtctcagaaaatcttctcaaagaagccatccgagcaatttttccctcccgagggctggctcgtcttgcccttcagtttaccaccaacccaaagagactccagcaaaacctttttggagggaaatttttggtgaatgttggccagtttaacttgtctggagcccttggcacaagaggcacatttaacttcagtcaatttttccagcaacttggtcttgcaagcttcttgaatggagggagacaagaagatttggccaagccactctctgtgggattagattcaaattcttccacaggaacccctgaagctgctaagaaggatggtactatgaataagccaactgtgggcagctttggctttgaaattaacctacaagagaaccaaaatgccctcaaattccttgcttctctcctggagcttccagaattccttctcttcttgcaacatgctatctctgtgccagaagatgtggcaagagatttaggtgatgtgatggaaacggtactcagctcccagacctgtgagcagacacctgaaaggctatttgtcccatcatgcacgacagaaggaagctatgaggatgtccaatgcttttccggagagtgctggtgtgtgaattcctggggcaaagagcttccaggctcaagagtcagaggtggacagccaaggtgccccacagactgtgaaaagcaaagggctcgcatgcaaagcctcatgggcagccagcctgctggctccaccttgtttgtccctgcttgtactagtgagggacatttcctgcctgtccagtgcttcaactcagagtgctactgtgttgatgctgagggtcaggccattcctggaactcgaagtgcaatagggaagcccaagaaatgccccacgccctgtcaattacagtctgagcaagctttcctcaggacggtgcaggccctgctctctaactccagcatgctacccaccctttccgacacctacatcccacagtgcagcaccgatgggcagtggagacaagtgcaatgcaatgggcctcctgagcaggtcttcgagttgtaccaacgatgggaggctcagaacaagggccaggatctgacgcctgccaagctgctagtgaagatcatgagctacagagaagcagcttccggaaacttcagtctctttattcaaagtctgtatgaggctggccagcaagatgtcttcccggtgctgtcacaatacccttctctgcaagatgtcccactagcagcactggaagggaaacggccccagcccagggagaatatcctcctggagccctacctcttctggcagatcttaaatggccaactcagccaatacccggggtcctactcagacttcagcactcctttggcacattttgatcttcggaactgctggtgtgtggatgaggctggccaagaactggaaggaatgcggtctgagccaagcaagctcccaacatgtcctggctcctgtgaggaagcaaagctccgtgtactgcagttcattagggaaacggaagagattgtttcagcttccaacagttctcggttccctctgggggagagtttcctggtggccaagggaatccggctgaggaatgaggacctcggccttcctccgctcttcccgccccgggaggctttcgcggagcagtttctgcgtgggagtgattacgccattcgcctggcggctcagtctaccttaagcttctatcagagacgccgcttttccccggacgactcggctggagcatccgcccttctgcggtcgggcccctacatgccacagtgtgatgcgtttggaagttgggagcctgtgcagtgccacgctgggactgggcactgctggtgtgtagatgagaaaggagggttcatccctggctcactgactgcccgctctctgcagattccacagtgcccgacaacctgcgagaaatctcgaaccagtgggctgctttccagttggaaacaggctagatcccaagaaaacccatctccaaaagacctgttcgtcccagcctgcctagaaacaggagagtatgccaggctgcaggcatcgggggctggcacctggtgtgtggaccctgcatcaggagaagagttgcggcctggctcgagcagcagtgcccagtgcccaagcctctgcaatgtgctcaagagtggagtcctctccaggagagtcagcccaggctatgtcccagcctgcagggcagaggatgggggcttttccccagtgcaatgtgaccaggcccagggcagctgctggtgtgtcatggacagcggagaagaggtgcctgggacgcgcgtgaccgggggccagcccgcctgtgagagcccgcggtgtccgctgccattcaacgcgtcggaggtggttggtggaacaatcctgtgtgagacaatctcgggccccacaggctctgccatgcagcagtgccaattgctgtgccgccagggctcctggagcgtgtttccaccagggccattgatatgtagcctggagagcggacgctgggagtcacagctgcctcagccccgggcctgccaacggccccagctgtggcagaccatccagacccaagggcactttcagctccagctcccgccgggcaagatgtgcagtgctgactacgcggatttgctgcagactttccaggttttcatattggatgagctgacagcccgcggcttctgccagatccaggtgaagacttttggcaccctggtttccattcctgtctgcaacaactcctctgtgcaggtgggttgtctgaccagggagcgtttaggagtgaatgttacatggaaatcacggcttgaggacatcccagtggcttctcttcctgacttacatgacattgagagagccttggtgggcaaggatctccttgggcgcttcacagatctgatccagagtggctcattccagcttcatctggactccaagacgttcccagcggaaaccatccgcttcctccaaggggaccactttggcacctctcccaggacatggtttgggtgctcggaaggattctaccaagtcttgacaagtgaggccagtcaggacggactgggatgcgttaagtgtcctgaaggaagctattcccaagatgaggaatgcattccttgtcctgttggattctaccaagaacaggcagggagcttggcctgtgtcccatgtcctgtgggcagaacgaccatttctgctggagctttcagccagactcactgtgtcactgactgtcagaggaacgaagcaggcctgcaatgtgaccagaatggccagtatcgagccagccagaaggacaggggcagtgggaaggccttctgtgtggacggcgaggggcggaggctgccatggtgggaaacagaggcccctcttgaggactcacagtgtttgatgatgcagaagtttgagaaggttccagaatcaaaggtgatcttcgacgccaatgctcctgtggctgtcagatccaaagttcctgattctgagttccccgtgatgcagtgcttgacagattgcacagaggacgaggcctgcagcttcttcaccgtgtccacgacggagccagagatttcctgtgatttctatgcttggacaagtgacaatgttgcctgcatgacttctgaccagaaacgagatgcactggggaactcaaaggccaccagctttggaagtcttcgctgccaggtgaaagtgaggagccatggtcaagattctccagctgtgtatttgaaaaagggccaaggatccaccacaacacttcagaaacgctttgaacccactggtttccaaaacatgctttctggattgtacaaccccattgtgttctcagcctcaggagccaatctaaccgatgctcacctcttctgtcttcttgcatgcgaccgtgatctgtgttgcgatggcttcgtcctcacacaggttcaaggaggtgccatcatctgtgggttgctgagctcacccagtgtcctgctttgtaatgtcaaagactggatggatccctctgaagcctgggctaatgctacatgtcctggtgtgacatatgaccaggagagccaccaggtgatattgcgtcttggagaccaggagttcatcaagagtctgacacccttagaaggaactcaagacacctttaccaattttcagcaggtttatctctggaaagattctgacatggggtctcggcctgagtctatgggatgtagaaaagacacagtgccaaggccagcatctccaacagaagcaggtttgacaacagaacttttctcccctgtggacctcaaccaggtcattgtcaatggaaatcaatcactatccagccagaagcactggcttttcaagcacctgttttcagcccagcaggcaaacctatggtgcctttctcgttgtgtgcaggagcactctttctgtcagctcgcagagataacagagagtgcatccttgtacttcacctgcaccctctacccagaggcacaggtgtgtgatgacatcatggagtccaatgcccagggctgcagactgatcctgcctcagatgccaaaggccctgttccggaagaaagttatactggaagataaagtgaagaacttttacactcgcctgccgttccaaaaactgatggggatatccattagaaataaagtgcccatgtctgaaaaatctatttctaatgggttctttgaatgtgaacgacggtgcgatgcggacccatgctgcactggctttggatttctaaatgtttcccagttaaaaggaggagaggtgacatgtctcactctgaacagcttgggaattcagatgtgcagtgaggagaatggaggagcctggcgcattttggactgtggctctcctgacattgaagtccacacctatcccttcggatggtaccagaagcccattgctcaaaataatgctcccagtttttgccctttggttgttctgccttccctcacagagaaagtgtctctggactcgtggcagtccctggccctctcttcagtggttgttgatccatccattaggcactttgatgttgcccatgtcagcactgctgccaccagcaatttctctgctgtccgagacctctgtttgtcggaatgttcccaacatgaggcctgtctcatcaccactctgcaaacccaacctggggctgtgagatgtatgttctatgctgatactcaaagctgcacacatagtctgcagggtcagaactgccgacttctgcttcgtgaagaggccacccacatctaccggaagccaggaatctctctgctcagctatgaggcatctgtaccttctgtgcccatttccacccatggccggctgctgggcaggtcccaggccatccaggtgggtacctcatggaagcaagtggaccagttccttggagttccatatgctgccccgcccctggcagagaggcgcttccaggcaccagagcccttgaactggacaggctcctgggatgccagcaagccaagggccagctgctggcagccaggcaccagaacatccacgtctcctggagtcagtgaagattgtttgtatctcaatgtgttcatccctcagaatgtggcccctaacgcgtctgtgctggtgttcttccacaacaccatggacagggaggagagtgaaggatggccggctatcgacggctccttcttggctgctgttggcaacctcatcgtggtcactgccagctaccgagtgggtgtcttcggcttcctgagttctgggtccggagaggtgagtggcaactgggggctgctggaccaggtggcggctctgacctgggtgcagacccacatccgaggatttggcggggaccctcggcgcgtgtccctggcagcagaccgtggcggggctgatgtggccagcatccaccttctcacggccagggccaccaactcccaacttttccggagagctgtgctgatgggaggctccgcactctccccggccgccgtcatcagccatgagagggctcagcagcaggcaattgctttggcaaaggaggtcagttgccccatgtcatccagccaagaagtggtgtcctgcctccgccagaagcctgccaatgtcctcaatgatgcccagaccaagctcctggccgtgagtggccctttccactactggggtcctgtgatcgatggccacttcctccgtgagcctccagccagagcactgaagaggtctttacgggtagaggtcgatctgctcattgggagttctcaggacgacgggctcatcaacagagcaaaggctgtgaagcaatttgaggaaagtcgaggccggaccagtagcaaaacagccttttaccaggcactgcagaattctctgggtggcgaggactcagatgcccgcgtcgaggctgctgctacatggtattactctctggaggagaagagcctgtcgctgaaaatcatgcagtacttttcccacttcatcagatcaggaaatcccaactacccttatgagttctcacggaaagtacccacatttgcaaccccctggcctgactttgtaccccgtgctggtggagagaactacaaggagttcagtgagctgctccccaatcgacagggcctgaagaaagccgactgctccttctggtccaagtacatctcgtctctgaagacatctgcagatggagccaagggcgggcagtcagcagagagtgaagaggaggagttgacggctggatctgggctaagagaagatctcctaagcctccaggaaccaggctctaagacctacagcaagtgaccagcccttgagctccccaaaaacctcacccgaggctgcccactatggtcatctttttctctaaaatagccacttaccttcaataaagtatctacatgcggtgaa

SEQ ID NO: 447652 - DNA, 7553 bp, Homo sapiens
catctcagtcgacttagagacccccctggttgttcatcagagggattgaagtgtatggaccgccagctgggaagccaaagcgatgtccaaggagctgtgaaataagaaatcgtcgtcttctccacggggtgggagataagtcaccaccccagtgttctgcggagggagagtttatgcctgtccagtgcaaatttgtcaacaccacagacatgatgatttttgatctggtccacagctacaacaggtttccagatgcatttgtgaccttcagttccttccagaggaggttccctgaggtatctgggtattgccactgtgctgacagccaagggcgggaactggctgagacaggtttggagttgttactggatgaaatttatgacaccatttttgctggcctggaccttccttccaccttcactgaaaccaccctgtaccggatactgcagagacggttcctcgcagttcaatcagtcatctctggcagattccgatgccccacaaaatgtgaagtggagcggtttacagcaaccagctttggtcacccctatgttccaagctgccgccgaaatggcgactatcaggcggtgcagtgccagacggaagggccctgctggtgtgtggacgcccaggggaaggaaatgcatggaacccggcagcaaggggagccgccatcttgtgctgaaggccaatcttgtgcctccgaaaggcagcaggccttgtccagactctactttgggacctcaggctacttcagccagcacgacctgttctcttccccagagaaaagatgggcctctccaagagtagccagatttgccacatcctgcccacccacgatcaaggagctctttgtggactctgggcttctccgcccaatggtggagggacagagccaacagttttctgtctcagaaaatcttctcaaagaagccatccgagcaatttttccctcccgagggctggctcgtcttgcccttcagtttaccaccaacccaaagagactccagcaaaacctttttggagggaaatttttggtgaatgttggccagtttaacttgtctggagcccttggcacaagaggcacatttaacttcagtcaatttttccagcaacttggtcttgcaagcttcttgaatggagggagacaagaagatttggccaagccactctctgtgggattagattcaaattcttccacaggaacccctgaagctgctaagaaggatggtactatgaataagccaactgtgggcagctttggctttgaaattaacctacaagagaaccaaaatgccctcaaattccttgcttctctcctggagcttccagaattccttctcttcttgcaacatgctatctctgtgccagaagatgtggcaagagatttaggtgatgtgatggaaacggtactcagctcccagacctgtgagcagacacctgaaaggctatttgtcccatcatgcacgacagaaggaagctatgaggatgtccaatgcttttccggagagtgctggtgtgtgaattcctggggcaaagagcttccaggctcaagagtcagaggtggacagccaaggtgccccacagactgtgaaaagcaaagggctcgcatgcaaagcctcatgggcagccagcctgctggctccaccttgtttgtccctgcttgtactagtgagggacatttcctgcctgtccagtgcttcaactcagagtgctactgtgttgatgctgagggtcaggccattcctggaactcgaagtgcaatagggaagcccaagaaatgccccacgccctgtcaattacagtctgagcaagctttcctcaggacggtgcaggccctgctctctaactccagcatgctacccaccctttccgacacctacatcccacagtgcagcaccgatgggcagtggagacaagtgcaatgcaatgggcctcctgagcaggtcttcgagttgtaccaacgatgggaggctcagaacaagggccaggatctgacgcctgccaagctgctagtgaagatcatgagctacagagaagcagcttccggaaacttcagtctctttattcaaagtctgtatgaggctggccagcaagatgtcttcccggtgctgtcacaatacccttctctgcaagatgtcccactagcagcactggaagggaaacggccccagcccagggagaatatcctcctggagccctacctcttctggcagatcttaaatggccaactcagccaatacccggggtcctactcagacttcagcactcctttggcacattttgatcttcggaactgctggtgtgtggatgaggctggccaagaactggaaggaatgcggtctgagccaagcaagctcccaacatgtcctggctcctgtgaggaagcaaagctccgtgtactgcagttcattagggaaacggaagagattgtttcagcttccaacagttctcggttccctctgggggagagtttcctggtggccaagggaatccggctgaggaatgaggacctcggccttcctccgctcttcccgccccgggaggctttcgcggagcagtttctgcgtgggagtgattacgccattcgcctggcggctcagtctaccttaagcttctatcagagacgccgcttttccccggacgactcggctggagcatccgcccttctgcggtcgggcccctacatgccacagtgtgatgcgtttggaagttgggagcctgtgcagtgccacgctgggactgggcactgctggtgtgtagatgagaaaggagggttcatccctggctcactgactgcccgctctctgcagattccacagtgcccgacaacctgcgagaaatctcgaaccagtgggctgctttccagttggaaacaggctagatcccaagaaaacccatctccaaaagacctgttcgtcccagcctgcctagaaacaggagagtatgccaggctgcaggcatcgggggctggcacctggtgtgtggaccctgcatcaggagaagagttgcggcctggctcgagcagcagtgcccagtgcccaagcctctgcaatgtgctcaagagtggagtcctctccaggagagtcagcccaggctatgtcccagcctgcagggcagaggatgggggcttttccccagtgcaatgtgaccaggcccagggcagctgctggtgtgtcatggacagcggagaagaggtgcctgggacgcgcgtgaccgggggccagcccgcctgtgagagcccgcggtgtccgctgccattcaacgcgtcggaggtggttggtggaacaatcctgtgtgagacaatctcgggccccacaggctctgccatgcagcagtgccaattgctgtgccgccagggctcctggagcgtgtttccaccagggccattgatatgtagcctggagagcggacgctgggagtcacagctgcctcagccccgggcctgccaacggccccagctgtggcagaccatccagacccaagggcactttcagctccagctcccgccgggcaagatgtgcagtgctgactacgcggatttgctgcagactttccaggttttcatattggatgagctgacagcccgcggcttctgccagatccaggtgaagacttttggcaccctggtttccattcctgtctgcaacaactcctctgtgcaggtgggttgtctgaccagggagcgtttaggagtgaatgttacatggaaatcacggcttgaggacatcccagtggcttctcttcctgacttacatgacattgagagagccttggtgggcaaggatctccttgggcgcttcacagatctgatccagagtggctcattccagcttcatctggactccaagacgttcccagcggaaaccatccgcttcctccaaggggaccactttggcacctctcccaggacatggtttgggtgctcggaaggattctaccaagtcttgacaagtgaggccagtcaggacggactgggatgcgttaagtgtcctgaaggaagctattcccaagatgaggaatgcattccttgtcctgttggattctaccaagaacaggcagggagcttggcctgtgtcccatgtcctgtgggcagaacgaccatttctgctggagctttcagccagactcactgtgtcactgactgtcagaggaacgaagcaggcctgcaatgtgaccagaatggccagtatcgagccagccagaaggacaggggcagtgggaaggccttctgtgtggacggcgaggggcggaggctgccatggtgggaaacagaggcccctcttgaggactcacagtgtttgatgatgcagaagtttgagaaggttccagaatcaaaggtgatcttcgacgccaatgctcctgtggctgtcagatccaaagttcctgattctgagttccccgtgatgcagtgcttgacagattgcacagaggacgaggcctgcagcttcttcaccgtgtccacgacggagccagagatttcctgtgatttctatgcttggacaagtgacaatgttgcctgcatgacttctgaccagaaacgagatgcactggggaactcaaaggccaccagctttggaagtcttcgctgccaggtgaaagtgaggagccatggtcaagattctccagctgtgtatttgaaaaagggccaaggatccaccacaacacttcagaaacgctttgaacccactggtttccaaaacatgctttctggattgtacaaccccattgtgttctcagcctcaggagccaatctaaccgatgctcacctcttctgtcttcttgcatgcgaccgtgatctgtgttgcgatggcttcgtcctcacacaggttcaaggaggtgccatcatctgtgggttgctgagctcacccagtgtcctgctttgtaatgtcaaagactggatggatccctctgaagcctgggctaatgctacatgtcctggtgtgacatatgaccaggagagccaccaggtgatattgcgtcttggagaccaggagttcatcaagagtctgacacccttagaaggaactcaagacacctttaccaattttcagcaggtttatctctggaaagattctgacatggggtctcggcctgagtctatgggatgtagaaaagacacagtgccaaggccagcatctccaacagaagcaggtttgacaacagaacttttctcccctgtggacctcaaccaggtcattgtcaatggaaatcaatcactatccagccagaagcactggcttttcaagcacctgttttcagcccagcaggcaaacctatggtgcctttctcgttgtgtgcaggagcactctttctgtcagctcgcagagataacagagagtgcatccttgtacttcacctgcaccctctacccagaggcacaggtgtgtgatgacatcatggagtccaatgcccagggctgcagactgatcctgcctcagatgccaaaggccctgttccggaagaaagttatactggaagataaagtgaagaacttttacactcgcctgccgttccaaaaactgatggggatatccattagaaataaagtgcccatgtctgaaaaatctatttctaatgggttctttgaatgtgaacgacggtgcgatgcggacccatgctgcactggctttggatttctaaatgtttcccagttaaaaggaggagaggtgacatgtctcactctgaacagcttgggaattcagatgtgcagtgaggagaatggaggagcctggcgcattttggactgtggctctcctgacattgaagtccacacctatcccttcggatggtaccagaagcccattgctcaaaataatgctcccagtttttgccctttggttgttctgccttccctcacagagaaagtgtctctggactcgtggcagtccctggccctctcttcagtggttgttgatccatccattaggcactttgatgttgcccatgtcagcactgctgccaccagcaatttctctgctgtccgagacctctgtttgtcggaatgttcccaacatgaggcctgtctcatcaccactctgcaaacccaacctggggctgtgagatgtatgttctatgctgatactcaaagctgcacacatagtctgcagggtcagaactgccgacttctgcttcgtgaagaggccacccacatctaccggaagccaggaatctctctgctcagctatgaggcatctgtaccttctgtgcccatttccacccatggccggctgctgggcaggtcccaggccatccaggtgggtacctcatggaagcaagtggaccagttccttggagttccatatgctgccccgcccctggcagagaggcgcttccaggcaccagagcccttgaactggacaggctcctgggatgccagcaagccaagggccagctgctggcagccaggcaccagaacatccacgtctcctggagtcagtgaagattgtttgtatctcaatgtgttcatccctcagaatgtggcccctaacgcgtctgtgctggtgttcttccacaacaccatggacagggaggagagtgaaggatggccggctatcgacggctccttcttggctgctgttggcaacctcatcgtggtcactgccagctaccgagtgggtgtcttcggcttcctgagttctgggtccggagaggtgagtggcaactgggggctgctggaccaggtggcggctctgacctgggtgcagacccacatccgaggatttggcggggaccctcggcgcgtgtccctggcagcagaccgtggcggggctgatgtggccagcatccaccttctcacggccagggccaccaactcccaacttttccggagagctgtgctgatgggaggctccgcactctccccggccgccgtcatcagccatgagagggctcagcagcaggcaattgctttggcaaaggaggtcagttgccccatgtcatccagccaagaagtggtgtcctgcctccgccagaagcctgccaatgtcctcaatgatgcccagaccaagctcctggccgtgagtggccctttccactactggggtcctgtgatcgatggccacttcctccgtgagcctccagccagagcactgaagaggtctttacgggtagaggtcgatctgctcattgggagttctcaggacgacgggctcatcaacagagcaaaggctgtgaagcaatttgaggaaagtcgaggccggaccagtagcaaaacagccttttaccaggcactgcagaattctctgggtggcgaggactcagatgcccgcgtcgaggctgctgctacatggtattactctctggagcactccacggatgactatgcctccttctcccgggctctggagaatgccacccgggactactttatcatctgccctataatcgacatggccagtgcctgggcaaagagggcccgaggaaacgtcttcatgtaccatgctcctgaaaactacggccatggcagccgtggagctgcgggcggatgtacagtgtgcctgggggcttcccctctttcccagcccaggtccttacctcgtcgagtccttacc

SEQ ID NO: 447653 - DNA, 2815 bp, Homo sapiens
  misc_feature (752)..(752): n is a, c, g, or t
  misc_feature (754)..(754): n is a, c, g, or t
atccagccagaagcactggcttatggtgcctttctcgttgtgtgcaggagcactctttctgtcagctcgcagagataacagagagtgcatccttgtacttcacctgcaccctctacccagaggcacaggtgtgtgatgacatcatggagtccaatgcccagggctgcagactgatcctgcctcagatgccaaaggccctgttccggaagaaagttatactggaagataaagtgaagaacttttacactcgcctgccgttccaaaaactgatggggatatccattagaaataaagtgcccatgtctgaaaaatctatttctaatgggttctttgaatgtgaacgacggtgcgatgcggacccatgctgcactggctttggatttctaaatgtttcccagttaaaaggaggagaggtgacatgtctcactctgaacagcttgggaattcagatgtgcagtgaggagaatggaggagcctggcgcattttggactgtggctctcctgacattgaagtccacacctatcccttcggatggtaccagaagcccattgctcaaaataatgctcccagtttttgccctttggttgttctgccttccctcacagagaaagtgtctctggactcgtggcagtccctggccctctcttcagtggttgttgatccatccattaggcactttgatgttgcccatgtcagcactgctgccaccagcaatttctctgctgtccgagacctctgtttgtcggaatgntncccaacatgaggcctgtctcatcaccactctgcaaacccatgtcggaatgttcccaacatgaggcctgtctcatcaccactctgcaaacccaacctggggctgtgagatgtatgttctatgctgatactcaaagctgcacacatagtctgcagggtcagaactgccgacttctgcttcgtgaagaggccacccacatctaccggaagccaggaatctctctgctcagctatgaggcatctgtaccttctgtgcccatttccacccatggccggctgctgggcaggtcccaggccatccaggtgggtacctcatggaagcaagtggaccagttccttggagttccatatgctgccccgcccctggcagagaggcgcttccaggcaccagagcccttgaactggacaggctcctgggatgccagcaagccaagggccagctgctggcagccaggcaccagaacatccacgtctcctggagtcagtgaagattgtttgtatctcaatgtgttcatccctcagaatgtggcccctaacgcgtctgtgctggtgttcttccacaacaccatggacagggaggagagtgaaggatggccggctatcgacggctccttcttggctgctgttggcaacctcatcgtggtcactgccagctaccgagtgggtgtcttcggcttcctgagttctgggtccggagaggtgagtggcaactgggggctgctggaccaggtggcggctctgacctgggtgcagacccacatccgaggatttggcggggaccctcggcgcgtgtccctggcagcagaccgtggcggggctgatgtggccagcatccaccttctcacggccagggccaccaactcccaacttttccggagagctgtgctgatgggaggctccgcactctccccggccgccgtcatcagccatgagagggctcagcagcaggcaattgctttggcaaaggaggtcagttgccccatgtcatccagccaagaagtggtgtcctgcctccgccagaagcctgccaatgtcctcaatgatgcccagaccaagctcctggccgtgagtggccctttccactactggggtcctgtgatcgatggccacttcctccgtgagcctccagccagagcactgaagaggtctttacgggtagaggtcgatctgctcattgggagttctcaggacgacgggctcatcaacagagcaaaggctgtgaagcaatttgaggaaagtcgaggccggaccagtagcaaaacagccttttaccaggcactgcagaattctctgggtggcgaggactcagatgcccgcgtcgaggctgctgctacatggtattactctctggagcactccacggatgactatgcctccttctcccgggctctggagaatgccacccgggactactttatcatctgccctataatcgacatggccagtgcctgggcaaagagggcccgaggaaacgtcttcatgtaccatgctcctgaaaactacggccatggcagcctggagctgctggcggatgttcagtttgccttggggcttcccttctacccagcctacgaggggcagttttctctggaggagaagagcctgtcgctgaaaatcatgcagtacttttcccacttcatcagatcaggaaatcccaactacccttatgagttctcacggaaagtacccacatttgcaaccccctggcctgactttgtaccccgtgctggtggagagaactacaaggagttcagtgagctgctccccaatcgacagggcctgaagaaagccgactgctccttctggtccaagtacatctcgtctctgaagacatctgcagatggagccaagggcgggcagtcagcagagagtgaagaggaggagttgacggctggatctgggctaagagaagatctcctaagcctccaggaaccaggctctaagacctacagcaagtgaccagcccttgagctccccaaaaacctcacccgaggctgcccactatggtcatctttttctctaaaatagccacttaccttcaataaagtatctacatgcggtgaa

SEQ ID NO: 447654 - DNA, 1374 bp, Homo sapiens
agaaaggaactgtctgccacaagcacgagatgacacactggttagaacatggagctctggcacctgcagcctaggctcaaatcctggctctgtcacccccagctctgagactctagggaagtggcttcaactctaccctggagccccctctaaagttgaaataatactgttgttacccagctcctgggattgctctgagagggaggctccgcactctccccggccgccgtcatcagccatgagagggctcagcagcaggcaattgctttggcaaaggaggtcagttgccccatgtcatccagccaagaagtggtgtcctgcctccgccagaagcctgccaatgtcctcaatgatgcccagaccaagctcctggccgtgagtggccctttccactactggggtcctgtgatcgatggccacttcctccgtgagcctccagccagagcactgaagaggtctttacgggtagaggtcgatctgctcattgggagttctcaggacgacgggctcatcaacagagcaaaggctgtgaagcaatttgaggaaagtcgaggccggaccagtagcaaaacagccttttaccaggcactgcagaattctctgggtggcgaggactcagatgcccgcgtcgaggctgctgctacatggtattactctctggagcactccacggatgactatgcctccttctcccgggctctggagaatgccacccgggactactttatcatctgccctataatcgacatggccagtgcctgggcaaagagggcccgaggaaacgtcttcatgtaccatgctcctgaaaactacggccatggcagcctggagctgctggcggatgttcagtttgccttggggcttcccttctacccagcctacgaggggcagttttctctggaggagaagagcctgtcgctgaaaatcatgcagtacttttcccacttcatcagatcaggaaatcccaactacccttatgagttctcacggaaagtacccacatttgcaaccccctggcctgactttgtaccccgtgctggtggagagaactacaaggagttcagtgagctgctccccaatcgacagggcctgaagaaagccgactgctccttctggtccaagtacatctcgtctctgaagacatctgcagatggagccaagggcgggcagtcagcagagagtgaagaggaggagttgacggctggatctgggctaagagaagatctcctaagcctccaggaaccaggctctaagacctacagcaagtgaccagcccttgagctccccaaaaacctcacccgaggctgcccactatggtcatctttttctctaaaatagccacttaccttcaataaagtatctacatgcggtgaa

SEQ ID NO: 447655 - DNA, 881 bp, Homo sapiens
  misc_feature (13)..(13): n is a, c, g, or t
gtgtgcgtcgttntagaggatcccgtctgagcagctgggagcaatttgaggaaagtcgaggccggaccagtagcaaaacagccttttaccaggcactgcagaattctctgggtggcgaggactcagatgcccgcgtcgaggctgctgctacatggtattactctctggagcactccacggatgactatgcctccttctcccgggctctggagaatgccacccgggactactttatcatctgccctataatcgacatggccagtgcctgggcaaagagggcccgaggaaacgtcttcatgtaccatgctcctgaaaactacggccatggcagcctggagctgctggcggatgttcagtttgccttggggcttcccttctacccagcctacgaggggcagttttctctggaggagaagagcctgtcgctgaaaatcatgcagtacttttcccacttcatcagatcaggaaatcccaactacccttatgagttctcacggaaagtacccacatttgcaaccccctggcctgactttgtaccccgtgctggtggagagaactacaaggagttcagtgagctgctccccaatcgacagggcctgaagaaagccgactgctccttctggtccaagtacatctcgtctctgaagacatctgcagatggagccaagggcgggcagtcagcagagagtgaagaggaggagttgacggctggatctgggctaagagaagatctcctaagcctccaggaaccaggctctaagacctacagcaagtgaccagcccttgagctccccaaaaacctcacccgaggctgcccactatggtcatctttttctctaaaatagccacttaccttcaataaagtatctacatgcggtgaa

SEQ ID NO: 447656 - DNA, 6377 bp, Homo sapiens
  misc_feature (6343)..(6343): n is a, c, g, or t
catctcagtcgacttagagacccccctggttgttcatcagagggattgaagtgtatggaccgccagctgggaagccaaagcgatgtccaaggagctgtgaaataagaaatcgtcgtcttctccacggggtgggagataagtcaccaccccagtgttctgcggagggagagtttatgcctgtccagtgcaaatttgtcaacaccacagacatgatgatttttgatctggtccacagctacaacaggtttccagatgcatttgtgaccttcagttccttccagaggaggttccctgaggtatctgggtattgccactgtgctgacagccaagggcgggaactggctgagacaggtttggagttgttactggatgaaatttatgacaccatttttgctggcctggaccttccttccaccttcactgaaaccaccctgtaccggatactgcagagacggttcctcgcagttcaatcagtcatctctggcagattccgatgccccacaaaatgtgaagtggagcggtttacagcaaccagctttggtcacccctatgttccaagctgccgccgaaatggcgactatcaggcggtgcagtgccagacggaagggccctgctggtgtgtggacgcccaggggaaggaaatgcatggaacccggcagcaaggggagccgccatcttgtgctgaaggccaatcttgtgcctccgaaaggcagcaggccttgtccagactctactttgggacctcaggctacttcagccagcacgacctgttctcttccccagagaaaagatgggcctctccaagagtagccagatttgccacatcctgcccacccacgatcaaggagctctttgtggactctgggcttctccgcccaatggtggagggacagagccaacagttttctgtctcagaaaatcttctcaaagaagccatccgagcaatttttccctcccgagggctggctcgtcttgcccttcagtttaccaccaacccaaagagactccagcaaaacctttttggagggaaatttttggtgaatgttggccagtttaacttgtctggagcccttggcacaagaggcacatttaacttcagtcaatttttccagcaacttggtcttgcaagcttcttgaatggagggagacaagaagatttggccaagccactctctgtgggattagattcaaattcttccacaggaacccctgaagctgctaagaaggatggtactatgaataagccaactgtgggcagctttggctttgaaattaacctacaagagaaccaaaatgccctcaaattccttgcttctctcctggagcttccagaattccttctcttcttgcaacatgctatctctgtgccagaagatgtggcaagagatttaggtgatgtgatggaaacggtactcagctcccagacctgtgagcagacacctgaaaggctatttgtcccatcatgcacgacagaaggaagctatgaggatgtccaatgcttttccggagagtgctggtgtgtgaattcctggggcaaagagcttccaggctcaagagtcagaggtggacagccaaggtgccccacagactgtgaaaagcaaagggctcgcatgcaaagcctcatgggcagccagcctgctggctccaccttgtttgtccctgcttgtactagtgagggacatttcctgcctgtccagtgcttcaactcagagtgctactgtgttgatgctgagggtcaggccattcctggaactcgaagtgcaatagggaagcccaagaaatgccccacgccctgtcaattacagtctgagcaagctttcctcaggacggtgcaggccctgctctctaactccagcatgctacccaccctttccgacacctacatcccacagtgcagcaccgatgggcagtggagacaagtgcaatgcaatgggcctcctgagcaggtcttcgagttgtaccaacgatgggaggctcagaacaagggccaggatctgacgcctgccaagctgctagtgaagatcatgagctacagagaagcagcttccggaaacttcagtctctttattcaaagtctgtatgaggctggccagcaagatgtcttcccggtgctgtcacaatacccttctctgcaagatgtcccactagcagcactggaagggaaacggccccagcccagggagaatatcctcctggagccctacctcttctggcagatcttaaatggccaactcagccaatacccggggtcctactcagacttcagcactcctttggcacattttgatcttcggaactgctggtgtgtggatgaggctggccaagaactggaaggaatgcggtctgagccaagcaagctcccaacatgtcctggctcctgtgaggaagcaaagctccgtgtactgcagttcattagggaaacggaagagattgtttcagcttccaacagttctcggttccctctgggggagagtttcctggtggccaagggaatccggctgaggaatgaggacctcggccttcctccgctcttcccgccccgggaggctttcgcggagcagtttctgcgtgggagtgattacgccattcgcctggcggctcagtctaccttaagcttctatcagagacgccgcttttccccggacgactcggctggagcatccgcccttctgcggtcgggcccctacatgccacagtgtgatgcgtttggaagttgggagcctgtgcagtgccacgctgggactgggcactgctggtgtgtagatgagaaaggagggttcatccctggctcactgactgcccgctctctgcagattccacagtgcccgacaacctgcgagaaatctcgaaccagtgggctgctttccagttggaaacaggctagatcccaagaaaacccatctccaaaagacctgttcgtcccagcctgcctagaaacaggagagtatgccaggctgcaggcatcgggggctggcacctggtgtgtggaccctgcatcaggagaagagttgcggcctggctcgagcagcagtgcccagtgcccaagcctctgcaatgtgctcaagagtggagtcctctccaggagagtcagcccaggctatgtcccagcctgcagggcagaggatgggggcttttccccagtgcaatgtgaccaggcccagggcagctgctggtgtgtcatggacagcggagaagaggtgcctgggacgcgcgtgaccgggggccagcccgcctgtgagagcccgcggtgtccgctgccattcaacgcgtcggaggtggttggtggaacaatcctgtgtgagacaatctcgggccccacaggctctgccatgcagcagtgccaattgctgtgccgccagggctcctggagcgtgtttccaccagggccattgatatgtagcctggagagcggacgctgggagtcacagctgcctcagccccgggcctgccaacggccccagctgtggcagaccatccagacccaagggcactttcagctccagctcccgccgggcaagatgtgcagtgctgactacgcggatttgctgcagactttccaggttttcatattggatgagctgacagcccgcggcttctgccagatccaggtgaagacttttggcaccctggtttccattcctgtctgcaacaactcctctgtgcaggtgggttgtctgaccagggagcgtttaggagtgaatgttacatggaaatcacggcttgaggacatcccagtggcttctcttcctgacttacatgacattgagagagccttggtgggcaaggatctccttgggcgcttcacagatctgatccagagtggctcattccagcttcatctggactccaagacgttcccagcggaaaccatccgcttcctccaaggggaccactttggcacctctcccaggacatggtttgggtgctcggaaggattctaccaagtcttgacaagtgaggccagtcaggacggactgggatgcgttaagtgtcctgaaggaagctattcccaagatgaggaatgcattccttgtcctgttggattctaccaagaacaggcagggagcttggcctgtgtcccatgtcctgtgggcagaacgaccatttctgctggagctttcagccagactcactgtgtcactgactgtcagaggaacgaagcaggcctgcaatgtgaccagaatggccagtatcgagccagccagaaggacaggggcagtgggaaggccttctgtgtggacggcgaggggcggaggctgccatggtgggaaacagaggcccctcttgaggactcacagtgtttgatgatgcagaagtttgagaaggttccagaatcaaaggtgatcttcgacgccaatgctcctgtggctgtcagatccaaagttcctgattctgagttccccgtgatgcagtgcttgacagattgcacagaggacgaggcctgcagcttcttcaccgtgtccacgacggagccagagatttcctgtgatttctatgcttggacaagtgacaatgttgcctgcatgacttctgaccagaaacgagatgcactggggaactcaaaggccaccagctttggaagtcttcgctgccaggtgaaagtgaggagccatggtcaagattctccagctgtgtatttgaaaaagggccaaggatccaccacaacacttcagaaacgctttgaacccactggtttccaaaacatgctttctggattgtacaaccccattgtgttctcagcctcaggagccaatctaaccgatgctcacctcttctgtcttcttgcatgcgaccgtgatctgtgttgcgatggcttcgtcctcacacaggttcaaggaggtgccatcatctgtgggttgctgagctcacccagtgtcctgctttgtaatgtcaaagactggatggatccctctgaagcctgggctaatgctacatgtcctggtgtgacatatgaccaggagagccaccaggtgatattgcgtcttggagaccaggagttcatcaagagtctgacacccttagaaggaactcaagacacctttaccaattttcagcaggtttatctctggaaagattctgacatggggtctcggcctgagtctatgggatgtagaaaagacacagtgccaaggccagcatctccaacagaagcaggtttgacaacagaacttttctcccctgtggacctcaaccaggtcattgtcaatggaaatcaatcactatccagccagaagcactggcttttcaagcacctgttttcagcccagcaggcaaacctatggtgcctttctcgttgtgtgcaggagcactctttctgtcagctcgcagagataacagagagtgcatccttgtacttcacctgcaccctctacccagaggcacaggtgtgtgatgacatcatggagtccaatgcccagggctgcagactgatcctgcctcagatgccaaaggccctgttccggaagaaagttatactggaagataaagtgaagaacttttacactcgcctgccgttccaaaaactgatggggatatccattagaaataaagtgcccatgtctgaaaaatctatttctaatgggttctttgaatgtgaacgacggtgcgatgcggacccatgctgcactggctttggatttctaaatgtttcccagttaaaaggaggagaggtgacatgtctcactctgaacagcttgggaattcagatgtgcagtgaggagaatggaggagcctggcgcattttggactgtggctctcctgacattgaagtccacacctatcccttcggatggtaccagaagcccattgctcaaaataatgctcccagtttttgccctttggttgttctgccttccctcacagagaaagtgtctctggactcgtggcagtccctggccctctcttcagtggttgttgatccatccattaggcactttgatgttgcccatgtcagcactgctgccaccagcaatttctctgctgtccgagacctctgtttgtcggaatgttcccaacatgaggcctgtctcatcaccactctgcaaacccaacctggggctgtgagatgtatgttctatgctgatactcaaagctgcacacatagtctgcagggtcagaactgccgacttctgcttcgtgaagaggccacccacatctaccggaagccaggaatctctctgctcagctatgaggcatctgtaccttctgtgcccatttccacccatggccggctgctgggcaggtcccaggccatccaggtgggtacctcatggaagcaagtggaccagttccttggagttccatatgctgccccgcccctggcagagaggcgcttccaggcacncgcgagtagagcaccgcgagtagaggtaccgagc

SEQ ID NO: 447657 - DNA, 655 bp, Homo sapiens
agcggccgcctactactactaaattcgcggccgcgtcgactgggcaaagagggcccgaggaaacgtcttcatgtaccatgctcctgaaaactacggccatggcagcctggagctgctggcggatgttcagtttgccttggggcttcccttctacccagcctacgaggggcagttttctctggaggagaagagcctgtcgctgaaaatcatgcagtacttttcccacttcatcagatcaggaaatcccaactacccttatgagttctcacggaaagtacccacatttgcaaccccctggcctgactttgtaccccgtgctggtggagagaactacaaggagttcagtgagctgctccccaatcgacagggcctgaagaaagccgactgctccttctggtccaagtacatctcgtctctgaagacatctgcagatggagccaagggcgggcagtcagcagagagtgaagaggaggagttgacggctggatctgggctaagagaagatctcctaagcctccaggaaccaggctctaagacctacagcaagtgaccagcccttgagctccccaaaaacctcacccgaggctgcccactatggtcatctttttctctaaaatagccacttaccttcaataaagtatctacatgcggtgaa

SEQ ID NO: 447658 - DNA, 6973 bp, Homo sapiens
catctcagtcgacttagagacccccctggttgttcatcagagggattgaagtgtatggaccgccagctgggaagccaaagcgatgtccaaggagctgtgaaataagaaatcgtcgtcttctccacggggtgggagataagtcaccaccccagtgttctgcggagggagagtttatgcctgtccagtgcaaatttgtcaacaccacagacatgatgatttttgatctggtccacagctacaacaggtttccagatgcatttgtgaccttcagttccttccagaggaggttccctgaggtatctgggtattgccactgtgctgacagccaagggcgggaactggctgagacaggtttggagttgttactggatgaaatttatgacaccatttttgctggcctggaccttccttccaccttcactgaaaccaccctgtaccggatactgcagagacggttcctcgcagttcaatcagtcatctctggcagattccgatgccccacaaaatgtgaagtggagcggtttacagcaaccagctttggtcacccctatgttccaagctgccgccgaaatggcgactatcaggcggtgcagtgccagacggaagggccctgctggtgtgtggacgcccaggggaaggaaatgcatggaacccggcagcaaggggagccgccatcttgtgctgaaggccaatcttgtgcctccgaaaggcagcaggccttgtccagactctactttgggacctcaggctacttcagccagcacgacctgttctcttccccagagaaaagatgggcctctccaagagtagccagatttgccacatcctgcccacccacgatcaaggagctctttgtggactctgggcttctccgcccaatggtggagggacagagccaacagttttctgtctcagaaaatcttctcaaagaagccatccgagcaatttttccctcccgagggctggctcgtcttgcccttcagtttaccaccaacccaaagagactccagcaaaacctttttggagggaaatttttggtgaatgttggccagtttaacttgtctggagcccttggcacaagaggcacatttaacttcagtcaatttttccagcaacttggtcttgcaagcttcttgaatggagggagacaagaagatttggccaagccactctctgtgggattagattcaaattcttccacaggaacccctgaagctgctaagaaggatggtactatgaataagccaactgtgggcagctttggctttgaaattaacctacaagagaaccaaaatgccctcaaattccttgcttctctcctggagcttccagaattccttctcttcttgcaacatgctatctctgtgccagaagatgtggcaagagatttaggtgatgtgatggaaacggtactcagctcccagacctgtgagcagacacctgaaaggctatttgtcccatcatgcacgacagaaggaagctatgaggatgtccaatgcttttccggagagtgctggtgtgtgaattcctggggcaaagagcttccaggctcaagagtcagaggtggacagccaaggtgccccacagactgtgaaaagcaaagggctcgcatgcaaagcctcatgggcagccagcctgctggctccaccttgtttgtccctgcttgtactagtgagggacatttcctgcctgtccagtgcttcaactcagagtgctactgtgttgatgctgagggtcaggccattcctggaactcgaagtgcaatagggaagcccaagaaatgccccacgccctgtcaattacagtctgagcaagctttcctcaggacggtgcaggccctgctctctaactccagcatgctacccaccctttccgacacctacatcccacagtgcagcaccgatgggcagtggagacaagtgcaatgcaatgggcctcctgagcaggtcttcgagttgtaccaacgatgggaggctcagaacaagggccaggatctgacgcctgccaagctgctagtgaagatcatgagctacagagaagcagcttccggaaacttcagtctctttattcaaagtctgtatgaggctggccagcaagatgtcttcccggtgctgtcacaatacccttctctgcaagatgtcccactagcagcactggaagggaaacggccccagcccagggagaatatcctcctggagccctacctcttctggcagatcttaaatggccaactcagccaatacccggggtcctactcagacttcagcactcctttggcacattttgatcttcggaactgctggtgtgtggatgaggctggccaagaactggaaggaatgcggtctgagccaagcaagctcccaacatgtcctggctcctgtgaggaagcaaagctccgtgtactgcagttcattagggaaacggaagagattgtttcagcttccaacagttctcggttccctctgggggagagtttcctggtggccaagggaatccggctgaggaatgaggacctcggccttcctccgctcttcccgccccgggaggctttcgcggagcagtttctgcgtgggagtgattacgccattcgcctggcggctcagtctaccttaagcttctatcagagacgccgcttttccccggacgactcggctggagcatccgcccttctgcggtcgggcccctacatgccacagtgtgatgcgtttggaagttgggagcctgtgcagtgccacgctgggactgggcactgctggtgtgtagatgagaaaggagggttcatccctggctcactgactgcccgctctctgcagattccacagtgcccgacaacctgcgagaaatctcgaaccagtgggctgctttccagttggaaacaggctagatcccaagaaaacccatctccaaaagacctgttcgtcccagcctgcctagaaacaggagagtatgccaggctgcaggcatcgggggctggcacctggtgtgtggaccctgcatcaggagaagagttgcggcctggctcgagcagcagtgcccagtgcccaagcctctgcaatgtgctcaagagtggagtcctctccaggagagtcagcccaggctatgtcccagcctgcagggcagaggatgggggcttttccccagtgcaatgtgaccaggcccagggcagctgctggtgtgtcatggacagcggagaagaggtgcctgggacgcgcgtgaccgggggccagcccgcctgtgagagcccgcggtgtccgctgccattcaacgcgtcggaggtggttggtggaacaatcctgtgtgagacaatctcgggccccacaggctctgccatgcagcagtgccaattgctgtgccgccagggctcctggagcgtgtttccaccagggccattgatatgtagcctggagagcggacgctgggagtcacagctgcctcagccccgggcctgccaacggccccagctgtggcagaccatccagacccaagggcactttcagctccagctcccgccgggcaagatgtgcagtgctgactacgcggatttgctgcagactttccaggttttcatattggatgagctgacagcccgcggcttctgccagatccaggtgaagacttttggcaccctggtttccattcctgtctgcaacaactcctctgtgcaggtgggttgtctgaccagggagcgtttaggagtgaatgttacatggaaatcacggcttgaggacatcccagtggcttctcttcctgacttacatgacattgagagagccttggtgggcaaggatctccttgggcgcttcacagatctgatccagagtggctcattccagcttcatctggactccaagacgttcccagcggaaaccatccgcttcctccaaggggaccactttggcacctctcccaggacatggtttgggtgctcggaaggattctaccaagtcttgacaagtgaggccagtcaggacggactgggatgcgttaagtgtcctgaaggaagctattcccaagatgaggaatgcattccttgtcctgttggattctaccaagaacaggcagggagcttggcctgtgtcccatgtcctgtgggcagaacgaccatttctgctggagctttcagccagactcactgtgtcactgactgtcagaggaacgaagcaggcctgcaatgtgaccagaatggccagtatcgagccagccagaaggacaggggcagtgggaaggccttctgtgtggacggcgaggggcggaggctgccatggtgggaaacagaggcccctcttgaggactcacagtgtttgatgatgcagaagtttgagaaggttccagaatcaaaggtgatcttcgacgccaatgctcctgtggctgtcagatccaaagttcctgattctgagttccccgtgatgcagtgcttgacagattgcacagaggacgaggcctgcagcttcttcaccgtgtccacgacggagccagagatttcctgtgatttctatgcttggacaagtgacaatgttgcctgcatgacttctgaccagaaacgagatgcactggggaactcaaaggccaccagctttggaagtcttcgctgccaggtgaaagtgaggagccatggtcaagattctccagctgtgtatttgaaaaagggccaaggatccaccacaacacttcagaaacgctttgaacccactggtttccaaaacatgctttctggattgtacaaccccattgtgttctcagcctcaggagccaatctaaccgatgctcacctcttctgtcttcttgcatgcgaccgtgatctgtgttgcgatggcttcgtcctcacacaggttcaaggaggtgccatcatctgtgggttgctgagctcacccagtgtcctgctttgtaatgtcaaagactggatggatccctctgaagcctgggctaatgctacatgtcctggtgtgacatatgaccaggagagccaccaggtgatattgcgtcttggagaccaggagttcatcaagagtctgacacccttagaaggaactcaagacacctttaccaattttcagcaggtttatctctggaaagattctgacatggggtctcggcctgagtctatgggatgtagaaaagacacagtgccaaggccagcatctccaacagaagcaggtttgacaacagaacttttctcccctgtggacctcaaccaggtcattgtcaatggaaatcaatcactatccagccagaagcactggcttttcaagcacctgttttcagcccagcaggcaaacctatggtgcctttctcgttgtgtgcaggagcactctttctgtcagctcgcagagataacagagagtgcatccttgtacttcacctgcaccctctacccagaggcacaggtgtgtgatgacatcatggagtccaatgcccagggctgcagactgatcctgcctcagatgccaaaggccctgttccggaagaaagttatactggaagataaagtgaagaacttttacactcgcctgccgttccaaaaactgatggggatatccattagaaataaagtgcccatgtctgaaaaatctatttctaatgggttctttgaatgtgaacgacggtgcgatgcggacccatgctgcactggctttggatttctaaatgtttcccagttaaaaggaggagaggtgacatgtctcactctgaacagcttgggaattcagatgtgcagtgaggagaatggaggagcctggcgcattttggactgtggctctcctgacattgaagtccacacctatcccttcggatggtaccagaagcccattgctcaaaataatgctcccagtttttgccctttggttgttctgccttccctcacagagaaagattcacatgtacctggccaaacgaacaactccatgttttccaaaaggcttggagaacataccaggtacctctcctctttccctttgtgtttgtcattttggcgaattactggaagatggtggttccagctgaaaggctttttggcaatttttaacagctgaaaataaaccttgaaataaacattttctcctttaactgatgtctgggaaggaagaaacaaaaaaagaaagagaagaaaggaaataaggaaggagggagggagagagtgaaggagggaagaaaagagaattaaacacgattatctacatatcaatggaaaatttcaaatatattctagcataatttttttctacttagtatccattaaaaaagggaatcattgtggaatgcttaaatcaatcaaatgaacacagccatccctcggatacttattttttttttttttttgtggtgagaacatttgaaattgattctcttagtagtttcgaaatgtgccatatgttaactatagtcactgtgctgtgtaatagatctcaaaaagtactcctctgcatcatatacatatatcataaccttgtattataccccataaatatgtataattataatctgtccgttaaaaataaaaattaagctttaaaaaaggggatatggtgctttctagaaaggaatagaagtgcctccatgtcacccagaggcccgcctgtgcagagactgcagctgtgctgcctccaggttgtgaggtgacccaagctgcccccatcacctcctgcctctttgctgcccccatcatccctcccagacccttccttctcctctgcccttgtcccctcagcagctctggtttgcagggggtatcaccatatagggctgtcctgggtgcaaacactgacttgctgcctgcctttcagctgtttggtcttgggcaagtcagtggccctctgtgaacctcacttttccctcctataaagtagggttaggacagttcatctcaatgaagtaccattagatggaaccagttaatctttacatgactttttaagcacttcttacctgctaaatagatagtagcactcattgctagtctatctggtcacagaggaaa

SEQ ID NO: 447659 - DNA, 3427 bp, Homo sapiens
catctcagtcgacttagagacccccctggttgttcatcagagggattgaagtgtatggaccgccagctgggaagccaaagcgatgtccaaggagctgtgaaataagaaatcgtcgtcttctccacggggtgggagataagtcaccaccccagtgttctgcggagggagagtttatgcctgtccagtgcaaatttgtcaacaccacagacatgatgatttttgatctggtccacagctacaacaggtttccagatgcatttgtgaccttcagttccttccagaggaggttccctgaggtatctgggtattgccactgtgctgacagccaagggcgggaactggctgagacaggtttggagttgttactggatgaaatttatgacaccatttttgctggcctggaccttccttccaccttcactgaaaccaccctgtaccggatactgcagagacggttcctcgcagttcaatcagtcatctctggcagattccgatgccccacaaaatgtgaagtggagcggtttacagcaaccagctttggtcacccctatgttccaagctgccgccgaaatggcgactatcaggcggtgcagtgccagacggaagggccctgctggtgtgtggacgcccaggggaaggaaatgcatggaacccggcagcaaggggagccgccatcttgtgctgaaggccaatcttgtgcctccgaaaggcagcaggccttgtccagactctactttgggacctcaggctacttcagccagcacgacctgttctcttccccagagaaaagatgggcctctccaagagtagccagatttgccacatcctgcccacccacgatcaaggagctctttgtggactctgggcttctccgcccaatggtggagggacagagccaacagttttctgtctcagaaaatcttctcaaagaagccatccgagcaatttttccctcccgagggctggctcgtcttgcccttcagtttaccaccaacccaaagagactccagcaaaacctttttggagggaaatttttggtgaatgttggccagtttaacttgtctggagcccttggcacaagaggcacatttaacttcagtcaatttttccagcaacttggtcttgcaagcttcttgaatggagggagacaagaagatttggccaagccactctctgtgggattagattcaaattcttccacaggaacccctgaagctgctaagaaggatggtactatgaataagccaactgtgggcagctttggctttgaaattaacctacaagagaaccaaaatgccctcaaattccttgcttctctcctggagcttccagaattccttctcttcttgcaacatgctatctctgtgccagaagatgtggcaagagatttaggtgatgtgatggaaacggtactcagctcccagacctgtgagcagacacctgaaaggctatttgtcccatcatgcacgacagaaggaagctatgaggatgtccaatgcttttccggagagtgctggtgtgtgaattcctggggcaaagagcttccaggctcaagagtcagaggtggacagccaaggtgccccacagactgtgaaaagcaaagggctcgcatgcaaagcctcatgggcagccagcctgctggctccaccttgtttgtccctgcttgtactagtgagggacatttcctgcctgtccagtgcttcaactcagagtgctactgtgttgatgctgagggtcaggccattcctggaactcgaagtgcaatagggaagcccaagaaatgccccacgccctgtcaattacagtctgagcaagctttcctcaggacggtgcaggccctgctctctaactccagcatgctacccaccctttccgacacctacatcccacagtgcagcaccgatgggcagtggagacaagtgcaatgcaatgggcctcctgagcaggtcttcgagttgtaccaacgatgggaggctcagaacaagggccaggatctgacgcctgccaagctgctagtgaagatcatgagctacagagaagcagcttccggaaacttcagtctctttattcaaagtctgtatgaggctggccagcaagatgtcttcccggtgctgtcacaatacccttctctgcaagatgtcccactagcagcactggaagggaaacggccccagcccagggagaatatcctcctggagccctacctcttctggcagatcttaaatggccaactcagccaatacccggggtcctactcagacttcagcactcctttggcacattttgatcttcggaactgctggtgtgtggatgaggctggccaagaactggaaggaatgcggtctgagccaagcaagctcccaacatgtcctggctcctgtgaggaagcaaagctccgtgtactgcagttcattagggaaacggaagagattgtttcagcttccaacagttctcggttccctctgggggagagtttcctggtggccaagggaatccggctgaggaatgaggacctcggccttcctccgctcttcccgccccgggaggctttcgcggagcagtttctgcgtgggagtgattacgccattcgcctggcggctcagtctaccttaagcttctatcagagacgccgcttttccccggacgactcggctggagcatccgcccttctgcggtcgggcccctacatgccacagtgtgatgcgtttggaagttgggagcctgtgcagtgccacgctgggactgggcactgctggtgtgtagatgagaaaggagggttcatccctggctcactgactgcccgctctctgcagattccacagtgcccgacaacctgcgagaaatctcgaaccagtgggctgctttccagttggaaacaggctagatcccaagaaaacccatctccaaaagacctgttcccttctacccagcctacgaggggcagttttctctggaggagaagagcctgtcgctgaaaatcatgcagtacttttcccacttcatcagatcaggaaatcccaactacccttatgagttctcacggaaagtacccacatttgcaaccccctggcctgactttgtaccccgtgctggtggagagaactacaaggagttcagtgagctgctccccaatcgacagggcctgaagaaagccgactgctccttctggtccaagtacatctcgtctctgaagacatctgcagatggagccaagggcgggcagtcagcagagagtgaagaggaggagttgacggctggatctgggctaagagaagatctcctaagcctccaggaaccaggctctaagacctacagcaagtgaccagcccttgagctccccaaaaacctcacccgaggctgcccactatggtcatctttttctctaaaatagccacttaccttcaataaagtatctacatgcggtgaa

SEQ ID NO: 447660 - DNA, 5216 bp, Homo sapiens
catctcagtcgacttagagacccccctggttgttcatcagagggattgaagtgtatggaccgccagctgggaagccaaagcgatgtccaaggagctgtgaaataagaaatcgtcgtcttctccacggggtgggagataagtcaccaccccagtgttctgcggagggagagtttatgcctgtccagtgcaaatttgtcaacaccacagacatgatgatttttgatctggtccacagctacaacaggtttccagatgcatttgtgaccttcagttccttccagaggaggttccctgaggtatctgggtattgccactgtgctgacagccaagggcgggaactggctgagacaggtttggagttgttactggatgaaatttatgacaccatttttgctggcctggaccttccttccaccttcactgaaaccaccctgtaccggatactgcagagacggttcctcgcagttcaatcagtcatctctggcagattccgatgccccacaaaatgtgaagtggagcggtttacagcaaccagctttggtcacccctatgttccaagctgccgccgaaatggcgactatcaggcggtgcagtgccagacggaagggccctgctggtgtgtggacgcccaggggaaggaaatgcatggaacccggcagcaaggggagccgccatcttgtgctgaaggccaatcttgtgcctccgaaaggcagcaggccttgtccagactctactttgggacctcaggctacttcagccagcacgacctgttctcttccccagagaaaagatgggcctctccaagagtagccagatttgccacatcctgcccacccacgatcaaggagctctttgtggactctgggcttctccgcccaatggtggagggacagagccaacagttttctgtctcagaaaatcttctcaaagaagccatccgagcaatttttccctcccgagggctggctcgtcttgcccttcagtttaccaccaacccaaagagactccagcaaaacctttttggagggaaatttttggtgaatgttggccagtttaacttgtctggagcccttggcacaagaggcacatttaacttcagtcaatttttccagcaacttggtcttgcaagcttcttgaatggagggagacaagaagatttggccaagccactctctgtgggattagattcaaattcttccacaggaacccctgaagctgctaagaaggatggtactatgaataagccaactgtgggcagctttggctttgaaattaacctacaagagaaccaaaatgccctcaaattccttgcttctctcctggagcttccagaattccttctcttcttgcaacatgctatctctgtgccagaagatgtggcaagagatttaggtgatgtgatggaaacggtactcagctcccagacctgtgagcagacacctgaaaggctatttgtcccatcatgcacgacagaaggaagctatgaggatgtccaatgcttttccggagagtgctggtgtgtgaattcctggggcaaagagcttccaggctcaagagtcagaggtggacagccaaggtgccccacagactgtgaaaagcaaagggctcgcatgcaaagcctcatgggcagccagcctgctggctccaccttgtttgtccctgcttgtactagtgagggacatttcctgcctgtccagtgcttcaactcagagtgctactgtgttgatgctgagggtcaggccattcctggaactcgaagtgcaatagggaagcccaagaaatgccccacgccctgtcaattacagtctgagcaagctttcctcaggacggtgcaggccctgctctctaactccagcatgctacccaccctttccgacacctacatcccacagtgcagcaccgatgggcagtggagacaagtgcaatgcaatgggcctcctgagcaggtcttcgagttgtaccaacgatgggaggctcagaacaagggccaggatctgacgcctgccaagctgctagtgaagatcatgagctacagagaagcagcttccggaaacttcagtctctttattcaaagtctgtatgaggctggccagcaagatgtcttcccggtgctgtcacaatacccttctctgcaagatgtcccactagcagcactggaagggaaacggccccagcccagggagaatatcctcctggagccctacctcttctggcagatcttaaatggccaactcagccaatacccggggtcctactcagacttcagcactcctttggcacattttgatcttcggaactgctggtgtgtggatgaggctggccaagaactggaaggaatgcggtctgagccaagcaagctcccaacatgtcctggctcctgtgaggaagcaaagctccgtgtactgcagttcattagggaaacggaagagattgtttcagcttccaacagttctcggttccctctgggggagagtttcctggtggccaagggaatccggctgaggaatgaggacctcggccttcctccgctcttcccgccccgggaggctttcgcggagcagtttctgcgtgggagtgattacgccattcgcctggcggctcagtctaccttaagcttctatcagagacgccgcttttccccggacgactcggctggagcatccgcccttctgcggtcgggcccctacatgccacagtgtgatgcgtttggaagttgggagcctgtgcagtgccacgctgggactgggcactgctggtgtgtagatgagaaaggagggttcatccctggctcactgactgcccgctctctgcagattccacagtgcccgacaacctgcgagaaatctcgaaccagtgggctgctttccagttggaaacaggctagatcccaagaaaacccatctccaaaagacctgttcgtcccagcctgcctagaaacaggagagtatgccaggctgcaggcatcgggggctggcacctggtgtgtggaccctgcatcaggagaagagttgcggcctggctcgagcagcagtgcccagtgcccaagcctctgcaatgtgctcaagagtggagtcctctccaggagagtcagcccaggctatgtcccagcctgcagggcagaggatgggggcttttccccagtgcaatgtgaccaggcccagggcagctgctggtgtgtcatggacagcggagaagaggtgcctgggacgcgcgtgaccgggggccagcccgcctgtgagagcccgcggtgtccgctgccattcaacgcgtcggaggtggttggtggaacaatcctgtgtgagacaatctcgggccccacaggctctgccatgcagcagtgccaattgctgtgccgccagggctcctggagcgtgtttccaccagggccattgatatgtagcctggagagcggacgctgggagtcacagctgcctcagccccgggcctgccaacggccccagctgtggcagaccatccagacccaagggcactttcagctccagctcccgccgggcaagatgtgcagtgctgactacgcggatttgctgcagactttccaggttttcatattggatgagctgacagcccgcggcttctgccagatccaggtgaagacttttggcaccctggtttccattcctgtctgcaacaactcctctgtgcaggtgggttgtctgaccagggagcgtttaggagtgaatgttacatggaaatcacggcttgaggacatcccagtggcttctcttcctgacttacatgacattgagagagccttggtgggcaaggatctccttgggcgcttcacagatctgatccagagtggctcattccagcttcatctggactccaagacgttcccagcggaaaccatccgcttcctccaaggggaccactttggcacctctcccaggacatggtttgggtgctcggaaggattctaccaagtcttgacaagtgaggccagtcaggacggactgggatgcgttaagtgtcctgaaggaagctattcccaagatgaggaatgcattccttgtcctgttggattctaccaagaacaggcagggagcttggcctgtgtcccatgtcctgtgggcagaacgaccatttctgctggagctttcagccagactcactgtgtcactgactgtcagaggaacgaagcaggcctgcaatgtgaccagaatggccagtatcgagccagccagaaggacaggggcagtgggaaggccttctgtgtggacggcgaggggcggaggctgccatggtgggaaacagaggcccctcttgaggactcacagtgtttgatgatgcagaagtttgagaaggttccagaatcaaaggtgatcttcgacgccaatgctcctgtggctgtcagatccaaagttcctgattctgagttccccgtgatgcagtgcttgacagattgcacagaggacgaggcctgcagcttcttcaccgtgtccacgacggagccagagatttcctgtgatttctatgcttggacaagtgacaatgttgcctgcatgacttctgaccagaaacgagatgcactggggaactcaaaggccaccagctttggaagtcttcgctgccaggtgaaagtgaggagccatggtcaagattctccagctgtgtatttgaaaaagggccaaggatccaccacaacacttcagaaacgctttgaacccactggtttccaaaacatgctttctggattgtacaaccccattgtgttctcagcctcaggagccaatctaaccgatgctcacctcttctgtcttcttgcatgcgaccgtgatctgtgttgcgatggcttcgtcctcacacaggttcaaggaggtgccatcatctgtgggttgctgagctcacccagtgtcctgctttgtaatgtcaaagactggatggatccctctgaagcctgggctaatgctacatgtcctggtgtgacatatgaccaggagagccaccaggtgatattgcgtcttggagaccaggagttcatcaagagtctgacacccttagaaggaactcaagacacctttaccaattttcagcaggtttatctctggaaagattctgacatggggtctcggcctgagtctatgggatgtagaaaagacacagtgccaaggccagcatctccaacagaagcagtgacacaagacttctcacactgtggaccccaaccgccatcttcgagggatccgtctagacga

SEQ ID NO: 447661 - DNA, 4900 bp, Homo sapiens
catctcagtcgacttagagacccccctggttgttcatcagagggattgaagtgtatggaccgccagctgggaagccaaagcgatgtccaaggagctgtgaaataagaaatcgtcgtcttctccacggggtgggagataagtcaccaccccagtgttctgcggagggagagtttatgcctgtccagtgcaaatttgtcaacaccacagacatgatgatttttgatctggtccacagctacaacaggtttccagatgcatttgtgaccttcagttccttccagaggaggttccctgaggtatctgggtattgccactgtgctgacagccaagggcgggaactggctgagacaggtttggagttgttactggatgaaatttatgacaccatttttgctggcctggaccttccttccaccttcactgaaaccaccctgtaccggatactgcagagacggttcctcgcagttcaatcagtcatctctggcagattccgatgccccacaaaatgtgaagtggagcggtttacagcaaccagctttggtcacccctatgttccaagctgccgccgaaatggcgactatcaggcggtgcagtgccagacggaagggccctgctggtgtgtggacgcccaggggaaggaaatgcatggaacccggcagcaaggggagccgccatcttgtgctgaaggccaatcttgtgcctccgaaaggcagcaggccttgtccagactctactttgggacctcaggctacttcagccagcacgacctgttctcttccccagagaaaagatgggcctctccaagagtagccagatttgccacatcctgcccacccacgatcaaggagctctttgtggactctgggcttctccgcccaatggtggagggacagagccaacagttttctgtctcagaaaatcttctcaaagaagccatccgagcaatttttccctcccgagggctggctcgtcttgcccttcagtttaccaccaacccaaagagactccagcaaaacctttttggagggaaatttttggtgaatgttggccagtttaacttgtctggagcccttggcacaagaggcacatttaacttcagtcaatttttccagcaacttggtcttgcaagcttcttgaatggagggagacaagaagatttggccaagccactctctgtgggattagattcaaattcttccacaggaacccctgaagctgctaagaaggatggtactatgaataagccaactgtgggcagctttggctttgaaattaacctacaagagaaccaaaatgccctcaaattccttgcttctctcctggagcttccagaattccttctcttcttgcaacatgctatctctgtgccagaagatgtggcaagagatttaggtgatgtgatggaaacggtactcagctcccagacctgtgagcagacacctgaaaggctatttgtcccatcatgcacgacagaaggaagctatgaggatgtccaatgcttttccggagagtgctggtgtgtgaattcctggggcaaagagcttccaggctcaagagtcagaggtggacagccaaggtgccccacagactgtgaaaagcaaagggctcgcatgcaaagcctcatgggcagccagcctgctggctccaccttgtttgtccctgcttgtactagtgagggacatttcctgcctgtccagtgcttcaactcagagtgctactgtgttgatgctgagggtcaggccattcctggaactcgaagtgcaatagggaagcccaagaaatgccccacgccctgtcaattacagtctgagcaagctttcctcaggacggtgcaggccctgctctctaactccagcatgctacccaccctttccgacacctacatcccacagtgcagcaccgatgggcagtggagacaagtgcaatgcaatgggcctcctgagcaggtcttcgagttgtaccaacgatgggaggctcagaacaagggccaggatctgacgcctgccaagctgctagtgaagatcatgagctacagagaagcagcttccggaaacttcagtctctttattcaaagtctgtatgaggctggccagcaagatgtcttcccggtgctgtcacaatacccttctctgcaagatgtcccactagcagcactggaagggaaacggccccagcccagggagaatatcctcctggagccctacctcttctggcagatcttaaatggccaactcagccaatacccggggtcctactcagacttcagcactcctttggcacattttgatcttcggaactgctggtgtgtggatgaggctggccaagaactggaaggaatgcggtctgagccaagcaagctcccaacatgtcctggctcctgtgaggaagcaaagctccgtgtactgcagttcattagggaaacggaagagattgtttcagcttccaacagttctcggttccctctgggggagagtttcctggtggccaagggaatccggctgaggaatgaggacctcggccttcctccgctcttcccgccccgggaggctttcgcggagcagtttctgcgtgggagtgattacgccattcgcctggcggctcagtctaccttaagcttctatcagagacgccgcttttccccggacgactcggctggagcatccgcccttctgcggtcgggcccctacatgccacagtgtgatgcgtttggaagttgggagcctgtgcagtgccacgctgggactgggcactgctggtgtgtagatgagaaaggagggttcatccctggctcactgactgcccgctctctgcagattccacagtgcccgacaacctgcgagaaatctcgaaccagtgggctgctttccagttggaaacaggctagatcccaagaaaacccatctccaaaagacctgttcgtcccagcctgcctagaaacaggagagtatgccaggctgcaggcatcgggggctggcacctggtgtgtggaccctgcatcaggagaagagttgcggcctggctcgagcagcagtgcccagtgcccaagcctctgcaatgtgctcaagagtggagtcctctccaggagagtcagcccaggctatgtcccagcctgcagggcagaggatgggggcttttccccagtgcaatgtgaccaggcccagggcagctgctggtgtgtcatggacagcggagaagaggtgcctgggacgcgcgtgaccgggggccagcccgcctgtgagagcccgcggtgtccgctgccattcaacgcgtcggaggtggttggtggaacaatcctgtgtgagacaatctcgggccccacaggctctgccatgcagcagtgccaattgctgtgccgccagggctcctggagcgtgtttccaccagggccattgatatgtagcctggagagcggacgctgggagtcacagctgcctcagccccgggcctgccaacggccccagctgtggcagaccatccagacccaagggcactttcagctccagctcccgccgggcaagatgtgcagtgctgactacgcggatttgctgcagactttccaggttttcatattggatgagctgacagcccgcggcttctgccagatccaggtgaagacttttggcaccctggtttccattcctgtctgcaacaactcctctgtgcaggtgggttgtctgaccagggagcgtttaggagtgaatgttacatggaaatcacggcttgaggacatcccagtggcttctcttcctgacttacatgacattgagagagccttggtgggcaaggatctccttgggcgcttcacagatctgatccagagtggctcattccagcttcatctggactccaagacgttcccagcggaaaccatccgcttcctccaaggggaccactttggcacctctcccaggacatggtttgggtgctcggaaggattctaccaagtcttgacaagtgaggccagtcaggacggactgggatgcgttaagtgtcctgaaggaagctattcccaagatgaggaatgcattccttgtcctgttggattctaccaagaacaggcagggagcttggcctgtgtcccatgtcctgtgggcagaacgaccatttctgctggagctttcagccagactcactgtgtcactgactgtcagaggaacgaagcaggcctgcaatgtgaccagaatggccagtatcgagccagccagaaggacaggggcagtgggaaggccttctgtgtggacggcgaggggcggaggctgccatggtgggaaacagaggcccctcttgaggactcacagtgtttgatgatgcagaagtttgagaaggttccagaatcaaaggtgatcttcgacgccaatgctcctgtggctgtcagatccaaagttcctgattctgagttccccgtgatgcagtgcttgacagattgcacagaggacgaggcctgcagcttcttcaccgtgtccacgacggagccagagatttcctgtgatttctatgcttggacaagtgacaatgttgcctgcatgacttctgaccagaaacgagatgcactggggaactcaaaggccaccagctttggaagtcttcgctgccaggtgaaagtgaggagccatggtcaagattctccagctgtgtatttgaaaaagggccaaggatccaccacaacacttcagaaacgctttgaacccactggtttccaaaacatgctttctggattgtacaaccccattgtgttctcagcctcaggagccaatctaaccgatgctcacctcttctgtcttcttgcatgcgaccgtgatctgtgttgcgatggcttcgtcctcacacaggttcaaggaggccatcatctgtgggttgctgagctcacccagtacccagtgatcggggatacctctagaac

SEQ ID NO: 447662 - DNA, 4500 bp, Homo sapiens
  misc_feature (4430)..(4430): n is a, c, g, or t
  misc_feature (4457)..(4457): n is a, c, g, or t
  misc_feature (4479)..(4479): n is a, c, g, or t
catctcagtcgacttagagacccccctggttgttcatcagagggattgaagtgtatggaccgccagctgggaagccaaagcgatgtccaaggagctgtgaaataagaaatcgtcgtcttctccacggggtgggagataagtcaccaccccagtgttctgcggagggagagtttatgcctgtccagtgcaaatttgtcaacaccacagacatgatgatttttgatctggtccacagctacaacaggtttccagatgcatttgtgaccttcagttccttccagaggaggttccctgaggtatctgggtattgccactgtgctgacagccaagggcgggaactggctgagacaggtttggagttgttactggatgaaatttatgacaccatttttgctggcctggaccttccttccaccttcactgaaaccaccctgtaccggatactgcagagacggttcctcgcagttcaatcagtcatctctggcagattccgatgccccacaaaatgtgaagtggagcggtttacagcaaccagctttggtcacccctatgttccaagctgccgccgaaatggcgactatcaggcggtgcagtgccagacggaagggccctgctggtgtgtggacgcccaggggaaggaaatgcatggaacccggcagcaaggggagccgccatcttgtgctgaaggccaatcttgtgcctccgaaaggcagcaggccttgtccagactctactttgggacctcaggctacttcagccagcacgacctgttctcttccccagagaaaagatgggcctctccaagagtagccagatttgccacatcctgcccacccacgatcaaggagctctttgtggactctgggcttctccgcccaatggtggagggacagagccaacagttttctgtctcagaaaatcttctcaaagaagccatccgagcaatttttccctcccgagggctggctcgtcttgcccttcagtttaccaccaacccaaagagactccagcaaaacctttttggagggaaatttttggtgaatgttggccagtttaacttgtctggagcccttggcacaagaggcacatttaacttcagtcaatttttccagcaacttggtcttgcaagcttcttgaatggagggagacaagaagatttggccaagccactctctgtgggattagattcaaattcttccacaggaacccctgaagctgctaagaaggatggtactatgaataagccaactgtgggcagctttggctttgaaattaacctacaagagaaccaaaatgccctcaaattccttgcttctctcctggagcttccagaattccttctcttcttgcaacatgctatctctgtgccagaagatgtggcaagagatttaggtgatgtgatggaaacggtactcagctcccagacctgtgagcagacacctgaaaggctatttgtcccatcatgcacgacagaaggaagctatgaggatgtccaatgcttttccggagagtgctggtgtgtgaattcctggggcaaagagcttccaggctcaagagtcagaggtggacagccaaggtgccccacagactgtgaaaagcaaagggctcgcatgcaaagcctcatgggcagccagcctgctggctccaccttgtttgtccctgcttgtactagtgagggacatttcctgcctgtccagtgcttcaactcagagtgctactgtgttgatgctgagggtcaggccattcctggaactcgaagtgcaatagggaagcccaagaaatgccccacgccctgtcaattacagtctgagcaagctttcctcaggacggtgcaggccctgctctctaactccagcatgctacccaccctttccgacacctacatcccacagtgcagcaccgatgggcagtggagacaagtgcaatgcaatgggcctcctgagcaggtcttcgagttgtaccaacgatgggaggctcagaacaagggccaggatctgacgcctgccaagctgctagtgaagatcatgagctacagagaagcagcttccggaaacttcagtctctttattcaaagtctgtatgaggctggccagcaagatgtcttcccggtgctgtcacaatacccttctctgcaagatgtcccactagcagcactggaagggaaacggccccagcccagggagaatatcctcctggagccctacctcttctggcagatcttaaatggccaactcagccaatacccggggtcctactcagacttcagcactcctttggcacattttgatcttcggaactgctggtgtgtggatgaggctggccaagaactggaaggaatgcggtctgagccaagcaagctcccaacatgtcctggctcctgtgaggaagcaaagctccgtgtactgcagttcattagggaaacggaagagattgtttcagcttccaacagttctcggttccctctgggggagagtttcctggtggccaagggaatccggctgaggaatgaggacctcggccttcctccgctcttcccgccccgggaggctttcgcggagcagtttctgcgtgggagtgattacgccattcgcctggcggctcagtctaccttaagcttctatcagagacgccgcttttccccggacgactcggctggagcatccgcccttctgcggtcgggcccctacatgccacagtgtgatgcgtttggaagttgggagcctgtgcagtgccacgctgggactgggcactgctggtgtgtagatgagaaaggagggttcatccctggctcactgactgcccgctctctgcagattccacagtgcccgacaacctgcgagaaatctcgaaccagtgggctgctttccagttggaaacaggctagatcccaagaaaacccatctccaaaagacctgttcgtcccagcctgcctagaaacaggagagtatgccaggctgcaggcatcgggggctggcacctggtgtgtggaccctgcatcaggagaagagttgcggcctggctcgagcagcagtgcccagtgcccaagcctctgcaatgtgctcaagagtggagtcctctccaggagagtcagcccaggctatgtcccagcctgcagggcagaggatgggggcttttccccagtgcaatgtgaccaggcccagggcagctgctggtgtgtcatggacagcggagaagaggtgcctgggacgcgcgtgaccgggggccagcccgcctgtgagagcccgcggtgtccgctgccattcaacgcgtcggaggtggttggtggaacaatcctgtgtgagacaatctcgggccccacaggctctgccatgcagcagtgccaattgctgtgccgccagggctcctggagcgtgtttccaccagggccattgatatgtagcctggagagcggacgctgggagtcacagctgcctcagccccgggcctgccaacggccccagctgtggcagaccatccagacccaagggcactttcagctccagctcccgccgggcaagatgtgcagtgctgactacgcggatttgctgcagactttccaggttttcatattggatgagctgacagcccgcggcttctgccagatccaggtgaagacttttggcaccctggtttccattcctgtctgcaacaactcctctgtgcaggtgggttgtctgaccagggagcgtttaggagtgaatgttacatggaaatcacggcttgaggacatcccagtggcttctcttcctgacttacatgacattgagagagccttggtgggcaaggatctccttgggcgcttcacagatctgatccagagtggctcattccagcttcatctggactccaagacgttcccagcggaaaccatccgcttcctccaaggggaccactttggcacctctcccaggacatggtttgggtgctcggaaggattctaccaagtcttgacaagtgaggccagtcaggacggactgggatgcgttaagtgtcctgaaggaagctattcccaagatgaggaatgcattccttgtcctgttggattctaccaagaacaggcagggagcttggcctgtgtcccatgtcctgtgggcagaacgaccatttctgctggagctttcagccagactcactgtgtcactgactgtcagaggaacgaagcaggcctgcaatgtgaccagaatggccagtatcgagccagccagaaggacaggggcagtgggaaggccttctgtgtggacggcgaggggcggaggctgccatggtgggaaacagaggcccctcttgaggactcacagtgtttgatgatgcagaagtttgagaaggttccagaatcaaaggtgatcttcgacgccaatgctcctgtggctgtcagatccaaagttcctgattctgagttccccgtgatgcagtgcttgacagtgacgcanaagtttgagaaggttccagaatcaaangtgatcttcgacgccaatgctnctgtggctgtcagatccaaag

SEQ ID NO: 447663 - DNA, 2851 bp, Homo sapiens
catctcagtcgacttagagacccccctggttgttcatcagagggattgaagtgtatggaccgccagctgggaagccaaagcgatgtccaaggagctgtgaaataagaaatcgtcgtcttctccacggggtgggagataagtcaccaccccagtgttctgcggagggagagtttatgcctgtccagtgcaaatttgtcaacaccacagacatgatgatttttgatctggtccacagctacaacaggtttccagatgcatttgtgaccttcagttccttccagaggaggttccctgaggtatctgggtattgccactgtgctgacagccaagggcgggaactggctgagacaggtttggagttgttactggatgaaatttatgacaccatttttgctggcctggaccttccttccaccttcactgaaaccaccctgtaccggatactgcagagacggttcctcgcagttcaatcagtcatctctggcagattccgatgccccacaaaatgtgaagtggagcggtttacagcaaccagctttggtcacccctatgttccaagctgccgccgaaatggcgactatcaggcggtgcagtgccagacggaagggccctgctggtgtgtggacgcccaggggaaggaaatgcatggaacccggcagcaaggggagccgccatcttgtgctgaaggccaatcttgtgcctccgaaaggcagcaggccttgtccagactctactttgggacctcaggctacttcagccagcacgacctgttctcttccccagagaaaagatgggcctctccaagagtagccagatttgccacatcctgcccacccacgatcaaggagctctttgtggactctgggcttctccgcccaatggtggagggacagagccaacagttttctgtctcagaaaatcttctcaaagaagccatccgagcaatttttccctcccgagggctggctcgtcttgcccttcagtttaccaccaacccaaagagactccagcaaaacctttttggagggaaatttttggtgaatgttggccagtttaacttgtctggagcccttggcacaagaggcacatttaacttcagtcaatttttccagcaacttggtcttgcaagcttcttgaatggagggagacaagaagatttggccaagccactctctgtgggattagattcaaattcttccacaggaacccctgaagctgctaagaaggatggtactatgaataagccaactgtgggcagctttggctttgaaattaacctacaagagaaccaaaatgccctcaaattccttgcttctctcctggagcttccagaattccttctcttcttgcaacatgctatctctgtgccagaagatgtggcaagagatttaggtgatgtgatggaaacggtactcagctcccagacctgtgagcagacacctgaaaggctatttgtcccatcatgcacgacagaaggaagctatgaggatgtccaatgcttttccggagagtgctggtgtgtgaattcctggggcaaagagcttccaggctcaagagtcagaggtggacagccaaggtgccccacagactgtgaaaagcaaagggctcgcatgcaaagcctcatgggcagccagcctgctggctccaccttgtttgtccctgcttgtactagtgagggacatttcctgcctgtccagtgcttcaactcagagtgctactgtgttgatgctgagggtcaggccattcctggaactcgaagtgcaatagggaagcccaagaaatgccccacgccctgtcaattacagtctgagcaagctttcctcaggacggtgcaggccctgctctctaactccagcatgctacccaccctttccgacacctacatcccacagtgcagcaccgatgggcagtggagacaagtgcaatgcaatgggcctcctgagcaggtcttcgagttgtaccaacgatgggaggctcagaacaagggccaggatctgacgcctgccaagctgctagtgaagatcatgagctacagagaagcagcttccggaaacttcagtctctttattcaaagtctgtatgaggctggccagcaagatgtcttcccggtgctgtcacaatacccttctctgcaagatgtcccactagcagcactggaagggaaacggccccagcccagggagaatatcctcctggagccctacctcttctggcagatcttaaatggccaactcagccaatacccggggtcctactcagacttcagcactcctttggcacattttgatcttcggaactgctggtgtgtggatgaggctggccaagaactggaaggaatgcggtctgagccaagcaagctcccaacatgtcctggctcctgtgaggaagcaaagctccgtgtactgcagttcattagggaaacggaagagattgtttcagcttccaacagttctcggttccctctgggggagagtttcctggtggccaagggaatccggctgaggaatgaggacctcggccttcctccgctcttcccgccccgggaggctttcgcggagcagtttctgcgtgggagtgattacgccattcgcctggcggctcagtctaccttaagcttctatcagagacgccgcttttccccggacgactcggctggagcatccgcccttctgcggtcgggcccctacatgccacagtgtgatgcgtttggaagttgggagcctgtgcagtgccacgctgggactgggcactgctggtgtgtagatgagaaaggagggttcatccctggctcactgactgcccgctctctgcagattccacagtgtaagtgaagactgcagagttctcctcc

SEQ ID NO: 447664 - DNA, 2294 bp, Homo sapiens
catctcagtcgacttagagacccccctggttgttcatcagagggattgaagtgtatggaccgccagctgggaagccaaagcgatgtccaaggagctgtgaaataagaaatcgtcgtcttctccacggggtgggagataagtcaccaccccagtgttctgcggagggagagtttatgcctgtccagtgcaaatttgtcaacaccacagacatgatgatttttgatctggtccacagctacaacaggtttccagatgcatttgtgaccttcagttccttccagaggaggttccctgaggtatctgggtattgccactgtgctgacagccaagggcgggaactggctgagacaggtttggagttgttactggatgaaatttatgacaccatttttgctggcctggaccttccttccaccttcactgaaaccaccctgtaccggatactgcagagacggttcctcgcagttcaatcagtcatctctggcagattccgatgccccacaaaatgtgaagtggagcggtttacagcaaccagctttggtcacccctatgttccaagctgccgccgaaatggcgactatcaggcggtgcagtgccagacggaagggccctgctggtgtgtggacgcccaggggaaggaaatgcatggaacccggcagcaaggggagccgccatcttgtgctgaaggccaatcttgtgcctccgaaaggcagcaggccttgtccagactctactttgggacctcaggctacttcagccagcacgacctgttctcttccccagagaaaagatgggcctctccaagagtagccagatttgccacatcctgcccacccacgatcaaggagctctttgtggactctgggcttctccgcccaatggtggagggacagagccaacagttttctgtctcagaaaatcttctcaaagaagccatccgagcaatttttccctcccgagggctggctcgtcttgcccttcagtttaccaccaacccaaagagactccagcaaaacctttttggagggaaatttttggtgaatgttggccagtttaacttgtctggagcccttggcacaagaggcacatttaacttcagtcaatttttccagcaacttggtcttgcaagcttcttgaatggagggagacaagaagatttggccaagccactctctgtgggattagattcaaattcttccacaggaacccctgaagctgctaagaaggatggtactatgaataagccaactgtgggcagctttggctttgaaattaacctacaagagaaccaaaatgccctcaaattccttgcttctctcctggagcttccagaattccttctcttcttgcaacatgctatctctgtgccagaagatgtggcaagagatttaggtgatgtgatggaaacggtactcagctcccagacctgtgagcagacacctgaaaggctatttgtcccatcatgcacgacagaaggaagctatgaggatgtccaatgcttttccggagagtgctggtgtgtgaattcctggggcaaagagcttccaggctcaagagtcagaggtggacagccaaggtgccccacagactgtgaaaagcaaagggctcgcatgcaaagcctcatgggcagccagcctgctggctccaccttgtttgtccctgcttgtactagtgagggacatttcctgcctgtccagtgcttcaactcagagtgctactgtgttgatgctgagggtcaggccattcctggaactcgaagtgcaatagggaagcccaagaaatgccccacgccctgtcaattacagtctgagcaagctttcctcaggacggtgcaggccctgctctctaactccagcatgctacccaccctttccgacacctacatcccacagtgcagcaccgatgggcagtggagacaagtgcaatgcaatgggcctcctgagcaggtcttcgagttgtaccaacgatgggaggctcagaacaagggccaggatctgacgcctgccaagctgctagtgaagatcatgagctacagagaagcagcttccggaaacttcagtctctttattcaaagtctgtatgaggctggccagcaagatgtcttcccggtgctgtcacaatacccttctctgcaagatgtcccactagcagcactggaagggaaacggccccagcccagggagaatatcctcctggagccctacctcttctggcagatcttaaatggccaactcagccaatgttctacagttttattctctgactgacccaccaggacttcacccaatgcccca

SEQ ID NO: 447665 - DNA, 399 bp, Homo sapiens
agcggccgcctactactactaaattcgcggccgcgtcgacggcctgactttgtaccccgtgctggtggagagaactacaaggagttcagtgagctgctccccaatcgacagggcctgaagaaagccgactgctccttctggtccaagtacatctcgtctctgaagacatctgcagatggagccaagggcgggcagtcagcagagagtgaagaggaggagttgacggctggatctgggctaagagaagatctcctaagcctccaggaaccaggctctaagacctacagcaagtgaccagcccttgagctccccaaaaacctcacccgaggctgcccactatggtcatctttttctctaaaatagccacttaccttcaataaagtatctacatgcggtgaa

SEQ ID NO: 447666 - DNA, 164 bp, Homo sapiens
ccctacacccttctgagtcagatttactaaatctgctttatttttagtgatgcagaagtttgagaaggttccagaatcaaaggtgatcttcgacgccaatgctcctgtggctgtcagatccaaagttcctgattctgagttccccgtgatgcagtgcttgacag

SEQ ID NO: 447667 - DNA, 576 bp, Homo sapiens
accggaagcgtgcggttgccatgtaatatcctggccgcgcgggcgcgcgagcggctgaggcggcgccggggcgggcgcggagctggcaagcgggtggcggaggcggcgccgacggggactgctgaggcgcgcagagggtcggcggcgcccgggagcctgtcgctggcgcggtccgggcgggaggctcggcggcgggcggcagcatgtcggtggcggggctgaagaagcagttctacaaggcgagccagctggtcagtgagaaggtcggaggggccgaggggaccaagctggatgatgacttcaaagagatggagaagaaggtggatgtcaccagcaaggcggtgacagaagtgctggccaggaccatcgagtacctgcagcccaacccagccccagcctcgcgggctaagctgaccatgctcaacacggtggtccaaggaaagtccgacaggagcgtggacgcgatgcgggtgacagagaccccgggctacccgcagtcggaggggcttctgggacgacgtgcactgactcacgacgcgagcggggagggaagaacgcggaacgggaccatcggtg

SEQ ID NO: 447668 - DNA, 219 bp, Homo sapiens
gacaaataaaaggacaataagaaaaagaacattcccctccacctagaggtccagaaaacccaccagaaacaccacagggaatgataatgcactgacatgccctcgtcagaagtacatgaggggcgcagagatgagcacacagctttgggcacggtccagggcaaactgaaatgtacgcctgaattttgtaaacagaagtattaaatgtctctttctaca

SEQ ID NO: 447669 - DNA, 170 bp, Homo sapiens
gcggccgcctactactactactgctcgaattcaagcttctaacgatgtacgggtcgtcagaagtacatgaggggcgcagagatgagcacacagctttgggcacggtccagggcaaactgaaatgtacgcctgaattttgtaaacagaagtattaaatgtctctttctaca

SEQ ID NO: 447670 - DNA, 2508 bp, Homo sapiens
agtattctatgttcgatgcggtgatataacttagccgaaggggtgccgcgatctgcagcgggtggcggaggcggcgccgacggggactgctgaggcgcgcagagggtcggcggcgcccgggagcctgtcgctggcgcggtccgggcgggaggctcggcggcgggcggcagcatgtcggtggcggggctgaagaagcagttctacaaggcgagccagctggtcagtgagaaggtcggaggggccgaggggaccaagctggatgatgacttcaaagagatggagaagaaggtggatgtcaccagcaaggcggtgacagaagtgctggccaggaccatcgagtacctgcagcccaacccagcctcgcgggctaagctgaccatgctcaacacggtgtccaagatccggggccaggtgaagaaccccggctacccgcagtcggaggggcttctgggcgagtgcatgatccgccacgggaaggagctgggcggcgagtccaactttggtgacgcattgctggatgccggcgagtccatgaagcgcctggcagaggtgaaggactccctggacatcgaggtcaagcagaacttcattgaccccctccagaacctgtgcgagaaagacctgaaggagatccagcaccacctgaagaaactggagggccgccgcctggactttgactacaagaagaagcggcagggcaagatccccgatgaggagctacgccaggcgctggagaagttcgaggagtccaaggaggtggcagaaaccagcatgcacaacctcctggagactgacatcgagcaggtgagtcagctctcggccctggtggatgcacagctggactaccaccggcaggccgtgcagatcctggacgagctggcggagaagctcaagcgcaggatgcgggaagcttcctcacgccctaagcgggagtataagcccaagccccgggagccctttgaccttggagagcctgagcagtccaacgggggcttcccctgcaccacagcccccaagatcgcagcttcatcgtctttccgatcttccgacaagcccatccggacccctagccggagcatgccgcccctggaccagccgagctgcaaggcgctgtacgacttcgagcccgagaacgacggggagctgggcttccatgagggcgacgtcatcacgctgaccaaccagatcgatgagaactggtacgagggcatgctggacggccagtcgggcttcttcccgctcagctacgtggaggtgcttgtgcccctgccgcagtgactcacccgtgtccccgccccgcccctccgtccacactggccggcaccccctgctgggtctcctgcattccacggagcccctgctgccagggcggtgtctgagcctgccggcgccacctgggccccggcccttgaggtactccctgagcaggaccccacacttgggtgggggggcttatctgggtgggtggggatgcctgtttacactagcgctgactcccaacggtgacggctcccttccccactccatggcgccagcctcctcccccgctccccaacttctcgcccagctggccgaggcggggcaacactaaggtgctcttagaaacactaatgttcctctggggcagcccccacctccgtcctgacccgacgggggcccggcccactgcctaccctcgagtcccgcagccttaacaggatgggatcgagggtccccatggggtggctcagagataggaccctggttttaaatccctcccagcctggtgctggtgatgggccctggccctactccagggccaatgcacccccgcctcacacacgcactccttctcctcaaggccagggcagagggcctcaccgcctcccgggcctgctgtcagcttgcagcccggggacagaggccagctgggatctgcctgaggacagagaacatggtctcctgcagggccctgcctcccaagccccgccctcagaaagccaagtaccttttcagctttttaactgcccccatcccaacccagggaggcctgtgtcactctggcacaagctgccaccaccagccacccacacccaccccagcacacctcacacgggaccacagccgcgctgccgagggccaagcacaaaggttccagtgagcgcatgtcccagcccctggtggccaggctccccttgctgagccgctgccacttcaccctgtgggaagtggccccagccatctcctctagaccaaggcaggcagccccgacatctgcttcctctatcgcccaatgcaaaatcgatgaaatggggagttctctgggccaggccacattcacattcccctccccctgtggtccagtgaagcctccggaccccaggctctgctctgccctgccctgcacccccctcgtcagaagtacatgaggggcgcagagatgagcacacagctttgggcacggtccagggcaaactgaaatgtacgcctgaattttgtaaacagaagtattaaatgtctctttctaca

SEQ ID NO: 447671 - DNA, 2438 bp, Homo sapiens
accggaagcgtgcggttgccatgtaatatcctggccgcgcgggcgcgcgagcggctgaggcggcgccggggcgggcgcggagctggcaagcgggcggcagcatgtcggtggcggggctgaagaagcagttctacaaggcgagccagctggtcagtgagaaggtcggaggggccgaggggaccaagctggatgatgacttcaaagagatggagaagaaggtggatgtcaccagcaaggcggtgacagaagtgctggccaggaccatcgagtacctgcagcccaacccagcctcgcgggctaagctgaccatgctcaacacggtgtccaagatccggggccaggtgaagaaccccggctacccgcagtcggaggggcttctgggcgagtgcatgatccgccacgggaaggagctgggcggcgagtccaactttggtgacgcattgctggatgccggcgagtccatgaagcgcctggcagaggtgaaggactccctggacatcgaggtcaagcagaacttcattgaccccctccagaacctgtgcgagaaagacctgaaggagatccagcaccacctgaagaaactggagggccgccgcctggactttgactacaagaagaagcggcagggcaagatccccgatgaggagctacgccaggcgctggagaagttcgaggagtccaaggaggtggcagaaaccagcatgcacaacctcctggagactgacatcgagcaggtgagtcagctctcggccctggtggatgcacagctggactaccaccggcaggccgtgcagatcctggacgagctggcggagaagctcaagcgcaggatgcgggaagcttcctcacgccctaagcgggagtataagcccaagccccgggagccctttgaccttggagagcctgagcagtccaacgggggcttcccctgcaccacagcccccaagatcgcagcttcatcgtctttccgatcttccgacaagcccatccggacccctagccggagcatgccgcccctggaccagccgagctgcaaggcgctgtacgacttcgagcccgagaacgacggggagctgggcttccatgagggcgacgtcatcacgctgaccaaccagatcgatgagaactggtacgagggcatgctggacggccagtcgggcttcttcccgctcagctacgtggaggtgcttgtgcccctgccgcagtgactcacccgtgtccccgccccgcccctccgtccacactggccggcaccccctgctgggtctcctgcattccacggagcccctgctgccagggcggtgtctgagcctgccggcgccacctgggccccggcccttgaggtactccctgagcaggaccccacacttgggtgggggggcttatctgggtgggtggggatgcctgtttacactagcgctgactcccaacggtgacggctcccttccccactccatggcgccagcctcctcccccgctccccaacttctcgcccagctggccgaggcggggcaacactaaggtgctcttagaaacactaatgttcctctggggcagcccccacctccgtcctgacccgacgggggcccggcccactgcctaccctcgagtcccgcagccttaacaggatgggatcgagggtccccatggggtggctcagagataggaccctggttttaaatccctcccagcctggtgctggtgatgggccctggccctactccagggccaatgcacccccgcctcacacacgcactccttctcctcaaggccagggcagagggcctcaccgcctcccgggcctgctgtcagcttgcagcccggggacagaggccagctgggatctgcctgaggacagagaacatggtctcctgcagggccctgcctcccaagccccgccctcagaaagccaagtaccttttcagctttttaactgcccccatcccaacccagggaggcctgtgtcactctggcacaagctgccaccaccagccacccacacccaccccagcacacctcacacgggaccacagccgcgctgccgagggccaagcacaaaggttccagtgagcgcatgtcccagcccctggtggccaggctccccttgctgagccgctgccacttcaccctgtgggaagtggccccagccatctcctctagaccaaggcaggcagccccgacatctgcttcctctatcgcccaatgcaaaatcgatgaaatggggagttctctgggccaggccacattcacattcccctccccctgtggtccagtgaagcctccggaccccaggctctgctctgccctgccctgcacccccctcgtcagaagtacatgaggggcgcagagatgagcacacagctttgggcacggtccagggcaaactgaaatgtacgcctgaattttgtaaacagaagtattaaatgtctctttctaca

SEQ ID NO: 447672 - DNA, 2593 bp, Homo sapiens
accggaagcgtgcggttgccatgtaatatcctggccgcgcgggcgcgcgagcggctgaggcggcgccggggcgggcgcggagctggcaagcgggtggcggaggcggcgccgacggggactgctgaggcgcgcagagggtcggcggcgcccgggagcctgtcgctggcgcggtccgggcgggaggctcggcggcgggcggcagcatgtcggtggcggggctgaagaagcagttctacaaggcgagccagctggtcagtgagaaggtcggaggggccgaggggaccaagctggatgatgacttcaaagagatggagaagaaggtggatgtcaccagcaaggcggtgacagaagtgctggccaggaccatcgagtacctgcagcccaacccagcctcgcgggctaagctgaccatgctcaacacggtgtccaagatccggggccaggtgaagaaccccggctacccgcagtcggaggggcttctgggcgagtgcatgatccgccacgggaaggagctgggcggcgagtccaactttggtgacgcattgctggatgccggcgagtccatgaagcgcctggcagaggtgaaggactccctggacatcgaggtcaagcagaacttcattgaccccctccagaacctgtgcgagaaagacctgaaggagatccagcaccacctgaagaaactggagggccgccgcctggactttgactacaagaagaagcggcagggcaagatccccgatgaggagctacgccaggcgctggagaagttcgaggagtccaaggaggtggcagaaaccagcatgcacaacctcctggagactgacatcgagcaggtgagtcagctctcggccctggtggatgcacagctggactaccaccggcaggccgtgcagatcctggacgagctggcggagaagctcaagcgcaggatgcgggaagcttcctcacgccctaagcgggagtataagcccaagccccgggagccctttgaccttggagagcctgagcagtccaacgggggcttcccctgcaccacagcccccaagatcgcagcttcatcgtctttccgatcttccgacaagcccatccggacccctagccggagcatgccgcccctggaccagccgagctgcaaggcgctgtacgacttcgagcccgagaacgacggggagctgggcttccatgagggcgacgtcatcacgctgaccaaccagatcgatgagaactggtacgagggcatgctggacggccagtcgggcttcttcccgctcagctacgtggaggtgcttgtgcccctgccgcagtgactcacccgtgtccccgccccgcccctccgtccacactggccggcaccccctgctgggtctcctgcattccacggagcccctgctgccagggcggtgtctgagcctgccggcgccacctgggccccggcccttgaggtactccctgagcaggaccccacacttgggtgggggggcttatctgggtgggtggggatgcctgtttacactagcgctgactcccaacggtgacggctcccttccccactccatggcgccagcctcctcccccgctccccaacttctcgcccagctggccgaggcggggcaacactaaggtgctcttagaaacactaatgttcctctggggcagcccccacctccgtcctgacccgacgggggcccggcccactgcctaccctcgagtcccgcagccttaacaggatgggatcgagggtccccatggggtggctcagagataggaccctggttttaaatccctcccagcctggtgctggtgatgggccctggccctactccagggccaatgcacccccgcctcacacacgcactccttctcctcaaggccagggcagagggcctcaccgcctcccgggcctgctgtcagcttgcagcccggggacagaggccagctgggatctgcctgaggacagagaacatggtctcctgcagggccctgcctcccaagccccgccctcagaaagccaagtaccttttcagctttttaactgcccccatcccaacccagggaggcctgtgtcactctggcacaagctgccaccaccagccacccacacccaccccagcacacctcacacgggaccacagccgcgctgccgagggccaagcacaaaggttccagtgagcgcatgtcccagcccctggtggccaggctccccttgctgagccgctgccacttcaccctgtgggaagtggccccagccatctcctctagaccaaggcaggcagccccgacatctgcttcctctatcgcccaatgcaaaatcgatgaaatggggagttctctgggccaggccacattcacattcccctccccctgtggtccagtgaagcctccggaccccaggctctgctctgccctgccctgcacccccctcgtcagaagtacatgaggggcgcagagatgagcacacagctttgggcacggtccagggcaaactgaaatgtacgcctgaattttgtaaacagaagtattaaatgtctctttctacaaaaaaaagaaaaacaaaaaaaaaaaaaaaaaaaaaaaaaaaaaaaaaaaaaaa

SEQ ID NO: 447673 - DNA, 2631 bp, Homo sapiens
accggaagcgtgcggttgccatgtaatatcctggccgcgcgggcgcgcgagcggctgaggcggcgccggggcgggcgcggagctggcaagcgggtggcggaggcggcgccgacggggactgctgaggcgcgcagagggtcggcggcgcccgggagcctgtcgctggcgcggtccgggcgggaggctcggcggcgggcggcagcatgtcggtggcggggctgaagaagcagttctacaaggcgagccagctggtcagtgagaaggtcggaggggccgaggggaccaagctggatgatgacttcaaagagatggagaagaaggtggatgtcaccagcaaggcggtgacagaagtgctggccaggaccatcgagtacctgcagcccaacccagcctcgcgggctaagctgaccatgctcaacacggtgtccaagatccggggccaggtgaagaaccccggctacccgcagtcggaggggcttctgggcgagtgcatgatccgccacgggaaggagctgggcggcgagtccaactttggtgacgcattgctggatgccggcgagtccatgaagcgcctggcagaggtgaaggactccctggacatcgaggtcaagcagaacttcattgaccccctccagaacctgtgcgagaaagacctgaaggagatccagcaccacctgaagaaactggagggccgccgcctggactttgactacaagaagaagcggcagggcaagatccccgatgaggagctacgccaggcgctggagaagttcgaggagtccaaggaggtggcagaaaccagcatgcacaacctcctggagactgacatcgagcaggtgagtcagctctcggccctggtggatgcacagctggactaccaccggcaggccgtgcagatcctggacgagctggcggagaagctcaagcgcaggatgcgggaagcttcctcacgccctaagcgggagtataagcccaagccccgggagccctttgaccttggagagcctgagcagtccaacgggggcttcccctgcaccacagcccccaagatcgcagcttcatcgtctttccgatcttccgacaagcccatccggacccctagccggagcatgccgcccctggaccagccgagctgcaaggcgctgtacgacttcgagcccgagaacgacggggagctgggcttccatgagggcgacgtcatcacgctgaccaaccagatcgatgagaactggtacgagggcatgctggacggccagtcgggcttcttcccgctcagctacgtggaggtgcttgtgcccctgccgcagtgactcacccgtgtccccgccccgcccctccgtccacactggccggcaccccctgctgggtctcctgcattccacggagcccctgctgccagggcggtgtctgagcctgccggcgccacctgggccccggcccttgaggtactccctgagcaggaccccacacttgggtgggggggcttatctgggtgggtggggatgcctgtttacactagcgctgactcccaacggtgacggctcccttccccactccatggcgccagcctcctcccccgctccccaacttctcgcccagctggccgaggcggggcaacactaaggtgctcttagaaacactaatgttcctctggggcagcccccacctccgtcctgacccgacgggggcccggcccactgcctaccctcgagtcccgcagccttaacaggatgggatcgagggtccccatggggtggctcagagataggaccctggttttaaatccctcccagcctggtgctggtgatgggccctggccctactccagggccaatgcacccccgcctcacacacgcactccttctcctcaaggccagggcagagggcctcaccgcctcccgggcctgctgtcagcttgcagcccggggacagaggccagctgggatctgcctgaggacagagaacatggtctcctgcagggccctgcctcccaagccccgccctcagaaagccaagtaccttttcagctttttaactgcccccatcccaacccagggaggcctgtgtcactctggcacaagctgccaccaccagccacccacacccaccccagcacacctcacacgggaccacagccgcgctgccgagggccaagcacaaaggttccagtgagcgcatgtcccagcccctggtggccaggctccccttgctgagccgctgccacttcaccctgtgggaagtggccccagccatctcctctagaccaaggcaggcagccccgacatctgcttcctctatcgcccaatgcaaaatcgatgaaatggggagttctctgggccaggccacattcacattcccctccccctgtggtccagtgaagcctccggaccccaggctctgctctgccctgccctgcacccccctcgtcagaagtacatgaggggcgcagagatgagcacacagctttgggcacggtccagggcaaactgaaatgtacgcctgaattttgtaaacagaagtattaaatgtctctttctacaaaaaaaaaaaaaaacaaaaacaaaaaaaaaaaaaaaaaaaaaaaagaaaaacaaaaaaaaaaaaaaaaaaaaaaaaaaaaaaaaaaaaaaa

SEQ ID NO: 447674 - DNA, 2006 bp, Homo sapiens
tagcgtaggtcgatggccgtgtggttagctgtggcgcgatgaatcagctcatggactccctggacatcgaggtcaagcagaacttcattgaccccctccagaacctgtgcgagaaagacctgaaggagatccagcaccacctgaagaaactggagggccgccgcctggactttgactacaagaagaagcggcagggcaagatccccgatgaggagctacgccaggcgctggagaagttcgaggagtccaaggaggtggcagaaaccagcatgcacaacctcctggagactgacatcgagcaggtgagtcagctctcggccctggtggatgcacagctggactaccaccggcaggccgtgcagatcctggacgagctggcggagaagctcaagcgcaggatgcgggaagcttcctcacgccctaagcgggagtataagcccaagccccgggagccctttgaccttggagagcctgagcagtccaacgggggcttcccctgcaccacagcccccaagatcgcagcttcatcgtctttccgatcttccgacaagcccatccggacccctagccggagcatgccgcccctggaccagccgagctgcaaggcgctgtacgacttcgagcccgagaacgacggggagctgggcttccatgagggcgacgtcatcacgctgaccaaccagatcgatgagaactggtacgagggcatgctggacggccagtcgggcttcttcccgctcagctacgtggaggtgcttgtgcccctgccgcagtgactcacccgtgtccccgccccgcccctccgtccacactggccggcaccccctgctgggtctcctgcattccacggagcccctgctgccagggcggtgtctgagcctgccggcgccacctgggccccggcccttgaggtactccctgagcaggaccccacacttgggtgggggggcttatctgggtgggtggggatgcctgtttacactagcgctgactcccaacggtgacggctcccttccccactccatggcgccagcctcctcccccgctccccaacttctcgcccagctggccgaggcggggcaacactaaggtgctcttagaaacactaatgttcctctggggcagcccccacctccgtcctgacccgacgggggcccggcccactgcctaccctcgagtcccgcagccttaacaggatgggatcgagggtccccatggggtggctcagagataggaccctggttttaaatccctcccagcctggtgctggtgatgggccctggccctactccagggccaatgcacccccgcctcacacacgcactccttctcctcaaggccagggcagagggcctcaccgcctcccgggcctgctgtcagcttgcagcccggggacagaggccagctgggatctgcctgaggacagagaacatggtctcctgcagggccctgcctcccaagccccgccctcagaaagccaagtaccttttcagctttttaactgcccccatcccaacccagggaggcctgtgtcactctggcacaagctgccaccaccagccacccacacccaccccagcacacctcacacgggaccacagccgcgctgccgagggccaagcacaaaggttccagtgagcgcatgtcccagcccctggtggccaggctccccttgctgagccgctgccacttcaccctgtgggaagtggccccagccatctcctctagaccaaggcaggcagccccgacatctgcttcctctatcgcccaatgcaaaatcgatgaaatggggagttctctgggccaggccacattcacattcccctccccctgtggtccagtgaagcctccggaccccaggctctgctctgccctgccctgcacccccctcgtcagaagtacatgaggggcgcagagatgagcacacagctttgggcacggtccagggcaaactgaaatgtacgcctgaattttgtaaacagaagtattaaatgtctctttctaca

SEQ ID NO: 447675 - DNA, 1948 bp, Homo sapiens
  misc_feature (24)..(24): n is a, c, g, or t
tcaggctggtacggccccgcggtntgggatatcgtcgaccaggccgtcggtgcgagaaagactgaaggagatccagcaccacctgaagaaactggagggccgccgcctggactttgactacaagaagaagcggcagggcaagatccccgatgaggagctacgccaggcgctggagaagttcgaggagtccaaggaggtggcagaaaccagcatgcacaacctcctggagactgacatcgagcaggtgagtcagctctcggccctggtggatgcacagctggactaccaccggcaggccgtgcagatcctggacgagctggcggagaagctcaagcgcaggatgcgggaagcttcctcacgccctaagcgggagtataagcccaagccccgggagccctttgaccttggagagcctgagcagtccaacgggggcttcccctgcaccacagcccccaagatcgcagcttcatcgtctttccgatcttccgacaagcccatccggacccctagccggagcatgccgcccctggaccagccgagctgcaaggcgctgtacgacttcgagcccgagaacgacggggagctgggcttccatgagggcgacgtcatcacgctgaccaaccagatcgatgagaactggtacgagggcatgctggacggccagtcgggcttcttcccgctcagctacgtggaggtgcttgtgcccctgccgcagtgactcacccgtgtccccgccccgcccctccgtccacactggccggcaccccctgctgggtctcctgcattccacggagcccctgctgccagggcggtgtctgagcctgccggcgccacctgggccccggcccttgaggtactccctgagcaggaccccacacttgggtgggggggcttatctgggtgggtggggatgcctgtttacactagcgctgactcccaacggtgacggctcccttccccactccatggcgccagcctcctcccccgctccccaacttctcgcccagctggccgaggcggggcaacactaaggtgctcttagaaacactaatgttcctctggggcagcccccacctccgtcctgacccgacgggggcccggcccactgcctaccctcgagtcccgcagccttaacaggatgggatcgagggtccccatggggtggctcagagataggaccctggttttaaatccctcccagcctggtgctggtgatgggccctggccctactccagggccaatgcacccccgcctcacacacgcactccttctcctcaaggccagggcagagggcctcaccgcctcccgggcctgctgtcagcttgcagcccggggacagaggccagctgggatctgcctgaggacagagaacatggtctcctgcagggccctgcctcccaagccccgccctcagaaagccaagtaccttttcagctttttaactgcccccatcccaacccagggaggcctgtgtcactctggcacaagctgccaccaccagccacccacacccaccccagcacacctcacacgggaccacagccgcgctgccgagggccaagcacaaaggttccagtgagcgcatgtcccagcccctggtggccaggctccccttgctgagccgctgccacttcaccctgtgggaagtggccccagccatctcctctagaccaaggcaggcagccccgacatctgcttcctctatcgcccaatgcaaaatcgatgaaatggggagttctctgggccaggccacattcacattcccctccccctgtggtccagtgaagcctccggaccccaggctctgctctgccctgccctgcacccccctcgtcagaagtacatgaggggcgcagagatgagcacacagctttgggcacggtccagggcaaactgaaatgtacgcctgaattttgtaaacagaagtattaaatgtctctttctaca

SEQ ID NO: 447676 - DNA, 2284 bp, Homo sapiens
accggaagcgtgcggttgccatgtaatatcctggccgcgcgggcgcgcgagcggctgaggcggcgccggggcgggcgcggagctggcaagcgggtggcggaggcggcgccgacggggactgctgaggcgcgcagagggtcggcggcgcccgggagcctgtcgctggcgcggtccgggcgggaggctcggcggcgggcggcagcatgtcggtggcggggctgaagaagcagttctacaaggcgagccagctggtcagtgagaaggtcggaggggccgaggggaccaagctggatgatgacttcaaagagatggagaagaaggtggatgtcaccagcaaggcggtgacagaagtgctggccaggaccatcgagtacctgcagcccaacccagcctcgcgggctaagctgaccatgctcaacacggtgtccaagatccggggccaggtgaagaaccccggctacccgcagtcggaggggcttctgggcgagtgcatgatccgccacgggaaggagctgggcggcgagtccaactttggtgacgcattgctggatgccggcgagtccatgaagcgcctggcagaggtgaaggactccctggacatcgaggtcaagcagaacttcattgaccccctccagaacctgtgcgagaaagacctgaaggagatccagcaccacctgaagaaactggagggccgccgcctggactttgactacaagaagaagcggcagggcaagatccccgatgaggagctacgccaggcgctggagaagttcgaggagtccaaggaggtggcagaaaccagcatgcacaacctcctggagactgacatcgagcaggtgagtcagctctcggccctggtggatgcacagctggactaccaccggcaggccgtgcagatcctggacgagctggcggagaagctcaagcgcaggatgcgggaagcttcctcacgccctaagcgggagtataagcccaagccccgggagccctttgaccttggagagcctgagcagtccaacgggggcttcccctgcaccacagcccccaagatcgcagcttcatcgtctttccgatcttccgacaagcccatccggacccctagccggagcatgccgcccctggaccagccgagctgcaaggcgctgtacgacttcgagcccgagaacgacggggagctgggcttccatgagggcgacgtcatcacgctgaccaaccagatcgatgagaactggtacgagggcatgctggacggccagtcgggcttcttcccgctcagctacgtggaggtgcttgtgcccctgccgcagtgactcacccgtgtccccgccccgcccctccgtccacactggccggcaccccctgctgggtctcctgcattccacggagcccctgctgccagggcggtgtctgagcctgccggcgccacctgggccccggcccttgaggtactccctgagcaggaccccacacttgggtgggggggcttatctgggtgggtggggatgcctgtttacactagcgctgactcccaacggtgacggctcccttccccactccatggcgccagcctcctcccccgctccccaacttctcgcccagctggccgaggcggggcaacactaaggtgctcttagaaacactaatgttcctctggggcagcccccacctccgtcctgacccgacgggggcccggcccactgcctaccctcgagtcccgcagccttaacaggatgggatcgagggtccccatggggtggctcagagataggaccctggttttaaatccctcccagcctggtgctggtgatgggccctggccctactccagggccaatgcacccccgcctcacacacgcactccttctcctcaaggccagggcagagggcctcaccgcctcccgggcctgctgtcagcttgcagcccggggacagaggccagctgggatctgcctgaggacagagaacatggtctcctgcagggccctgcctcccaagccccgccctcagaaagccaagtaccttttcagctttttaactgcccccatcccaacccagggaggcctgtgtcactctggcacaagctgccaccaccagccacccacacccaccccagcacacctcacacgggaccacagccgcgctgccgagggccaagcacaaaggttccagtgagcgcatgtcccagcccctggtggccaggctccccttgctgagccgctgccacttcaccctgtgggaagtggccccagccatggagtaaatgcagggatcctctagaacacca

SEQ ID NO: 447677 - DNA, 2073 bp, Homo sapiens
accggaagcgtgcggttgccatgtaatatcctggccgcgcgggcgcgcgagcggctgaggcggcgccggggcgggcgcggagctggcaagcgggtggcggaggcggcgccgacggggactgctgaggcgcgcagagggtcggcggcgcccgggagcctgtcgctggcgcggtccgggcgggaggctcggcggcgggcggcagcatgtcggtggcggggctgaagaagcagttctacaaggcgagccagctggtcagtgagaaggtcggaggggccgaggggaccaagctggatgatgacttcaaagagatggagaagaaggtggatgtcaccagcaaggcggtgacagaagtgctggccaggaccatcgagtacctgcagcccaacccagcctcgcgggctaagctgaccatgctcaacacggtgtccaagatccggggccaggtgaagaaccccggctacccgcagtcggaggggcttctgggcgagtgcatgatccgccacgggaaggagctgggcggcgagtccaactttggtgacgcattgctggatgccggcgagtccatgaagcgcctggcagaggtgaaggactccctggacatcgaggtcaagcagaacttcattgaccccctccagaacctgtgcgagaaagacctgaaggagatccagcaccacctgaagaaactggagggccgccgcctggactttgactacaagaagaagcggcagggcaagatccccgatgaggagctacgccaggcgctggagaagttcgaggagtccaaggaggtggcagaaaccagcatgcacaacctcctggagactgacatcgagcaggtgagtcagctctcggccctggtggatgcacagctggactaccaccggcaggccgtgcagatcctggacgagctggcggagaagctcaagcgcaggatgcgggaagcttcctcacgccctaagcgggagtataagcccaagccccgggagccctttgaccttggagagcctgagcagtccaacgggggcttcccctgcaccacagcccccaagatcgcagcttcatcgtctttccgatcttccgacaagcccatccggacccctagccggagcatgccgcccctggaccagccgagctgcaaggcgctgtacgacttcgagcccgagaacgacggggagctgggcttccatgagggcgacgtcatcacgctgaccaaccagatcgatgagaactggtacgagggcatgctggacggccagtcgggcttcttcccgctcagctacgtggaggtgcttgtgcccctgccgcagtgactcacccgtgtccccgccccgcccctccgtccacactggccggcaccccctgctgggtctcctgcattccacggagcccctgctgccagggcggtgtctgagcctgccggcgccacctgggccccggcccttgaggtactccctgagcaggaccccacacttgggtgggggggcttatctgggtgggtggggatgcctgtttacactagcgctgactcccaacggtgacggctcccttccccactccatggcgccagcctcctcccccgctccccaacttctcgcccagctggccgaggcggggcaacactaaggtgctcttagaaacactaatgttcctctggggcagcccccacctccgtcctgacccgacgggggcccggcccactgcctaccctcgagtcccgcagccttaacaggatgggatcgagggtccccatggggtggctcagagataggaccctggttttaaatccctcccagcctggtgctggtgatgggccctggccctactccagggccaatgcacccccgcctcacacacgcactccttctcctcaaggccagggcagagggcctcaccgcctcccgggcctgctgtcagcttgcagcccggggacagaggccagctgggatctgcctgaggacagagaacatggtctcctgcagggccctgcctcccaagccccgccctcagaaagccaagtaccttttcagctttttaactgcccccatccccattaaattaatcccaacatgcaaa

SEQ ID NO: 447678 - DNA, 1415 bp, Homo sapiens
  misc_feature (25)..(25): n is a, c, g, or t
  misc_feature (38)..(38): n is a, c, g, or t
ccgaacctcagacgtaggctaggtncgaggctgggtgntgcgacggggagctgggcttccatgagggcgacgtcatcacgctgaccaaccagatcgatgagaactggtacgagggcatgctggacggccagtcgggcttcttcccgctcagctacgtggaggtgcttgtgcccctgccgcagtgactcacccgtgtccccgccccgcccctccgtccacactggccggcaccccctgctgggtctcctgcattccacggagcccctgctgccagggcggtgtctgagcctgccggcgccacctgggccccggcccttgaggtactccctgagcaggaccccacacttgggtgggggggcttatctgggtgggtggggatgcctgtttacactagcgctgactcccaacggtgacggctcccttccccactccatggcgccagcctcctcccccgctccccaacttctcgcccagctggccgaggcggggcaacactaaggtgctcttagaaacactaatgttcctctggggcagcccccacctccgtcctgacccgacgggggcccggcccactgcctaccctcgagtcccgcagccttaacaggatgggatcgagggtccccatggggtggctcagagataggaccctggttttaaatccctcccagcctggtgctggtgatgggccctggccctactccagggccaatgcacccccgcctcacacacgcactccttctcctcaaggccagggcagagggcctcaccgcctcccgggcctgctgtcagcttgcagcccggggacagaggccagctgggatctgcctgaggacagagaacatggtctcctgcagggccctgcctcccaagccccgccctcagaaagccaagtaccttttcagctttttaactgcccccatcccaacccagggaggcctgtgtcactctggcacaagctgccaccaccagccacccacacccaccccagcacacctcacacgggaccacagccgcgctgccgagggccaagcacaaaggttccagtgagcgcatgtcccagcccctggtggccaggctccccttgctgagccgctgccacttcaccctgtgggaagtggccccagccatctcctctagaccaaggcaggcagccccgacatctgcttcctctatcgcccaatgcaaaatcgatgaaatggggagttctctgggccaggccacattcacattcccctccccctgtggtccagtgaagcctccggaccccaggctctgctctgccctgccctgcacccccctcgtcagaagtacatgaggggcgcagagatgagcacacagctttgggcacggtccagggcaaactgaaatgtacgcctgaattttgtaaacagaagtattaaatgtctctttctaca

SEQ ID NO: 447679 - DNA, 1726 bp, Homo sapiens
accggaagcgtgcggttgccatgtaatatcctggccgcgcgggcgcgcgagcggctgaggcggcgccggggcgggcgcggagctggcaagcgggtggcggaggcggcgccgacggggactgctgaggcgcgcagagggtcggcggcgcccgggagcctgtcgctggcgcggtccgggcgggaggctcggcggcgggcggcagcatgtcggtggcggggctgaagaagcagttctacaaggcgagccagctggtcagtgagaaggtcggaggggccgaggggaccaagctggatgatgacttcaaagagatggagaagaaggtggatgtcaccagcaaggcggtgacagaagtgctggccaggaccatcgagtacctgcagcccaacccagcctcgcgggctaagctgaccatgctcaacacggtgtccaagatccggggccaggtgaagaaccccggctacccgcagtcggaggggcttctgggcgagtgcatgatccgccacgggaaggagctgggcggcgagtccaactttggtgacgcattgctggatgccggcgagtccatgaagcgcctggcagaggtgaaggactccctggacatcgaggtcaagcagaacttcattgaccccctccagaacctgtgcgagaaagacctgaaggagatccagcaccacctgaagaaactggagggccgccgcctggactttgactacaagaagaagcggcagggcaagatccccgatgaggagctacgccaggcgctggagaagttcgaggagtccaaggaggtggcagaaaccagcatgcacaacctcctggagactgacatcgagcaggtgagtcagctctcggccctggtggatgcacagctggactaccaccggcaggccgtgcagatcctggacgagctggcggagaagctcaagcgcaggatgcgggaagcttcctcacgccctaagcgggagtataagcccaagccccgggagccctttgaccttggagagcctgagcagtccaacgggggcttcccctgcaccacagcccccaagatcgcagcttcatcgtctttccgatcttccgacaagcccatccggacccctagccggagcatgccgcccctggaccagccgagctgcaaggcgctgtacgacttcgagcccgagaacgacggggagctgggcttccatgagggcgacgtcatcacgctgaccaaccagatcgatgagaactggtacgagggcatgctggacggccagtcgggcttcttcccgctcagctacgtggaggtgcttgtgcccctgccgcagtgactcacccgtgtccccgccccgcccctccgtccacactggccggcaccccctgctgggtctcctgcattccacggagcccctgctgccagggcggtgtctgagcctgccggcgccactggccccagccatctcctctagaccaaggcaggcagccccgacatctgcttcctctatcgcccaatgcaaaatcgatgaaatggggagttctctgggccaggccacattcacattcccctccccctgtggtccagtgaagcctccggaccccaggctctgctctgccctgccctgcacccccctcgtcagaagtacatgaggggcgcagagatgagcacacagctttgggcacggtccagggcaaactgaaatgtacgcctgaattttgtaaacagaagtattaaatgtctctttctaca

SEQ ID NO: 447680 - DNA, 1407 bp, Homo sapiens
agtattctatgttcgatgcggtgatataacttagccgaaggggtgccgcgatctgcagcgggtggcggaggcggcgccgacggggactgctgaggcgcgcagagggtcggcggcgcccgggagcctgtcgctggcgcggtccgggcgggaggctcggcggcgggcggcagcatgtcggtggcggggctgaagaagcagttctacaaggcgagccagccggcaccccctgctgggtctcctgcattccacggagcccctgctgccagggcggtgtctgagcctgccggcgccacctgggccccggcccttgaggtactccctgagcaggaccccacacttgggtgggggggcttatctgggtgggtggggatgcctgtttacactagcgctgactcccaacggtgacggctcccttccccactccatggcgccagcctcctcccccgctccccaacttctcgcccagctggccgaggcggggcaacactaaggtgctcttagaaacactaatgttcctctggggcagcccccacctccgtcctgacccgacgggggcccggcccactgcctaccctcgagtcccgcagccttaacaggatgggatcgagggtccccatggggtggctcagagataggaccctggttttaaatccctcccagcctggtgctggtgatgggccctggccctactccagggccaatgcacccccgcctcacacacgcactccttctcctcaaggccagggcagagggcctcaccgcctcccgggcctgctgtcagcttgcagcccggggacagaggccagctgggatctgcctgaggacagagaacatggtctcctgcagggccctgcctcccaagccccgccctcagaaagccaagtaccttttcagctttttaactgcccccatcccaacccagggaggcctgtgtcactctggcacaagctgccaccaccagccacccacacccaccccagcacacctcacacgggaccacagccgcgctgccgagggccaagcacaaaggttccagtgagcgcatgtcccagcccctggtggccaggctccccttgctgagccgctgccacttcaccctgtgggaagtggccccagccatctcctctagaccaaggcaggcagccccgacatctgcttcctctatcgcccaatgcaaaatcgatgaaatggggagttctctgggccaggccacattcacattcccctccccctgtggtccagtgaagcctccggaccccaggctctgctctgccctgccctgcacccccctcgtcagaagtacatgaggggcgcagagatgagcacacagctttgggcacggtccagggcaaactgaaatgtacgcctgaattttgtaaacagaagtattaaatgtctctttctaca

SEQ ID NO: 447681 - DNA, 698 bp, Homo sapiens
agtattctatgttcgatgcggtgatataacttagccgaaggggtgccgcgatctgcagcgggtggcggaggcggcgccgacggggactgctgaggcgcgcagagggtcggcggcgcccgggagcctgtcgctggcgcggtccgggcgggaggctcggcggcgggcggcagcatgtcggtggcggggctgaagaagcagttctacaaggcgagccagctggtcagtgagaaggtcggaggggccgaggggaccaagctggatgatgacttcaaagagatggagaagaaggtggatgtcaccagcaaggcggtgacagaagtgccggcaccccctgctgggtctcctgcattccacggagcccctgctgccagggcggtgtctgagcctgccggcgccactggccccagccatctcctctagaccaaggcaggcagccccgacatctgcttcctctatcgcccaatgcaaaatcgatgaaatggggagttctctgggccaggccacattcacattcccctccccctgtggtccagtgaagcctccggaccccaggctctgctctgccctgccctgcacccccctcgtcagaagtacatgaggggcgcagagatgagcacacagctttgggcacggtccagggcaaactgaaatgtacgcctgaattttgtaaacagaagtattaaatgtctctttctaca

SEQ ID NO: 447682 - DNA, 300 bp, Homo sapiens
cctctgggtctcaggcaggcaggatccccagtggtgcagggacagtgggtcaaagccatgcgtggggcggccctctggccgctactggtgtgacccatgtcccccacgtctccagcaccacctgaagaaactggagggccgccgcctggactttgactacaagaagaagcggcagggcaagatccccgatgaggagctacgccaggcgctggagaagttcgaggagtccaaggaggtggcagaaaccagcatgcacaacctcctggagactgacgtgagtagctcggggtgtcacatcct

SEQ ID NO: 447683 - DNA, 435 bp, Homo sapiens
ggtctatatggtgaaaccccgtctctattaaaaatacaaaaattagctggatgtggtggcaggcccctgtaatcccccttactcaggaggctgagacaggagaattgcttgaacctgggaggcagaggttgcagtgagctgagatcatgccactgcactgcagcctgggcaacagcgagacttcatctcaaagaagttggaaaggatccaggtgtgggggtgaacgcctgtggtcccggctacttgggaggctgaggtgccagcatggcttgagcccagtttgaggcctgcagtgagctggtacagcgccactgcgttccagcctgtgaaacgctatttcaaaaacaaaggctgaggagtgtctcagtctagtggtcccaggcccggtatgatggcttcccccaccacttctccacaggtgacgcattgctggat

SEQ ID NO: 447684 - DNA, 532 bp, Homo sapiens
aagaggtggcagaaacactaagcagtggcacaaacgccctcacatgtaggcagcactttgtacatcgagcaggtgagtcagctctcggccctggtggatgcacagctggactaccaccggcaggccgtgcagatccctgcgaccggacggcatagtgactgcgcaaggcaaaaagggcccgtttcccaaataatgccgccaggatgcaggcgaacgcattacccgtcacagcccctcaagccgggagtataaagccccaaggcccccgtggggcaaagggccccccccttttattgcaccagtccaacgggggcttcccctgcaccacagcccccaagatcgcagcttcatcgtctttccgatcttccgacaagcccatccggacccctagccggagcatgccgcgccctggtaactcaaggtcaccggaaaagagccttttgggctaaaaatgtggggttctccagggggccccatttgggggtctttttttaaaaaacctcggggaaaaaccattttttccgggaaaggc

SEQ ID NO: 447685 - DNA, 2540 bp, Homo sapiens
accggaagcgtgcggttgccatgtaatatcctggccgcgcgggcgcgcgagcggctgaggcggcgccggggcgggcgcggagctggcaagcgggtggcggaggcggcgccgacggggactgctgaggcgcgcagagggtcggcggcgcccgggagcctgtcgctggcgcggtccgggcgggaggctcggcggcgggcggcagcatgtcggtggcggggctgaagaagcagttctacaaggcgagccagctggtcagtgagaaggtcggaggggccgaggggaccaagctggatgatgacttcaaagagatggagaagaaggtggatgtcaccagcaaggcggtgacagaagtgctggccaggaccatcgagtacctgcagcccaacccagcctcgcgggctaagctgaccatgctcaacacggtgtccaagatccggggccaggtgaagaaccccggctacccgcagtcggaggggcttctgggcgagtgcatgatccgccacgggaaggagctgggcggcgagtccaactttggtgacgcattgctggatgccggcgagtccatgaagcgcctggcagaggtgaaggactccctggacatcgaggtcaagcagaacttcattgaccccctccagaacctgtgcgagaaagacctgaaggagatccagcaccacctgaagaaactggagggccgccgcctggactttgactacaagaagaagcggcagggcaagatccccgatgaggagctacgccaggcgctggagaagttcgaggagtccaaggaggtggcagaaaccagcatgcacaacctcctggagactgacatcgagcaggtgagtcagctctcggccctggtggatgcacagctggactaccaccggcaggccgtgcagatcctggacgagctggcggagaagctcaagcgcaggatgcgggaagcttcctcacgccctaagcgggagtataagcccaagccccgggagccctttgaccttggagagcctgagcagtccaacgggggcttcccctgcaccacagcccccaagatcgcagcttcatcgtctttccgatcttccgacaagcccatccggacccctagccggagcatgccgcccctggaccagccgagctgcaaggcgctgtacgacttcgagcccgagaacgacggggagctgggcttccatgagggcgacgtcatcacgctgaccaaccagatcgatgagaactggtacgagggcatgctggacggccagtcgggcttcttcccgctcagctacgtggaggtgcttgtgcccctgccgcagtgactcacccgtgtccccgccccgcccctccgtccacactggccggcaccccctgctgggtctcctgcattccacggagcccctgctgccagggcggtgtctgagcctgccggcgccacctgggccccggcccttgaggtactccctgagcaggaccccacacttgggtgggggggcttatctgggtgggtggggatgcctgtttacactagcgctgactcccaacggtgacggctcccttccccactccatggcgccagcctcctcccccgctccccaacttctcgcccagctggccgaggcggggcaacactaaggtgctcttagaaacactaatgttcctctggggcagcccccacctccgtcctgacccgacgggggcccggcccactgcctaccctcgagtcccgcagccttaacaggatgggatcgagggtccccatggggtggctcagagataggaccctggttttaaatccctcccagcctggtgctggtgatgggccctggccctactccagggccaatgcacccccgcctcacacacgcactccttctcctcaaggccagggcagagggcctcaccgcctcccgggcctgctgtcagcttgcagcccggggacagaggccagctgggatctgcctgaggacagagaacatggtctcctgcagggccctgcctcccaagccccgccctcagaaagccaagtaccttttcagctttttaactgcccccatcccaacccagggaggcctgtgtcactctggcacaagctgccaccaccagccacccacacccaccccagcacacctcacacgggaccacagccgcgctgccgagggccaagcacaaaggttccagtgagcgcatgtcccagcccctggtggccaggctccccttgctgagccgctgccacttcaccctgtgggaagtggccccagccatctcctctagaccaaggcaggcagccccgacatctgcttcctctatcgcccaatgcaaaatcgatgaaatggggagttctctgggccaggccacattcacattcccctccccctgtggtccagtgaagcctccggaccccaggctctgctctgccctgccctgcacccccctcgtcagaagtacatgaggggcgcagagatgagcacacagctttgggcacggtccagggcaaactgaaatgtacgcctgaattttgtaaacagaagtattaaatgtctctttctaca

SEQ ID NO: 447686 - DNA, 3026 bp, Homo sapiens
gggagggttggaaggggaagcattgccccggggtgggggtggggtaggtgtcaggagctcaacaggctctggaggcatctcagcaggacctgagctctccaactctaatggctttttaatgtgtgagctgaagtgtcagggggcggtctcttctggttctttttcgaagctgtccctggaaagcggatgaaagaatgtggtggccagggctgcagcgggtttccctctctcccttctctcccctcctctccctatctctcccccctcttcttcctctctttctgttctcactcttcccttgtctttctctctgtctctcccttcttttgccctctcacctcttcttcctctctctctgtctgtcctctccacaccttcttcctgtctgtctgcctgcctgtctctctctttctctatctctcgccttttgcagggctggatttggcaagcacttttcctgagcactgcagcttggtgcgtttctgctcatttcctgttaagcagtacccagggctccctgaactcaggctctgggaggacggccctgtcttccttttcctctccactcctagaaaaacctgctgaccaggccctgagagcagggtcacggggagacctcctcaccacagcaggaagatagacggacagtttcctccattggacctgactcagcagcggcccactgaccgcctgggagggggctcccgcctagcgggccgcagttccacacctggctggtcagtgagaaggtcggaggggccgaggggaccaagctggatgatgacttcaaagagatggagaagaaggtggatgtcaccagcaaggcggtgacagaagtgctggccaggaccatcgagtacctgcagcccaacccagcctcgcgggctaagctgaccatgctcaacacggtgtccaagatccggggccaggtgaagaaccccggctacccgcagtcggaggggcttctgggcgagtgcatgatccgccacgggaaggagctgggcggcgagtccaactttggtgacgcattgctggatgccggcgagtccatgaagcgcctggcagaggtgaaggactccctggacatcgaggtcaagcagaacttcattgaccccctccagaacctgtgcgagaaagacctgaaggagatccagcaccacctgaagaaactggagggccgccgcctggactttgactacaagaagaagcggcagggcaagatccccgatgaggagctacgccaggcgctggagaagttcgaggagtccaaggaggtggcagaaaccagcatgcacaacctcctggagactgacatcgagcaggtgagtcagctctcggccctggtggatgcacagctggactaccaccggcaggccgtgcagatcctggacgagctggcggagaagctcaagcgcaggatgcgggaagcttcctcacgccctaagcgggagtataagcccaagccccgggagccctttgaccttggagagcctgagcagtccaacgggggcttcccctgcaccacagcccccaagatcgcagcttcatcgtctttccgatcttccgacaagcccatccggacccctagccggagcatgccgcccctggaccagccgagctgcaaggcgctgtacgacttcgagcccgagaacgacggggagctgggcttccatgagggcgacgtcatcacgctgaccaaccagatcgatgagaactggtacgagggcatgctggacggccagtcgggcttcttcccgctcagctacgtggaggtgcttgtgcccctgccgcagtgactcacccgtgtccccgccccgcccctccgtccacactggccggcaccccctgctgggtctcctgcattccacggagcccctgctgccagggcggtgtctgagcctgccggcgccacctgggccccggcccttgaggtactccctgagcaggaccccacacttgggtgggggggcttatctgggtgggtggggatgcctgtttacactagcgctgactcccaacggtgacggctcccttccccactccatggcgccagcctcctcccccgctccccaacttctcgcccagctggccgaggcggggcaacactaaggtgctcttagaaacactaatgttcctctggggcagcccccacctccgtcctgacccgacgggggcccggcccactgcctaccctcgagtcccgcagccttaacaggatgggatcgagggtccccatggggtggctcagagataggaccctggttttaaatccctcccagcctggtgctggtgatgggccctggccctactccagggccaatgcacccccgcctcacacacgcactccttctcctcaaggccagggcagagggcctcaccgcctcccgggcctgctgtcagcttgcagcccggggacagaggccagctgggatctgcctgaggacagagaacatggtctcctgcagggccctgcctcccaagccccgccctcagaaagccaagtaccttttcagctttttaactgcccccatcccaacccagggaggcctgtgtcactctggcacaagctgccaccaccagccacccacacccaccccagcacacctcacacgggaccacagccgcgctgccgagggccaagcacaaaggttccagtgagcgcatgtcccagcccctggtggccaggctccccttgctgagccgctgccacttcaccctgtgggaagtggccccagccatctcctctagaccaaggcaggcagccccgacatctgcttcctctatcgcccaatgcaaaatcgatgaaatggggagttctctgggccaggccacattcacattcccctccccctgtggtccagtgaagcctccggaccccaggctctgctctgccctgccctgcacccccctcgtcagaagtacatgaggggcgcagagatgagcacacagctttgggcacggtccagggcaaactgaaatgtacgcctgaattttgtaaacagaagtattaaatgtctctttctaca

SEQ ID NO: 447687 - DNA, 2771 bp, Homo sapiens
atctgggcttcttttttaggggggagctagatccaccataaacattttatgtgtatatgtacaccgtttatcatatacatattgtgacaactgtatatatatatatatattttgagacagagtcttgctctgtcacccaggctggagtgcagtggcgcaatcttggcttactgagaccaacctccgcctcccgggttcaagcgattctcttgcctcagcctcctgagtagctgggattacaggtgcgccaccacacccggctaattttttttgtatttttagtagagacagggtttcaccatgttggtcaggctggtgttgaactcctgacctcatgatctgcccgcctcagcctcccaaagtgctgggattacaggtgtgagccaccgtgcctggcctaaacaacttgtatgtatacatacactgtttatcatatatacgtattgtggcaaccatatgtatgaataagccttcaaaagctggtcagtgagaaggtcggaggggccgaggggaccaagctggatgatgacttcaaagagatggagaagaaggtggatgtcaccagcaaggcggtgacagaagtgctggccaggaccatcgagtacctgcagcccaacccagcctcgcgggctaagctgaccatgctcaacacggtgtccaagatccggggccaggtgaagaaccccggctacccgcagtcggaggggcttctgggcgagtgcatgatccgccacgggaaggagctgggcggcgagtccaactttggtgacgcattgctggatgccggcgagtccatgaagcgcctggcagaggtgaaggactccctggacatcgaggtcaagcagaacttcattgaccccctccagaacctgtgcgagaaagacctgaaggagatccagcaccacctgaagaaactggagggccgccgcctggactttgactacaagaagaagcggcagggcaagatccccgatgaggagctacgccaggcgctggagaagttcgaggagtccaaggaggtggcagaaaccagcatgcacaacctcctggagactgacatcgagcaggtgagtcagctctcggccctggtggatgcacagctggactaccaccggcaggccgtgcagatcctggacgagctggcggagaagctcaagcgcaggatgcgggaagcttcctcacgccctaagcgggagtataagcccaagccccgggagccctttgaccttggagagcctgagcagtccaacgggggcttcccctgcaccacagcccccaagatcgcagcttcatcgtctttccgatcttccgacaagcccatccggacccctagccggagcatgccgcccctggaccagccgagctgcaaggcgctgtacgacttcgagcccgagaacgacggggagctgggcttccatgagggcgacgtcatcacgctgaccaaccagatcgatgagaactggtacgagggcatgctggacggccagtcgggcttcttcccgctcagctacgtggaggtgcttgtgcccctgccgcagtgactcacccgtgtccccgccccgcccctccgtccacactggccggcaccccctgctgggtctcctgcattccacggagcccctgctgccagggcggtgtctgagcctgccggcgccacctgggccccggcccttgaggtactccctgagcaggaccccacacttgggtgggggggcttatctgggtgggtggggatgcctgtttacactagcgctgactcccaacggtgacggctcccttccccactccatggcgccagcctcctcccccgctccccaacttctcgcccagctggccgaggcggggcaacactaaggtgctcttagaaacactaatgttcctctggggcagcccccacctccgtcctgacccgacgggggcccggcccactgcctaccctcgagtcccgcagccttaacaggatgggatcgagggtccccatggggtggctcagagataggaccctggttttaaatccctcccagcctggtgctggtgatgggccctggccctactccagggccaatgcacccccgcctcacacacgcactccttctcctcaaggccagggcagagggcctcaccgcctcccgggcctgctgtcagcttgcagcccggggacagaggccagctgggatctgcctgaggacagagaacatggtctcctgcagggccctgcctcccaagccccgccctcagaaagccaagtaccttttcagctttttaactgcccccatcccaacccagggaggcctgtgtcactctggcacaagctgccaccaccagccacccacacccaccccagcacacctcacacgggaccacagccgcgctgccgagggccaagcacaaaggttccagtgagcgcatgtcccagcccctggtggccaggctccccttgctgagccgctgccacttcaccctgtgggaagtggccccagccatctcctctagaccaaggcaggcagccccgacatctgcttcctctatcgcccaatgcaaaatcgatgaaatggggagttctctgggccaggccacattcacattcccctccccctgtggtccagtgaagcctccggaccccaggctctgctctgccctgccctgcacccccctcgtcagaagtacatgaggggcgcagagatgagcacacagctttgggcacggtccagggcaaactgaaatgtacgcctgaattttgtaaacagaagtattaaatgtctctttctaca

SEQ ID NO: 447688 - DNA, 2615 bp, Homo sapiens
accggaagcgtgcggttgccatgtaatatcctggccgcgcgggcgcgcgagcggctgaggcggcgccggggcgggcgcggagctggcaagcgggtggcggaggcggcgccgacggggactgctgaggcgcgcagagggtcggcggcgcccgggagcctgtcgctggcgcggtccgggcgggaggctcggcggcgggcggcagcatgtcggtggcggggctgaagaagcagttctacaaggcgagccagctggtcagtgagaaggtcggaggggccgaggggaccaagctggatgatgacttcaaagagatggagaagaaggtggatgtcaccagcaaggcggtgacagaagtgctggccaggaccatcgagtacctgcagcccaacccagcctcgcgggctaagctgaccatgctcaacacggtgtccaagatccggggccaggtgaagaaccccggctacccgcagtcggaggggcttctgggcgagtgcatgatccgccacgggaaggagctgggcggcgagtccaactttggtgacgcattgctggatgccggcgagtccatgaagcgcctggcagaggtgaaggactccctggacatcgaggtcaagcagaacttcattgaccccctccagaacctgtgcgagaaagacctgaaggagatccagcaccacctgaagaaactggagggccgccgcctggactttgactacaagaagaagcggcagggcaagatccccgatgaggagctacgccaggcgctggagaagttcgaggagtccaaggaggtggcagaaaccagcatgcacaacctcctggagactgacatcgagcaggtgagtcagctctcggccctggtggatgcacagctggactaccaccggcaggccgtgcagatcctggacgagctggcggagaagctcaagcgcaggatgcgggaagcttcctcacgccctaagcgggagtataagcccaagccccgggagccctttgaccttggagagcctgagcagtccaacgggggcttcccctgcaccacagcccccaagatcgcagcttcatcgtctttccgatcttccgacaagcccatccggacccctagccggagcatgccgcccctggaccagccgagctgcaaggcgctgtacgacttcgagcccgagaacgacggggagctgggcttccatgagggcgacgtcatcacgctgaccaaccagatcgatgagaactggtacgagggcatgctggacggccagtcgggcttcttcccgctcagctacgtggaggtgcttgtgcccctgccgcagtgactcacccgtgtccccgccccgcccctccgtccacactggccggcaccccctgctgggtctcctgcattccacggagcccctgctgccagggcggtgtctgagcctgccggcgccacctgggccccggcccttgaggtactccctgagcaggaccccacacttgggtgggggggcttatctgggtgggtggggatgcctgtttacactagcgctgactcccaacggtgacggctcccttccccactccatggcgccagcctcctcccccgctccccaacttctcgcccagctggccgaggcggggcaacactaaggtgctcttagaaacactaatgttcctctggggcagcccccacctccgtcctgacccgacgggggcccggcccactgcctaccctcgagtcccgcagccttaacaggatgggatcgagggtccccatggggtggctcagagataggaccctggttttaaatccctcccagcctggtgctggtgatgggccctggccctactccagggccaatgcacccccgcctcacacacgcactccttctcctcaaggccagggcagagggcctcaccgcctcccgggcctgctgtcagcttgcagcccggggacagaggccagctgggatctgcctgaggacagagaacatggtctcctgcagggccctgcctcccaagccccgccctcagaaagccaagtaccttttcagctttttaactgcccccatcccaacccagggaggcctgtgtcactctggcacaagctgccaccaccagccacccacacccaccccagcacacctcacacgggaccacagccgcgctgccgagggccaagcacaaaggttccagtgagcgcatgtcccagcccctggtggccaggctccccttgctgagccgctgccacttcaccctgtgggaagtggccccagccatctcctctagaccaaggcaggcagccccgacatctgcttcctctatcgcccaatgcaaaatcgatgaaatggggagttctctgggccaggccacattcacattcccctccccctgtggtccagtgaagcctccggaccccaggctctgctctgccctgccctgcacccccctcgtcagaagtacatgaggggcgcagagatgagcacacagctttgggcacggtccagggcaaactgaaatgtacgcctgaattttgtaaacagaagtattaaatgtctctttctacaaaaaaaaaaaataaagaaaaagaaaaaaagaaaaacaaaaaaaaaaaaaaaaaaaaaaaaaaaaaaaaaaaaaaa

SEQ ID NO: 447689 - DNA, 2592 bp, Homo sapiens
gtaatcccaacactttgggaggccgaggcgggcggatcacaaggtcaggagttcgagaccggtgtggtctatatggtgaaaccccgtctctattaaaaatacaaaaattagctggatgtggtggcaggcccctgtaatcccccttactcaggaggctgagacaggagaattgcttgaacctgggaggcagaggttgcagtgagctgagatcatgccactgcactgcagcctgggcaacagcgagacttcatctcaaagaagttggaaaggatccaggtgtgggggtgaacgcctgtggtcccggctacttgggaggctgaggtgccagcatggcttgagcccagtttgaggcctgcagtgagctggtacagcgccactgcgttccagcctgtgaaacgctatttcaaaaacaaaggctgaggagtgtctcagtctagtggtcccaggcccggtatgatggcttcccccaccacttctccacaggtgacgcattgctggatgccggcgagtccatgaagcgcctggcagaggtgaaggactccctggacatcgaggtcaagcagaacttcattgaccccctccagaacctccagcctcggcactgccctctgggtctcaggcaggcaggatccccagtggtgcagggacagtgggtcaaagccatgcgtggggcggccctctggccgctactggtgtgacccatgtcccccacgtctccagcaccacctgaagaaactggagggccgccgcctggactttgactacaagaagaagcggcagggcaagatccccgatgaggagctacgccaggcgctggagaagttcgaggagtccaaggaggtggcagaaaccagcatgcacaacctcctggagactgacatcgagcaggtgagtcagctctcggccctggtggatgcacagctggactaccaccggcaggccgtgcagatcctggacgagctggcggagaagctcaagcgcaggatgcgggaagcttcctcacgccctaagcgggagtataagcccaagccccgggagccctttgaccttggagagcctgagcagtccaacgggggcttcccctgcaccacagcccccaagatcgcagcttcatcgtctttccgatcttccgacaagcccatccggacccctagccggagcatgccgcccctggaccagccgagctgcaaggcgctgtacgacttcgagcccgagaacgacggggagctgggcttccatgagggcgacgtcatcacgctgaccaaccagatcgatgagaactggtacgagggcatgctggacggccagtcgggcttcttcccgctcagctacgtggaggtgcttgtgcccctgccgcagtgactcacccgtgtccccgccccgcccctccgtccacactggccggcaccccctgctgggtctcctgcattccacggagcccctgctgccagggcggtgtctgagcctgccggcgccacctgggccccggcccttgaggtactccctgagcaggaccccacacttgggtgggggggcttatctgggtgggtggggatgcctgtttacactagcgctgactcccaacggtgacggctcccttccccactccatggcgccagcctcctcccccgctccccaacttctcgcccagctggccgaggcggggcaacactaaggtgctcttagaaacactaatgttcctctggggcagcccccacctccgtcctgacccgacgggggcccggcccactgcctaccctcgagtcccgcagccttaacaggatgggatcgagggtccccatggggtggctcagagataggaccctggttttaaatccctcccagcctggtgctggtgatgggccctggccctactccagggccaatgcacccccgcctcacacacgcactccttctcctcaaggccagggcagagggcctcaccgcctcccgggcctgctgtcagcttgcagcccggggacagaggccagctgggatctgcctgaggacagagaacatggtctcctgcagggccctgcctcccaagccccgccctcagaaagccaagtaccttttcagctttttaactgcccccatcccaacccagggaggcctgtgtcactctggcacaagctgccaccaccagccacccacacccaccccagcacacctcacacgggaccacagccgcgctgccgagggccaagcacaaaggttccagtgagcgcatgtcccagcccctggtggccaggctccccttgctgagccgctgccacttcaccctgtgggaagtggccccagccatctcctctagaccaaggcaggcagccccgacatctgcttcctctatcgcccaatgcaaaatcgatgaaatggggagttctctgggccaggccacattcacattcccctccccctgtggtccagtgaagcctccggaccccaggctctgctctgccctgccctgcacccccctcgtcagaagtacatgaggggcgcagagatgagcacacagctttgggcacggtccagggcaaactgaaatgtacgcctgaattttgtaaacagaagtattaaatgtctctttctaca

SEQ ID NO: 447690 - DNA, 2306 bp, Homo sapiens
accggaagcgtgcggttgccatgtaatatcctggccgcgcgggcgcgcgagcggctgaggcggcgccggggcgggcgcggagctggcaagcgggtggcggaggcggcgccgacggggactgctgaggcgcgcagagggtcggcggcgcccgggagcctgtcgctggcgcggtccgggcgggaggctcggcggcgggcggcagcatgtcggtggcggggctgaagaagcagttctacaaggcgagccagctggtcagtgagaaggtcggaggggccgaggggaccaagctggatgatgacttcaaagagatggagaagaaggtggatgtcaccagcaaggcggtgacagaagtgctggccaggaccatcgagtacctgcagcccaacccagcctcgcgggctaagctgaccatgctcaacacggtgtccaagatccggggccaggtgaagaaccccggctacccgcagtcggaggggcttctgggcgagtgcatgatccgccacgggaaggagctgggcggcgagtccaactttggtgacgcattgctggatgccggcgagtccatgaagcgcctggcagaggtgaaggactccctggacatcgaggtcaagcagaacttcattgaccccctccagaacctgtgcgagaaagacctgaaggagatccagcaccacctgaagaaactggagggccgccgcctggactttgactacaagaagaagcggcagggcaagatccccgatgaggagctacgccaggcgctggagaagttcgaggagtccaaggaggtggcagaaaccagcatgcacaacctcctggagactgacatcgagcaggtgagtcagctctcggccctggtggatgcacagctggactaccaccggcaggccgtgcagatcctggacgagctggcggagaagctcaagcgcaggatgcgggaagcttcctcacgccctaagcgggagtataagcccaagccccgggagccctttgaccttggagagcctgagcagtccaacgggggcttcccctgcaccacagcccccaagatcgcagcttcatcgtctttccgatcttccgacaagcccatccggacccctagccggagcatgccgcccctggaccagccgagctgcaaggcgctgtacgacttcgagcccgagaacgacggggagctgggcttccatgagggcgacgtcatcacgctgaccaaccagatcgatgagaactggtacgagggcatgctggacggccagtcgggcttcttcccgctcagctacgtggaggtgcttgtgcccctgccgcagtgactcacccgtgtccccgccccgcccctccgtccacactggccggcaccccctgctgggtctcctgcattccacggagcccctgctgccagggcggtgtctgagcctgccggcgccacctgggccccggcccttgaggtactccctgagcaggaccccacacttgggtgggggggcttatctgggtgggtggggatgcctgtttacactagcgctgactcccaacggtgacggctcccttccccactccatggcgccagcctcctcccccgctccccaacttctcgcccagctggccgaggcggggcaacactaaggtgctcttagaaacactaatgttcctctggggcagcccccacctccgtcctgacccgacgggggcccggcccactgcctaccctcgagtcccgcagccttaacaggatgggatcgagggtccccatggggtggctcagagataggaccctggttttaaatccctcccagcctggtgctggtgatgggccctggccctactccagggccaatgcacccccgcctcacacacgcactccttctcctcaaggccagggcagagggcctcaccgcctcccgggcctgctgtcagcttgcagcccggggacagaggccagctgggatctgcctgaggacagagaacatggtctcctgcagggccctgccacttcaccctgtgggaagtggccccagccatctcctctagaccaaggcaggcagccccgacatctgcttcctctatcgcccaatgcaaaatcgatgaaatggggagttctctgggccaggccacattcacattcccctccccctgtggtccagtgaagcctccggaccccaggctctgctctgccctgccctgcacccccctcgtcagaagtacatgaggggcgcagagatgagcacacagctttgggcacggtccagggcaaactgaaatgtacgcctgaattttgtaaacagaagtattaaatgtctctttctaca

SEQ ID NO: 447691 - DNA, 1538 bp, Homo sapiens
  misc_feature (28)..(28): n is a, c, g, or t
  misc_feature (42)..(43): n is a, c, g, or t
  misc_feature (45)..(46): n is a, c, g, or t
agaaagagcaaaagctatgggctaggtncgaggctgggtgtnncnngatcgcagcttcatcgtctttccgatcttccgacaagcccatccggacccctagccggagcatgccgcccctggaccagccgagctgcaaggcgctgtacgacttcgagcccgagaacgacggggagctgggcttccatgagggcgacgtcatcacgctgaccaaccagatcgatgagaactggtacgagggcatgctggacggccagtcgggcttcttcccgctcagctacgtggaggtgcttgtgcccctgccgcagtgactcacccgtgtccccgccccgcccctccgtccacactggccggcaccccctgctgggtctcctgcattccacggagcccctgctgccagggcggtgtctgagcctgccggcgccacctgggccccggcccttgaggtactccctgagcaggaccccacacttgggtgggggggcttatctgggtgggtggggatgcctgtttacactagcgctgactcccaacggtgacggctcccttccccactccatggcgccagcctcctcccccgctccccaacttctcgcccagctggccgaggcggggcaacactaaggtgctcttagaaacactaatgttcctctggggcagcccccacctccgtcctgacccgacgggggcccggcccactgcctaccctcgagtcccgcagccttaacaggatgggatcgagggtccccatggggtggctcagagataggaccctggttttaaatccctcccagcctggtgctggtgatgggccctggccctactccagggccaatgcacccccgcctcacacacgcactccttctcctcaaggccagggcagagggcctcaccgcctcccgggcctgctgtcagcttgcagcccggggacagaggccagctgggatctgcctgaggacagagaacatggtctcctgcagggccctgcctcccaagccccgccctcagaaagccaagtaccttttcagctttttaactgcccccatcccaacccagggaggcctgtgtcactctggcacaagctgccaccaccagccacccacacccaccccagcacacctcacacgggaccacagccgcgctgccgagggccaagcacaaaggttccagtgagcgcatgtcccagcccctggtggccaggctccccttgctgagccgctgccacttcaccctgtgggaagtggccccagccatctcctctagaccaaggcaggcagccccgacatctgcttcctctatcgcccaatgcaaaatcgatgaaatggggagttctctgggccaggccacattcacattcccctccccctgtggtccagtgaagcctccggaccccaggctctgctctgccctgccctgcacccccctcgtcagaagtacatgaggggcgcagagatgagcacacagctttgggcacggtccagggcaaactgaaatgtacgcctgaattttgtaaacagaagtattaaatgtctctttctaca

SEQ ID NO: 447692 - DNA, 1912 bp, Homo sapiens
accggaagcgtgcggttgccatgtaatatcctggccgcgcgggcgcgcgagcggctgaggcggcgccggggcgggcgcggagctggcaagcgggtggcggaggcggcgccgacggggactgctgaggcgcgcagagggtcggcggcgcccgggagcctgtcgctggcgcggtccgggcgggaggctcggcggcgggcggcagcatgtcggtggcggggctgaagaagcagttctacaaggcgagccagctggtcagtgagaaggtcggaggggccgaggggaccaagctggatgatgacttcaaagagatggagaagaaggtggatgtcaccagcaaggcggtgacagaagtgctggccaggaccatcgagtacctgcagcccaacccagcctcgcgggctaagctgaccatgctcaacacggtgtccaagatccggggccaggtgaagaaccccggctacccgcagtcggaggggcttctgggcgagtgcatgatccgccacgggaaggagctgggcggcgagtccaactttggtgacgcattgctggatgccggcgagtccatgaagcgcctggcagaggtgaaggactccctggacatcgaggtcaagcagaacttcattgaccccctccagaacctgtgcgagaaagacctgaaggagatccagcaccacctgaagaaactggagggccgccgcctggactttgactacaagaagaaccggcaccccctgctgggtctcctgcattccacggagcccctgctgccagggcggtgtctgagcctgccggcgccacctgggccccggcccttgaggtactccctgagcaggaccccacacttgggtgggggggcttatctgggtgggtggggatgcctgtttacactagcgctgactcccaacggtgacggctcccttccccactccatggcgccagcctcctcccccgctccccaacttctcgcccagctggccgaggcggggcaacactaaggtgctcttagaaacactaatgttcctctggggcagcccccacctccgtcctgacccgacgggggcccggcccactgcctaccctcgagtcccgcagccttaacaggatgggatcgagggtccccatggggtggctcagagataggaccctggttttaaatccctcccagcctggtgctggtgatgggccctggccctactccagggccaatgcacccccgcctcacacacgcactccttctcctcaaggccagggcagagggcctcaccgcctcccgggcctgctgtcagcttgcagcccggggacagaggccagctgggatctgcctgaggacagagaacatggtctcctgcagggccctgcctcccaagccccgccctcagaaagccaagtaccttttcagctttttaactgcccccatcccaacccagggaggcctgtgtcactctggcacaagctgccaccaccagccacccacacccaccccagcacacctcacacgggaccacagccgcgctgccgagggccaagcacaaaggttccagtgagcgcatgtcccagcccctggtggccaggctccccttgctgagccgctgccacttcaccctgtgggaagtggccccagccatctcctctagaccaaggcaggcagccccgacatctgcttcctctatcgcccaatgcaaaatcgatgaaatggggagttctctgggccaggccacattcacattcccctccccctgtggtccagtgaagcctccggaccccaggctctgctctgccctgccctgcacccccctcgtcagaagtacatgaggggcgcagagatgagcacacagctttgggcacggtccagggcaaactgaaatgtacgcctgaattttgtaaacagaagtattaaatgtctctttctaca

SEQ ID NO: 447693 - DNA, 1230 bp, Homo sapiens
accggaagcgtgcggttgccatgtaatatcctggccgcgcgggcgcgcgagcggctgaggcggcgccggggcgggcgcggagctggcaagcgggtggcggaggcggcgccgacggggactgctgaggcgcgcagagggtcggcggcgcccgggagcctgtcgctggcgcggtccgggcgggaggctcggcggcgggcggcagcatgtcggtggcggggctgaagaagcagttctacaaggcgagccagctggtcagtgagaaggtcggaggggccgaggggaccaagctggatgatgacttcaaagagatggagaagaaggtggatgtcaccagcaaggcggtgacagaagtgctggccaggaccatcgagtacctgcagcccaacccagcctcgcgggctaagctgaccatgctcaacacggtgtccaagatccggggccaggtgaagaaccccggctacccgcagtcggaggggcttctgggcgagtgcatgatccgccacgggaaggagctgggcggcgagtccaactttggtgacgcattgctggatgccggcgagtccatgaagcgcctggcagaggtgaaggactccctggacatcgaggtcaagcagaacttcattgaccccctccagaacctgtgcgagaaagacctgaaggagatccagcaccacctgaagaaactggagggccgccgcctggactttgactacaagaagaagcggcagggcaagatccccgatgaggagctacgccaggcgctggagaagttcgaggagtccaaggaggtggcagaaaccagcatgcacaacctcctggagactgacatcgagcaggtgagtcagctctcggccctggtggatgcacagctggactaccaccggcaggccgtgcagatcctggacgagctggcggagaagctcaagcgcaggatgcgggaagcttcctcacgccctaagcgggagtataagcccaagccccgggagccctttgaccttggagagcctgagcagtccaacgggggcttcccctgcaccacagcccccaagatcgcagcttcatcgtctttccgatcttccgacaagcccatccggacccctagccggagcatgctcgtcagaagtacatgaggggcgcagagatgagcacacagctttgggcacggtccagggcaaactgaaatgtacgcctgaattttgtaaacagaagtattaaatgtctctttctaca

SEQ ID NO: 447694 - DNA, 487 bp, Homo sapiens
gatgataccactcacctcaaatagatgttctaagaataatatgaaattgacatgtgttaaacctgcctaacaaacccggcaccgtactaaatgttagctgaaatggaatgtaagataacctagtgctttacaaaatgtgtaccttatagcaagtgcttagtattaaatgaatgaatgatgcttttcagttgctattactctgtgatccttaagccatacggccttactacatccagttttttaactgtggaaagacaagaaccttttaccttcagaagtgcttcaggattcgtaaaacatgttaagtatcctgacactacaacttcaagaattatacatttataatatcccaccaataaacatctaaccataaacacttcagcagcatctaatagccacctatctgcctaaatgatttacacatcattagaaaggtattctggaaatgaagaaggcagggcaaaaagtttgcatacacagaaaacac

SEQ ID NO: 447695 - DNA, 3155 bp, Homo sapiens
atgggtagccgggcgcggggcggggccgcggggccgccgcttaaagaaacttgttgcgggtcccgcagcgggacccgagcctcggcggcggcggcggcggcggcaggggcgagggtcggggccaccgcgcggcgacctcgggtcccggagcgaccgcagggcagccccgggcgccggccccggtgcgcgtctcctgtgcgcgcccctccgcgcgcggccccgatgctggacatgagcgaggcccgctcccagccgccctgcagcccgtccggcaccgccagctccatgtcgcacgtggaggactcggactcggacgcgccgccgtctcccgccggctccgagggcctgggccgcgcgggggtcgcggtggggggcgcccggggcgacccggcggaggcggcggacgagcgcttcccggcctgcatccgcgacgccgtgtcgcaggtgctcaagggctacgactggagtctggtgcccatgccggtgcgcggcggcggcggcggcgcgctcaaagccaagccgcatgtgaagcggcccatgaacgcattcatggtgtgggcgcaggcggcgcgccgcaagctggccgaccagtacccgcacctgcacaacgccgagctcagcaagacgctgggcaagctgtggcgcttgctgagcgagagcgagaagcggcccttcgtggaggaggcagagcgccttcgcgtgcagcacaagaaggaccaccccgactacaagtaccagccacggcgcaggaagagcgccaaagccggccacagcgactccgactcgggcgcggagctgggaccccaccctggcggcggtgccgtgtacaaggctgaagcagggcttggagatgggcaccaccatggcgaccacacagggcagacccacgggccgcccaccccgcccaccacccccaagacggagctgcagcaggcgggcgccaagccggagctgaagctggagggacgccggccggtggacagcgggcgccagaacatcgacttcagcaacgtggacatctcggagctcagcagcgaggtcatgggcaccatggacgccttcgacgtccacgagttcgaccagtacctgcccctgggcggccccgccccacccgagccgggccaggcctatgggggcgcctacttccacgccggggcgtcccccgtgtgggcccacaagagtgccccgtcggcctccgcgtcgcccaccgagacgggtcccccacggccgcacatcaagacggagcagccgagccccggccactacggcgaccagccccgaggctcgcccgactacggttcctgcagcggccagtccagcgccaccccggccgcccccgccggccccttcgccggctcacagggcgactatggcgacctgcaggcctccagctactatggtgcctaccctggctacgcacccggcctctaccagtacccctgcttccactcgccgcgccggccctacgcctcacccctgctcaacggcctggccctgccgcccgcccacagccccaccagtcactgggaccagccggtgtacaccaccctgaccaggccctgagggcccagccgcggggagggactcgcaggcgtcagggggcagccttgtcccggcccagtgtgtgtgaccggggcgggaggggccccagtggctgagctccaagtgcctgctgaagtctgcagggaaacacgcttgctgcccgtggccctcggcctccagatggccacacctctgccgacgacggaccagctccctctcccttctatctttctttttgaggtggtgggattattccacaaagaagggctgccgtttggtccctcttccgtgaggactggcggcaccagcaccttcgctttgcatctcggtagaggagaaacggcagcacagcccaaggaccaaaggagggggtggcaggggccttgcagggcgctgtgaggtccaggccggtcttggcgccgagagcccctgcactcaaggccacattccctcgacaacggctgcacgggctgtccgggatccggggtgtctgtccgcagactgggatgagtctactcgagcatctccgggacctgcctgtcagatctgaggtgtctccttgctggcagagtgcgctcacgcgagggctggctgtgatgaacacatctctcttttatttttatgtttttgataatttttatttttgaagcttaaatgtgtttcttctgaaagctgttaaagatgtatttatgttctgtgttattttatctttaattaatgaggtaattcgggcaaagagtagaatttaagacaaaacggaagctgggaagcttcccttgagggcaggcaggaggtggagttgcagctgttggccggcatcacgttgctcgttgctcggcttatgggaggccgccctggagggcccggaggtcccaaggtccctgggaggactgggcccctcatgcctcgagcttggcaaccgaaaacccgagggaggagaagggacctgccttgtgacatctctgatcaggttggggtgccccagcacccagtaccagtttggggtttgggaagcaggactccgtccctgtccccgactgtgccacgtggtaggacacataggacacaggaattcctgggtccttgcccatgactgtgccatgtggtaggacacaggacacaggaattcctggaaagtggtggcttcagaagtgatcttggctcgcaggcaccagtgccacctaccaagctgtgaaactaaaccttctccactaaacgtcgttagggcctcagttctagacgagtcatacctgattcacctgcactgcttcccctgtgtgctgagcatagagcatacaatagcgcctacttcacggaaacttgtgcctttaaactttgtaaacttaaacacagccgagaagttgcttctttgtactttttctacttttcctacttttttgtagaaaaaaaagataatgcctctgcttctatttctctgggggtgggggtgggggccgggagccgtcgcagacccgtttcatgcagcgtctcccttggcaccgcgttcggaggacgcaccctcactcccctgctgccttcactcctttctgaccaagcaacgctaacttttgtacagatcgatttgataaaattaaacaaagtgctttttatgg

SEQ ID NO: 447696 - DNA, 4538 bp, Homo sapiens
atgggtagccgggcgcggggcggggccgcggggccgccgcttaaagaaacttgttgcgggtcccgcagcgggacccgagcctcggcggcggcggcggcggcggcaggggcgagggtcggggccaccgcgcggcgacctcgggtcccggagcgaccgcagggcagccccgggcgccggccccggtgcgcgtctcctgtgcgcgcccctccgcgcgcggccccgatgctggacatgagcgaggcccgctcccagccgccctgcagcccgtccggcaccgccagctccatgtcgcacgtggaggactcggactcggacgcgccgccgtctcccgccggctccgagggcctgggccgcgcgggggtcgcggtggggggcgcccggggcgacccggcggaggcggcggacgagcgcttcccggcctgcatccgcgacgccgtgtcgcaggtgctcaagggctacgactggagtctggtgcccatgccggtgcgcggcggcggcggcggcgcgctcaaagccaagccgcatgtgaagcggcccatgaacgcattcatggtgtgggcgcaggcggcgcgccgcaagctggccgaccagtacccgcacctgcacaacgccgagctcagcaagacgctgggcaagctgtggcggtgagtgccggcgccccgggggcggggttcgggaccttggccgcccctggtctcggactgcgagcgggggcctggagggcgcagagctcgcggaggtggtggccacacgcaggctccgggctctgcaccccgggcgggtgtcagggcgggtcccagtggaaaaacatcctctggccagccggggtccggcgccagctatgggagtcgggatccgcggagggcagcgcctggggtgtgcaccctcgtggcgggtgcgctctggagccagttctcctggcggggaacaccctgcggagggccatggctggcaccccgacgtgccctccagccgttgcgagtggccccagccccgggaggcacgcccggcacgacagcaagttgcatgcggctctctggaggtgctccctccttagaaagggctcagctcctctagctcctggaccacccatggggagggagtgcggcaggcggatgggtgggcagcaggtttgcctgcgagtaccctccccgcagtttctccctctcctggacaccctcggtccgaagcagggagggcaggagtggagatgacggggtgcgccgtgtgcacgccttggcgtggtggggccggtcagttttccagaaattaggactgcagagtgaagaacttgttgctcaggacaggccgcccccaccgagtgtcctctggttgggtttcaaatggttctcttggtttggggctctggttcccgtatcctgctcctcacctggaagaagggagcttggagcttgcgtatttgcacctcctgccttctgtctggatctagggcgcagccacggggcgctgtggacggcaggcccctgctcccccaagtcctgccgcacaggcggttggaggtgagcctcgggaagagtcccaaggagtgtgtcctgtggctcagtgaggacgggcgcctgggccctgccagggcttctgggtgtctgggaatggagggacagcagcccagctgcccgccgaaggccggcaccgttcccgggaagcctcgcttttgtccaccgccggctgggtcctgcccgcctcccccgcctcccttagaaagccccagagggagggaacagcaggcccggaatagggggaaatagaaggaggaagatgggaggcgtggggcttgttcttctttggctgtcgtaagcataccaaccttcccaaacaggcgccggccggttctcccagaggagtgtactgcctggtgccacgggaggctccggagcgcacggcaggcgggtttccctggtcagagcctcctggccccggcctctgctgccggttccccctgtggtgtgtgcctgcgccgagggcacagtgggcgccctggccatccctgcctctgccctgtgctgcagcttgctgagcgagagcgagaagcggcccttcgtggaggaggcagagcgccttcgcgtgcagcacaagaaggaccaccccgactacaagtaccagccacggcgcaggaagagcgccaaagccggccacagcgactccgactcgggcgcggagctgggaccccaccctggcggcggtgccgtgtacaaggctgaagcagggcttggagatgggcaccaccatggcgaccacacagggcagacccacgggccgcccaccccgcccaccacccccaagacggagctgcagcaggcgggcgccaagccggagctgaagctggagggacgccggccggtggacagcgggcgccagaacatcgacttcagcaacgtggacatctcggagctcagcagcgaggtcatgggcaccatggacgccttcgacgtccacgagttcgaccagtacctgcccctgggcggccccgccccacccgagccgggccaggcctatgggggcgcctacttccacgccggggcgtcccccgtgtgggcccacaagagtgccccgtcggcctccgcgtcgcccaccgagacgggtcccccacggccgcacatcaagacggagcagccgagccccggccactacggcgaccagccccgaggctcgcccgactacggttcctgcagcggccagtccagcgccaccccggccgcccccgccggccccttcgccggctcacagggcgactatggcgacctgcaggcctccagctactatggtgcctaccctggctacgcacccggcctctaccagtacccctgcttccactcgccgcgccggccctacgcctcacccctgctcaacggcctggccctgccgcccgcccacagccccaccagtcactgggaccagccggtgtacaccaccctgaccaggccctgagggcccagccgcggggagggactcgcaggcgtcagggggcagccttgtcccggcccagtgtgtgtgaccggggcgggaggggccccagtggctgagctccaagtgcctgctgaagtctgcagggaaacacgcttgctgcccgtggccctcggcctccagatggccacacctctgccgacgacggaccagctccctctcccttctatctttctttttgaggtggtgggattattccacaaagaagggctgccgtttggtccctcttccgtgaggactggcggcaccagcaccttcgctttgcatctcggtagaggagaaacggcagcacagcccaaggaccaaaggagggggtggcaggggccttgcagggcgctgtgaggtccaggccggtcttggcgccgagagcccctgcactcaaggccacattccctcgacaacggctgcacgggctgtccgggatccggggtgtctgtccgcagactgggatgagtctactcgagcatctccgggacctgcctgtcagatctgaggtgtctccttgctggcagagtgcgctcacgcgagggctggctgtgatgaacacatctctcttttatttttatgtttttgataatttttatttttgaagcttaaatgtgtttcttctgaaagctgttaaagatgtatttatgttctgtgttattttatctttaattaatgaggtaattcgggcaaagagtagaatttaagacaaaacggaagctgggaagcttcccttgagggcaggcaggaggtggagttgcagctgttggccggcatcacgttgctcgttgctcggcttatgggaggccgccctggagggcccggaggtcccaaggtccctgggaggactgggcccctcatgcctcgagcttggcaaccgaaaacccgagggaggagaagggacctgccttgtgacatctctgatcaggttggggtgccccagcacccagtaccagtttggggtttgggaagcaggactccgtccctgtccccgactgtgccacgtggtaggacacataggacacaggaattcctgggtccttgcccatgactgtgccatgtggtaggacacaggacacaggaattcctggaaagtggtggcttcagaagtgatcttggctcgcaggcaccagtgccacctaccaagctgtgaaactaaaccttctccactaaacgtcgttagggcctcagttctagacgagtcatacctgattcacctgcactgcttcccctgtgtgctgagcatagagcatacaatagcgcctacttcacggaaacttgtgcctttaaactttgtaaacttaaacacagccgagaagttgcttctttgtactttttctacttttcctacttttttgtagaaaaaaaagataatgcctctgcttctatttctctgggggtgggggtgggggccgggagccgtcgcagacccgtttcatgcagcgtctcccttggcaccgcgttcggaggacgcaccctcactcccctgctgccttcactcctttctgaccaagcaacgctaacttttgtacagatcgatttgataaaattaaacaaagtgctttttatgg

SEQ ID NO: 447697 - DNA, 4371 bp, Homo sapiens
  misc_feature (31)..(31): n is a, c, g, or t
cccctgctgctctcaagtttcccgttggcgncgcggcccgggcgcttcaggtagcctctcggctctctctgctccgctccgcgcccaggtagggcaccgacgggggctgcacgcggctggccggcttcctccctgctgaggcggccctccctcctcccgcggggccctcctggccggggatccgcagcgctgcgccctctgaacgcccggcccccgcgcctgctgcggggcggggcctggccgggccctggccccggcgggcctcagtgccagcagccccgctccgctctgcccagcgcgtcccctttgctccagccctgcggccgtccctttcggccggcggcatggccctgtcgtccgaacccgctgagatgccgcggcagtttcccaagctgaacatctctgaagtggatgagcaagtccggctcctggcggagaaggtgtttgctaaagtgctccgagaagaggacagcaaagatgccctgtccctgttcactgtcccagaggactgccccatcgggcaaaaggaagccaaggagagggagctgcagaaggagctggcagagcagaagtctgtggagaccgcaaaaagaaagaaaagtttcaagatgattcggtcccagtccctgtctctgcaaatgccgccacagcaagattggaagggccccccggcagccagtccggccatgtctcccacaacccctgtggtcactggagccacttccctgcccacgccagcaccctatgccatgcctgagttccagcgggtcaccatcagcggagattactgtgccgggatcactttggaggactatgagcaggcagccaagagtctggccaaggccctaatgatccgggagaagtatgcgcggctcgcctaccaccgcttcccgcggatcacatcccagtacctgggtcatccgcgggcggatactgcacctccggaagagggccttccagacttccaccctcctccactgccccaggaagacccctactgcctggatgatgcaccccccaacctggattacttggtccacatgcaggggggcatcctctttgtgtatgataacaagaagatgctggagcaccaggagccgcacagcctaccctaccccgacctggagacctacacggtggacatgagccacatcctggctctcatcaccgatggccccacgaaaacctattgtcaccggcgactgaactttctggaatccaagttcagccttcatgagatgttaaacgaaatgtccgagttcaaagagttgaagagtaacccccaccgggacttctataacgtgagaaaggtggacacacacatccatgcggccgcctgcatgaaccaaaagcatctgctgcgcttcatcaagcacacataccagacggagcctgacaggactgtggcagagaagcggggccggaagatcaccctgcggcaggtgtttgacggcctgcacatggacccctacgacctcactgtggactcactggatgtccacgcgggccggcagacattccaccgctttgacaagttcaactccaaatacaaccctgtgggggccagtgagctgcgtgacctgtatttgaaaactgaaaactatctgggaggagagtactttgctcggatggtcaaggaggttgcccgggagctggaggagagcaagtaccagtactcagagccacggctctccatctacggccgcagtcctgaggagtggcccaacctggcctactggttcatccagcacaaggtctactctcccaacatgcgctggatcatccaggtgccccggatttatgacatatttaggtcaaagaagctgctgccaaactttgggaagatgctggagaacatcttcctgccccttttcaaggccactatcaacccccaagatcatcgagagcttcacctcttccttaaatatgtgacggggtttgacagcgtggatgatgagtccaagcacagcgaccacatgttttccgacaagagcccaaacccggacgtctggaccagtgagcagaacccaccctacagctactacctgtactacatgtatgccaacatcatggtgctcaacaacctccgcagggagcgcggcctgagcacgttcctgttccggccgcactgtggggaagccggctccatcacccacctggtgtctgccttcctcactgctgacaacatttcccacgggctgctcctcaagaagagtccggtattgcagtatctctactaccttgctcagatccccattgccatgtctcctcttagcaacaacagtttgttcctcgaatattccaagaaccctctgagggaattcctacacaagggactgcatgtttctctttccaccgatgaccccatgcagttccactacacgaaggaagcacttatggaagaatatgccattgcagctcaagtgtggaagctgagcacctgcgacctgtgtgagatcgccaggaacagcgtgctgcagagcggcctctcgcatcaggaaaagcaaaagtttctgggacaaaattattataaagaaggacctgaaggaaatgatattcgaaagacaaatgtggctcagatccggatggcattccgatatgagaccttatgcaatgagctcagcttcctgtctgatgctatgaaatcagaagagatcaccgccttgaccaactaggtccagcatttgacatgcattttaactttttggttcaatttcaagtctgctgtggctaatagtggtcaagattccgaactaggactttcctctgtgaagaggatgcctctgaagaaattttaaactggtgattttggttgcactgctcactttaagagttaacatgctcacttgttagtatttctgagtaacaagatggtgacttctccttggggatctgggagctgagcacttgtctatacttgttcctaattttccaagtatttctcttgaaactgccagtgcctgaactgttggggccaggattttccctggtcagatgccaagtaacatgtggttttctgccatacttttctccattggcccaggtaggctaattggtagttgttcatttcagcctctggatggctggctgccttaaacacaatcaatttcaaagctccatttcataaaggggctactttgaaggagttaagatggaagacttccttcttgacaaattgtgtttttagtgaatttcttaaaccgttttatttagccctccttccctctttctagttggaagccaaatgtactcatgaaaacagccactcctattctgagtcttggtttcttcacctagaaagtgagggtttggactagatgagtggctttcagggtgttctgtgaatctcctcatgaatactttagggtgggggagggaagggagtgagtgatgctcaggggctgtcaaagtgactgcgttcatcagttttacactggggctgctacataatattttcatttgaacgaagaacttcaaaaagcacaggactagatgatctctgttccttttggctctaatatgctacaactgtaggccaattatcactttaccaattaagagttaggccagataagtgaaatttaacttaagggcacacagctaataagtaataggcctaaactggatttccttattccaaatcctgtcttttccccactattccattagaccccacaaatgttagttgtgtgtgtgtgtgtgtgtgtttttaatcactgtaaccgggtgcatttttttaaggcaaaatttctcccttatctactgtgatgacttcagaagatacaatggtcccaggggccaagtagaaagcatttttaaagattaatctgaattaagctttatcagtgtactctttatctgtgttactagtgcctggtatgtagtaggtgctcaataaatgcatattgaataactaagtgaatttcttttggcaactttttaaggacatgtgctcttagtacttaagaggctgctcaaggaccttcctatctatttctgtggtcaaattcagactacaggaggtctttttgaatcattatagttagaagaagaatccagtttctgcctgtgaacttatttgactttagattgtctcatcttgtgactttataatgcctgtcccctccactggtcaattcagcatatggaagtataaatgcagtctttttactaggcagatatatatgctatcttacagctaattatgaaattgaatgaaaatccattgttatcttagggattagttttgaaaagcccccatttatatacatttgccctaacataggaagtattgtgtagtttctcattgtcattttatctgtatcaagtatctttttttaaattgttaaataaagtcagctaggactgtgg

SEQ ID NO: 447698 - DNA, 3799 bp, Homo sapiens
ttcagggctcttggaaattttccactcatatttcatattcacgagagaatttccagcccaggcttttcctgctctggctcactgctgctcacagatatgcaaaacagagacctcctactccagccggcagacaggacccagccagctgcacgcacgcactgactcagctgagcctcctgggtggcaggcagcacctcacccgggtgcatcacttgagtggcatcttcaggaccagtcatggagccaggctcagctgagatgccgcggcagtttcccaagctgaacatctctgaagtggatgagcaagtccggctcctggcggagaaggtgtttgctaaagtgctccgagaagaggacagcaaagatgccctgtccctgttcactgtcccagaggactgccccatcgggcaaaaggaagccaaggagagggagctgcagaaggagctggcagagcagaagtctgtggagaccgcaaaaagaaagaaaagtttcaagatgattcggtcccagtccctgtctctgcaaatgccgccacagcaagattggaagggccccccggcagccagtccggccatgtctcccacaacccctgtggtcactggagccacttccctgcccacgccagcaccctatgccatgcctgagttccagcgggtcaccatcagcggagattactgtgccgggatcactttggaggactatgagcaggcagccaagagtctggccaaggccctaatgatccgggagaagtatgcgcggctcgcctaccaccgcttcccgcggatcacatcccagtacctgggtcatccgcgggcggatactgcacctccggaagagggccttccagacttccaccctcctccactgccccaggaagacccctactgcctggatgatgcaccccccaacctggattacttggtccacatgcaggggggcatcctctttgtgtatgataacaagaagatgctggagcaccaggagccgcacagcctaccctaccccgacctggagacctacacggtggacatgagccacatcctggctctcatcaccgatggccccacgaaaacctattgtcaccggcgactgaactttctggaatccaagttcagccttcatgagatgttaaacgaaatgtccgagttcaaagagttgaagagtaacccccaccgggacttctataacgtgagaaaggtggacacacacatccatgcggccgcctgcatgaaccaaaagcatctgctgcgcttcatcaagcacacataccagacggagcctgacaggactgtggcagagaagcggggccggaagatcaccctgcggcaggtgtttgacggcctgcacatggacccctacgacctcactgtggactcactggatgtccacgcgggccggcagacattccaccgctttgacaagttcaactccaaatacaaccctgtgggggccagtgagctgcgtgacctgtatttgaaaactgaaaactatctgggaggagagtactttgctcggatggtcaaggaggttgcccgggagctggaggagagcaagtaccagtactcagagccacggctctccatctacggccgcagtcctgaggagtggcccaacctggcctactggttcatccagcacaaggtctactctcccaacatgcgctggatcatccaggtgccccggatttatgacatatttaggtcaaagaagctgctgccaaactttgggaagatgctggagaacatcttcctgccccttttcaaggccactatcaacccccaagatcatcgagagcttcacctcttccttaaatatgtgacggggtttgacagcgtggatgatgagtccaagcacagcgaccacatgttttccgacaagagcccaaacccggacgtctggaccagtgagcagaacccaccctacagctactacctgtactacatgtatgccaacatcatggtgctcaacaacctccgcagggagcgcggcctgagcacgttcctgttccggccgcactgtggggaagccggctccatcacccacctggtgtctgccttcctcactgctgacaacatttcccacgggctgctcctcaagaagagtccggtattgcagtatctctactaccttgctcagatccccattgccatgtctcctcttagcaacaacagtttgttcctcgaatattccaagaaccctctgagggaattcctacacaagggactgcatgtttctctttccaccgatgaccccatgcagttccactacacgaaggaagcacttatggaagaatatgccattgcagctcaagtgtggaagctgagcacctgcgacctgtgtgagatcgccaggaacagcgtgctgcagagcggcctctcgcatcaggaaaagcaaaagtttctgggacaaaattattataaagaaggacctgaaggaaatgatattcgaaagacaaatgtggctcagatccggatggcattccgatatgagaccttatgcaatgagctcagcttcctgtctgatgctatgaaatcagaagagatcaccgccttgaccaactaggtccagcatttgacatgcattttaactttttggttcaatttcaagtctgctgtggctaatagtggtcaagattccgaactaggactttcctctgtgaagaggatgcctctgaagaaattttaaactggtgattttggttgcactgctcactttaagagttaacatgctcacttgttagtatttctgagtaacaagatggtgacttctccttggggatctgggagctgagcacttgtctatacttgttcctaattttccaagtatttctcttgaaactgccagtgcctgaactgttggggccaggattttccctggtcagatgccaagtaacatgtggttttctgccatacttttctccattggcccaggtaggctaattggtagttgttcatttcagcctctggatggctggctgccttaaacacaatcaatttcaaagctccatttcataaaggggctactttgaaggagttaagatggaagacttccttcttgacaaattgtgtttttagtgaatttcttaaaccgttttatttagccctccttccctctttctagttggaagccaaatgtactcatgaaaacagccactcctattctgagtcttggtttcttcacctagaaagtgagggtttggactagatgagtggctttcagggtgttctgtgaatctcctcatgaatactttagggtgggggagggaagggagtgagtgatgctcaggggctgtcaaagtgactgcgttcatcagttttacactggggctgctacataatattttcatttgaacgaagaacttcaaaaagcacaggactagatgatctctgttccttttggctctaatatgctacaactgtaggccaattatcactttaccaattaagagttaggccagataagtgaaatttaacttaagggcacacagctaataagtaataggcctaaactggatttccttattccaaatcctgtcttttccccactattccattagaccccacaaatgttagttgtgtgtgtgtgtgtgtgtgtttttaatcactgtaaccgggtgcatttttttaaggcaaaatttctcccttatctactgtgatgacttcagaagatacaatggtcccaggggccaagtagaaagcatttttaaagattaatctgaattaagctttatcagtgtactctttatctgtgttactagtgcctggtatgtagtaggtgctcaataaatgcatattgaata

SEQ ID NO: 447699 - DNA, 4104 bp, Homo sapiens
tgtcagcttgctgcctgctgcggactattctagaggccccgggacgagcgcagggctcagaagtgggagctactcatctaccacctatgtacgacactgctgagatgccgcggcagtttcccaagctgaacatctctgaagtggatgagcaagtccggctcctggcggagaaggtgtttgctaaagtgctccgagaagaggacagcaaagatgccctgtccctgttcactgtcccagaggactgccccatcgggcaaaaggaagccaaggagagggagctgcagaaggagctggcagagcagaagtctgtggagaccgcaaaaagaaagaaaagtttcaagatgattcggtcccagtccctgtctctgcaaatgccgccacagcaagattggaagggccccccggcagccagtccggccatgtctcccacaacccctgtggtcactggagccacttccctgcccacgccagcaccctatgccatgcctgagttccagcgggtcaccatcagcggagattactgtgccgggatcactttggaggactatgagcaggcagccaagagtctggccaaggccctaatgatccgggagaagtatgcgcggctcgcctaccaccgcttcccgcggatcacatcccagtacctgggtcatccgcgggcggatactgcacctccggaagagggccttccagacttccaccctcctccactgccccaggaagacccctactgcctggatgatgcaccccccaacctggattacttggtccacatgcaggggggcatcctctttgtgtatgataacaagaagatgctggagcaccaggagccgcacagcctaccctaccccgacctggagacctacacggtggacatgagccacatcctggctctcatcaccgatggccccacgaaaacctattgtcaccggcgactgaactttctggaatccaagttcagccttcatgagatgttaaacgaaatgtccgagttcaaagagttgaagagtaacccccaccgggacttctataacgtgagaaaggtggacacacacatccatgcggccgcctgcatgaaccaaaagcatctgctgcgcttcatcaagcacacataccagacggagcctgacaggactgtggcagagaagcggggccggaagatcaccctgcggcaggtgtttgacggcctgcacatggacccctacgacctcactgtggactcactggatgtccacgcgggccggcagacattccaccgctttgacaagttcaactccaaatacaaccctgtgggggccagtgagctgcgtgacctgtatttgaaaactgaaaactatctgggaggagagtactttgctcggatggtcaaggaggttgcccgggagctggaggagagcaagtaccagtactcagagccacggctctccatctacggccgcagtcctgaggagtggcccaacctggcctactggttcatccagcacaaggtctactctcccaacatgcgctggatcatccaggtgccccggatttatgacatatttaggtcaaagaagctgctgccaaactttgggaagatgctggagaacatcttcctgccccttttcaaggccactatcaacccccaagatcatcgagagcttcacctcttccttaaatatgtgacggggtttgacagcgtggatgatgagtccaagcacagcgaccacatgttttccgacaagagcccaaacccggacgtctggaccagtgagcagaacccaccctacagctactacctgtactacatgtatgccaacatcatggtgctcaacaacctccgcagggagcgcggcctgagcacgttcctgttccggccgcactgtggggaagccggctccatcacccacctggtgtctgccttcctcactgctgacaacatttcccacgggctgctcctcaagaagagtccggtattgcagtatctctactaccttgctcagatccccattgccatgtctcctcttagcaacaacagtttgttcctcgaatattccaagaaccctctgagggaattcctacacaagggactgcatgtttctctttccaccgatgaccccatgcagttccactacacgaaggaagcacttatggaagaatatgccattgcagctcaagtgtggaagctgagcacctgcgacctgtgtgagatcgccaggaacagcgtgctgcagagcggcctctcgcatcaggaaaagcaaaagtttctgggacaaaattattataaagaaggacctgaaggaaatgatattcgaaagacaaatgtggctcagatccggatggcattccgatatgagaccttatgcaatgagctcagcttcctgtctgatgctatgaaatcagaagagatcaccgccttgaccaactaggtccagcatttgacatgcattttaactttttggttcaatttcaagtctgctgtggctaatagtggtcaagattccgaactaggactttcctctgtgaagaggatgcctctgaagaaattttaaactggtgattttggttgcactgctcactttaagagttaacatgctcacttgttagtatttctgagtaacaagatggtgacttctccttggggatctgggagctgagcacttgtctatacttgttcctaattttccaagtatttctcttgaaactgccagtgcctgaactgttggggccaggattttccctggtcagatgccaagtaacatgtggttttctgccatacttttctccattggcccaggtaggctaattggtagttgttcatttcagcctctggatggctggctgccttaaacacaatcaatttcaaagctccatttcataaaggggctactttgaaggagttaagatggaagacttccttcttgacaaattgtgtttttagtgaatttcttaaaccgttttatttagccctccttccctctttctagttggaagccaaatgtactcatgaaaacagccactcctattctgagtcttggtttcttcacctagaaagtgagggtttggactagatgagtggctttcagggtgttctgtgaatctcctcatgaatactttagggtgggggagggaagggagtgagtgatgctcaggggctgtcaaagtgactgcgttcatcagttttacactggggctgctacataatattttcatttgaacgaagaacttcaaaaagcacaggactagatgatctctgttccttttggctctaatatgctacaactgtaggccaattatcactttaccaattaagagttaggccagataagtgaaatttaacttaagggcacacagctaataagtaataggcctaaactggatttccttattccaaatcctgtcttttccccactattccattagaccccacaaatgttagttgtgtgtgtgtgtgtgtgtgtttttaatcactgtaaccgggtgcatttttttaaggcaaaatttctcccttatctactgtgatgacttcagaagatacaatggtcccaggggccaagtagaaagcatttttaaagattaatctgaattaagctttatcagtgtactctttatctgtgttactagtgcctggtatgtagtaggtgctcaataaatgcatattgaataactaagtgaatttcttttggcaactttttaaggacatgtgctcttagtacttaagaggctgctcaaggaccttcctatctatttctgtggtcaaattcagactacaggaggtctttttgaatcattatagttagaagaagaatccagtttctgcctgtgaacttatttgactttagattgtctcatcttgtgactttataatgcctgtcccctccactggtcaattcagcatatggaagtataaatgcagtctttttactaggcagatatatatgctatcttacagctaattatgaaattgaatgaaaatccattgttatcttagggattagttttgaaaagcccccatttatatacatttgccctaacataggaagtattgtgtagtttctcattgtcattttatctgtatcaagtatctttttttaaattgttaaataaagtcagctaggactgtgg

SEQ ID NO: 447700 - DNA, 4530 bp, Homo sapiens
  misc_feature (31)..(31): n is a, c, g, or t
cccctgctgctctcaagtttcccgttggcgncgcggcccgggcgcttcaggtagcctctcggctctctctgctccgctccgcgcccaggtagggcaccgacgggggctgcacgcggctggccggcttcctccctgctgaggcggccctccctcctcccgcggggccctcctggccggggatccgcagcgctgcgccctctgaacgcccggcccccgcgcctgctgcggggcggggcctggccgggccctggccccggcgggcctcagtgccagcagccccgctccgctctgcccagcgcgtcccctttgctccagccctgcggccgtccctttcggccggcggcatggccctgtcgtccgaacccgctgagatgccgcggcagtttcccaagctgaacatctctgaagtggatgagcaagtccggctcctggcggagaaggtgtttgctaaagtgctccgagaagaggacagcaaagatgccctgtccctgttcactgtcccagaggactgccccatcgggcaaaaggaagccaaggagagggagctgcagaaggagctggcagagcagaagtctgtggagaccgcaaaaagaaagaaaagtttcaagatgattcggtcccagtccctgtctctgcaaatgccgccacagcaagattggaagggccccccggcagccagtccggccatgtctcccacaacccctgtggtcactggagccacttccctgcccacgccagcaccctatgccatgcctgagttccagcgggtcaccatcagcggagattactgtgccgggatcactttggaggactatgagcaggcagccaagagtctggccaaggccctaatgatccgggagaagtatgcgcggctcgcctaccaccgcttcccgcggatcacatcccagtacctgggtcatccgcgggcggatactgcacctccggaagagggccttccagacttccaccctcctccactgccccaggaagacccctactgcctggatgatgcaccccccaacctggattacttggtccacatgcaggggggcatcctctttgtgtatgataacaagaagatgctggagcaccaggagccgcacagcctaccctaccccgacctggagacctacacggtggacatgagccacatcctggctctcatcaccgatggccccacgaaaacctattgtcaccggcgactgaactttctggaatccaagttcagccttcatgagatgttaaacgaaatgtccgagttcaaagagttgaagagtaacccccaccgggacttctataacgtgagaaaggtggacacacacatccatgcggccgcctgcatgaaccaaaagcatctgctgcgcttcatcaagcacacataccagacggagcctgacaggactgtggcagagaagcggggccggaagatcaccctgcggcaggtgtttgacggcctgcacatggacccctacgacctcactgtggactcactggatgtccacgcggtgagtgagcttctgctccagtgccgccagcagacagcagccctggctggggactcagccccctggaaagccaccatgattgtgcttgccgggaggtgctacggaagcagctttctcttctatctgactgagaggtcatgcggcctcagagaataacagggccggcagacattccaccgctttgacaagttcaactccaaatacaaccctgtgggggccagtgagctgcgtgacctgtatttgaaaactgaaaactatctgggaggagagtactttgctcggatggtcaaggaggttgcccgggagctggaggagagcaagtaccagtactcagagccacggctctccatctacggccgcagtcctgaggagtggcccaacctggcctactggttcatccagcacaaggtctactctcccaacatgcgctggatcatccaggtgccccggatttatgacatatttaggtcaaagaagctgctgccaaactttgggaagatgctggagaacatcttcctgccccttttcaaggccactatcaacccccaagatcatcgagagcttcacctcttccttaaatatgtgacggggtttgacagcgtggatgatgagtccaagcacagcgaccacatgttttccgacaagagcccaaacccggacgtctggaccagtgagcagaacccaccctacagctactacctgtactacatgtatgccaacatcatggtgctcaacaacctccgcagggagcgcggcctgagcacgttcctgttccggccgcactgtggggaagccggctccatcacccacctggtgtctgccttcctcactgctgacaacatttcccacgggctgctcctcaagaagagtccggtattgcagtatctctactaccttgctcagatccccattgccatgtctcctcttagcaacaacagtttgttcctcgaatattccaagaaccctctgagggaattcctacacaagggactgcatgtttctctttccaccgatgaccccatgcagttccactacacgaaggaagcacttatggaagaatatgccattgcagctcaagtgtggaagctgagcacctgcgacctgtgtgagatcgccaggaacagcgtgctgcagagcggcctctcgcatcaggaaaagcaaaagtttctgggacaaaattattataaagaaggacctgaaggaaatgatattcgaaagacaaatgtggctcagatccggatggcattccgatatgagaccttatgcaatgagctcagcttcctgtctgatgctatgaaatcagaagagatcaccgccttgaccaactaggtccagcatttgacatgcattttaactttttggttcaatttcaagtctgctgtggctaatagtggtcaagattccgaactaggactttcctctgtgaagaggatgcctctgaagaaattttaaactggtgattttggttgcactgctcactttaagagttaacatgctcacttgttagtatttctgagtaacaagatggtgacttctccttggggatctgggagctgagcacttgtctatacttgttcctaattttccaagtatttctcttgaaactgccagtgcctgaactgttggggccaggattttccctggtcagatgccaagtaacatgtggttttctgccatacttttctccattggcccaggtaggctaattggtagttgttcatttcagcctctggatggctggctgccttaaacacaatcaatttcaaagctccatttcataaaggggctactttgaaggagttaagatggaagacttccttcttgacaaattgtgtttttagtgaatttcttaaaccgttttatttagccctccttccctctttctagttggaagccaaatgtactcatgaaaacagccactcctattctgagtcttggtttcttcacctagaaagtgagggtttggactagatgagtggctttcagggtgttctgtgaatctcctcatgaatactttagggtgggggagggaagggagtgagtgatgctcaggggctgtcaaagtgactgcgttcatcagttttacactggggctgctacataatattttcatttgaacgaagaacttcaaaaagcacaggactagatgatctctgttccttttggctctaatatgctacaactgtaggccaattatcactttaccaattaagagttaggccagataagtgaaatttaacttaagggcacacagctaataagtaataggcctaaactggatttccttattccaaatcctgtcttttccccactattccattagaccccacaaatgttagttgtgtgtgtgtgtgtgtgtgtttttaatcactgtaaccgggtgcatttttttaaggcaaaatttctcccttatctactgtgatgacttcagaagatacaatggtcccaggggccaagtagaaagcatttttaaagattaatctgaattaagctttatcagtgtactctttatctgtgttactagtgcctggtatgtagtaggtgctcaataaatgcatattgaataactaagtgaatttcttttggcaactttttaaggacatgtgctcttagtacttaagaggctgctcaaggaccttcctatctatttctgtggtcaaattcagactacaggaggtctttttgaatcattatagttagaagaagaatccagtttctgcctgtgaacttatttgactttagattgtctcatcttgtgactttataatgcctgtcccctccactggtcaattcagcatatggaagtataaatgcagtctttttactaggcagatatatatgctatcttacagctaattatgaaattgaatgaaaatccattgttatcttagggattagttttgaaaagcccccatttatatacatttgccctaacataggaagtattgtgtagtttctcattgtcattttatctgtatcaagtatctttttttaaattgttaaataaagtcagctaggactgtgg

SEQ ID NO: 447701 - DNA, 4400 bp, Homo sapiens
  misc_feature (31)..(31): n is a, c, g, or t
cccctgctgctctcaagtttcccgttggcgncgcggcccgggcgcttcaggtagcctctcggctctctctgctccgctccgcgcccaggtagggcaccgacgggggctgcacgcggctggccggcttcctccctgctgaggcggccctccctcctcccgcggggccctcctggccggggatccgcagcgctgcgccctctgaacgcccggcccccgcgcctgctgcggggcggggcctggccgggccctggccccggcgggcctcagtgccagcagccccgctccgctctgcccagcgcgtcccctttgctccagccctgcggccgtccctttcggccggcggcatggccctgtcgtccgaacccgctgagatgccgcggcagtttcccaagctgaacatctctgaagtggatgagcaagtccggctcctggcggagaaggtgtttgctaaagtgctccgagaagaggacagcaaagatgccctgtccctgttcactgtcccagaggactgccccatcgggcaaaaggaagccaaggagagggagctgcagaaggagctggcagagcagaagtctgtggagaccgcaaaaagaaagaaaagtttcaagatgattcggtcccagtccctgtctctgcaaatgccgccacagcaagattggaagggccccccggcagccagtccggccatgtctcccacaacccctgtggtcactggagccacttccctgcccacgccagcaccctatgccatgcctgagttccagcgggtcaccatcagcggagattactgtgccgggatcactttggaggactatgagcaggcagccaagagtctggccaaggccctaatgatccgggagaagtatgcgcggctcgcctaccaccgcttcccgcggatcacatcccagtacctgggtcatccgcgggcggatactgcacctccggaagagggccttccagacttccaccctcctccactgccccaggaagacccctactgcctggatgatgcaccccccaacctggattacttggtccacatgcaggggggcatcctctttgtgtatgataacaagaagatgctggagcaccaggagccgcacagcctaccctaccccgacctggagacctacacggtggacatgagccacatcctggctctcatcaccgatggccccacgtggacacacacatccatgcggccgcctgcatgaaccaaaagcatctgctgcgcttcatcaagcacacataccagacggagcctgacaggactgtggcagagaagcggggccggaagatcaccctgcggcaggtgtttgacggcctgcacatggacccctacgacctcactgtggactcactggatgtccacgcggtgagtgagcttctgctccagtgccgccagcagacagcagccctggctggggactcagccccctggaaagccaccatgattgtgcttgccgggaggtgctacggaagcagctttctcttctatctgactgagaggtcatgcggcctcagagaataacagggccggcagacattccaccgctttgacaagttcaactccaaatacaaccctgtgggggccagtgagctgcgtgacctgtatttgaaaactgaaaactatctgggaggagagtactttgctcggatggtcaaggaggttgcccgggagctggaggagagcaagtaccagtactcagagccacggctctccatctacggccgcagtcctgaggagtggcccaacctggcctactggttcatccagcacaaggtctactctcccaacatgcgctggatcatccaggtgccccggatttatgacatatttaggtcaaagaagctgctgccaaactttgggaagatgctggagaacatcttcctgccccttttcaaggccactatcaacccccaagatcatcgagagcttcacctcttccttaaatatgtgacggggtttgacagcgtggatgatgagtccaagcacagcgaccacatgttttccgacaagagcccaaacccggacgtctggaccagtgagcagaacccaccctacagctactacctgtactacatgtatgccaacatcatggtgctcaacaacctccgcagggagcgcggcctgagcacgttcctgttccggccgcactgtggggaagccggctccatcacccacctggtgtctgccttcctcactgctgacaacatttcccacgggctgctcctcaagaagagtccggtattgcagtatctctactaccttgctcagatccccattgccatgtctcctcttagcaacaacagtttgttcctcgaatattccaagaaccctctgagggaattcctacacaagggactgcatgtttctctttccaccgatgaccccatgcagttccactacacgaaggaagcacttatggaagaatatgccattgcagctcaagtgtggaagctgagcacctgcgacctgtgtgagatcgccaggaacagcgtgctgcagagcggcctctcgcatcaggaaaagcaaaagtttctgggacaaaattattataaagaaggacctgaaggaaatgatattcgaaagacaaatgtggctcagatccggatggcattccgatatgagaccttatgcaatgagctcagcttcctgtctgatgctatgaaatcagaagagatcaccgccttgaccaactaggtccagcatttgacatgcattttaactttttggttcaatttcaagtctgctgtggctaatagtggtcaagattccgaactaggactttcctctgtgaagaggatgcctctgaagaaattttaaactggtgattttggttgcactgctcactttaagagttaacatgctcacttgttagtatttctgagtaacaagatggtgacttctccttggggatctgggagctgagcacttgtctatacttgttcctaattttccaagtatttctcttgaaactgccagtgcctgaactgttggggccaggattttccctggtcagatgccaagtaacatgtggttttctgccatacttttctccattggcccaggtaggctaattggtagttgttcatttcagcctctggatggctggctgccttaaacacaatcaatttcaaagctccatttcataaaggggctactttgaaggagttaagatggaagacttccttcttgacaaattgtgtttttagtgaatttcttaaaccgttttatttagccctccttccctctttctagttggaagccaaatgtactcatgaaaacagccactcctattctgagtcttggtttcttcacctagaaagtgagggtttggactagatgagtggctttcagggtgttctgtgaatctcctcatgaatactttagggtgggggagggaagggagtgagtgatgctcaggggctgtcaaagtgactgcgttcatcagttttacactggggctgctacataatattttcatttgaacgaagaacttcaaaaagcacaggactagatgatctctgttccttttggctctaatatgctacaactgtaggccaattatcactttaccaattaagagttaggccagataagtgaaatttaacttaagggcacacagctaataagtaataggcctaaactggatttccttattccaaatcctgtcttttccccactattccattagaccccacaaatgttagttgtgtgtgtgtgtgtgtgtgtttttaatcactgtaaccgggtgcatttttttaaggcaaaatttctcccttatctactgtgatgacttcagaagatacaatggtcccaggggccaagtagaaagcatttttaaagattaatctgaattaagctttatcagtgtactctttatctgtgttactagtgcctggtatgtagtaggtgctcaataaatgcatattgaataactaagtgaatttcttttggcaactttttaaggacatgtgctcttagtacttaagaggctgctcaaggaccttcctatctatttctgtggtcaaattcagactacaggaggtctttttgaatcattatagttagaagaagaatccagtttctgcctgtgaacttatttgactttagattgtctcatcttgtgactttataatgcctgtcccctccactggtcaattcagcatatggaagtataaatgcagtctttttactaggcagatatatatgctatcttacagctaattatgaaattgaatgaaaatccattgttatcttagggattagttttgaaaagcccccatttatatacatttgccctaacataggaagtattgtgtagtttctcattgtcattttatctgtatcaagtatctttttttaaattgttaaataaagtcagctaggactgtgg

SEQ ID NO: 447702 - DNA, 2591 bp, Homo sapiens
acgcattttgcacccgaggctgtgggagatgcagtgatggagtcttgctctgtcacccaggctggtgcgatctcggctcactgcaacctccacctccggggttcaagtgattcttctgccttagcctcctgagtagctgagattacaggtgacggggtttgacagcgtggatgatgagtccaagcacagcgaccacatgttttccgacaagagcccaaacccggacgtctggaccagtgagcagaacccaccctacagctactacctgtactacatgtatgccaacatcatggtgctcaacaacctccgcagggagcgcggcctgagcacgttcctgttccggccgcactgtggggaagccggctccatcacccacctggtgtctgccttcctcactgctgacaacatttcccacgggctgctcctcaagaagagtccggtattgcagtatctctactaccttgctcagatccccattgccatgtctcctcttagcaacaacagtttgttcctcgaatattccaagaaccctctgagggaattcctacacaagggactgcatgtttctctttccaccgatgaccccatgcagttccactacacgaaggaagcacttatggaagaatatgccattgcagctcaagtgtggaagctgagcacctgcgacctgtgtgagatcgccaggaacagcgtgctgcagagcggcctctcgcatcaggaaaagcaaaagtttctgggacaaaattattataaagaaggacctgaaggaaatgatattcgaaagacaaatgtggctcagatccggatggcattccgatatgagaccttatgcaatgagctcagcttcctgtctgatgctatgaaatcagaagagatcaccgccttgaccaactaggtccagcatttgacatgcattttaactttttggttcaatttcaagtctgctgtggctaatagtggtcaagattccgaactaggactttcctctgtgaagaggatgcctctgaagaaattttaaactggtgattttggttgcactgctcactttaagagttaacatgctcacttgttagtatttctgagtaacaagatggtgacttctccttggggatctgggagctgagcacttgtctatacttgttcctaattttccaagtatttctcttgaaactgccagtgcctgaactgttggggccaggattttccctggtcagatgccaagtaacatgtggttttctgccatacttttctccattggcccaggtaggctaattggtagttgttcatttcagcctctggatggctggctgccttaaacacaatcaatttcaaagctccatttcataaaggggctactttgaaggagttaagatggaagacttccttcttgacaaattgtgtttttagtgaatttcttaaaccgttttatttagccctccttccctctttctagttggaagccaaatgtactcatgaaaacagccactcctattctgagtcttggtttcttcacctagaaagtgagggtttggactagatgagtggctttcagggtgttctgtgaatctcctcatgaatactttagggtgggggagggaagggagtgagtgatgctcaggggctgtcaaagtgactgcgttcatcagttttacactggggctgctacataatattttcatttgaacgaagaacttcaaaaagcacaggactagatgatctctgttccttttggctctaatatgctacaactgtaggccaattatcactttaccaattaagagttaggccagataagtgaaatttaacttaagggcacacagctaataagtaataggcctaaactggatttccttattccaaatcctgtcttttccccactattccattagaccccacaaatgttagttgtgtgtgtgtgtgtgtgtgtttttaatcactgtaaccgggtgcatttttttaaggcaaaatttctcccttatctactgtgatgacttcagaagatacaatggtcccaggggccaagtagaaagcatttttaaagattaatctgaattaagctttatcagtgtactctttatctgtgttactagtgcctggtatgtagtaggtgctcaataaatgcatattgaataactaagtgaatttcttttggcaactttttaaggacatgtgctcttagtacttaagaggctgctcaaggaccttcctatctatttctgtggtcaaattcagactacaggaggtctttttgaatcattatagttagaagaagaatccagtttctgcctgtgaacttatttgactttagattgtctcatcttgtgactttataatgcctgtcccctccactggtcaattcagcatatggaagtataaatgcagtctttttactaggcagatatatatgctatcttacagctaattatgaaattgaatgaaaatccattgttatcttagggattagttttgaaaagcccccatttatatacatttgccctaacataggaagtattgtgtagtttctcattgtcattttatctgtatcaagtatctttttttaaattgttaaataaagtcagctaggactgtgg

SEQ ID NO: 447703 - DNA, 2293 bp, Homo sapiens
gactagagggcttgtcacaggagagcagagactgccatccctgatgactggcacagggtttcaacatgaggtctcagtgctggtcaatgaataaatgtagaggcgtgattttagatctctctttgataacccatgattttacagaagaaaagatcttaggctttgaaggtgtgatgtttgatgatccaggtgccatttagtgaggaaaagttaaacccgcagtgtctgatgttgttagctttggacatgtgtgaacgattgacatggatatccccccttctaatccacatgctttgggggaggatctaggaagcacttatggaagaatatgccattgcagctcaagtgtggaagctgagcacctgcgacctgtgtgagatcgccaggaacagcgtgctgcagagcggcctctcgcatcaggaaaagcaaaagtttctgggacaaaattattataaagaaggacctgaaggaaatgatattcgaaagacaaatgtggctcagatccggatggcattccgatatgagaccttatgcaatgagctcagcttcctgtctgatgctatgaaatcagaagagatcaccgccttgaccaactaggtccagcatttgacatgcattttaactttttggttcaatttcaagtctgctgtggctaatagtggtcaagattccgaactaggactttcctctgtgaagaggatgcctctgaagaaattttaaactggtgattttggttgcactgctcactttaagagttaacatgctcacttgttagtatttctgagtaacaagatggtgacttctccttggggatctgggagctgagcacttgtctatacttgttcctaattttccaagtatttctcttgaaactgccagtgcctgaactgttggggccaggattttccctggtcagatgccaagtaacatgtggttttctgccatacttttctccattggcccaggtaggctaattggtagttgttcatttcagcctctggatggctggctgccttaaacacaatcaatttcaaagctccatttcataaaggggctactttgaaggagttaagatggaagacttccttcttgacaaattgtgtttttagtgaatttcttaaaccgttttatttagccctccttccctctttctagttggaagccaaatgtactcatgaaaacagccactcctattctgagtcttggtttcttcacctagaaagtgagggtttggactagatgagtggctttcagggtgttctgtgaatctcctcatgaatactttagggtgggggagggaagggagtgagtgatgctcaggggctgtcaaagtgactgcgttcatcagttttacactggggctgctacataatattttcatttgaacgaagaacttcaaaaagcacaggactagatgatctctgttccttttggctctaatatgctacaactgtaggccaattatcactttaccaattaagagttaggccagataagtgaaatttaacttaagggcacacagctaataagtaataggcctaaactggatttccttattccaaatcctgtcttttccccactattccattagaccccacaaatgttagttgtgtgtgtgtgtgtgtgtgtttttaatcactgtaaccgggtgcatttttttaaggcaaaatttctcccttatctactgtgatgacttcagaagatacaatggtcccaggggccaagtagaaagcatttttaaagattaatctgaattaagctttatcagtgtactctttatctgtgttactagtgcctggtatgtagtaggtgctcaataaatgcatattgaataactaagtgaatttcttttggcaactttttaaggacatgtgctcttagtacttaagaggctgctcaaggaccttcctatctatttctgtggtcaaattcagactacaggaggtctttttgaatcattatagttagaagaagaatccagtttctgcctgtgaacttatttgactttagattgtctcatcttgtgactttataatgcctgtcccctccactggtcaattcagcatatggaagtataaatgcagtctttttactaggcagatatatatgctatcttacagctaattatgaaattgaatgaaaatccattgttatcttagggattagttttgaaaagcccccatttatatacatttgccctaacataggaagtattgtgtagtttctcattgtcattttatctgtatcaagtatctttttttaaattgttaaataaagtcagctaggactgtgg

SEQ ID NO: 447704 - DNA, 815 bp, Homo sapiens
ttcagggctcttggaaattttccactcatatttcatattcacgagagaatttccagcccaggcttttcctgctctggctcactgctgctcacagatatgcaaaacagagacctcctactccagccggcagacaggacccagccagctgcacgcacgcactgactcagctgagcctcctgggtggcaggcagcacctcacccgggtgcatcacttgagtggcatcttcaggaccagtcatggagccaggctcaggtctgtgtcggggcttctgcaaggggagtctggcaagagtaggaaccagcttccttcgtataacgaggggatttcagtggcactgggcttcctttctggagggactgtggcaccatgaaaagttactgtttgttgaaactggcagtgttttagaactttctaactttgggacacttcttcaagttcatcagagcgtgttgcatgtaacagtgagataagctgtatcattggctgactgatgctggtgaattcacagctaagcctcccaagcctgctggcttcagctgacaaagggttggaagccaggcgtgaacatgcagctggagctgaagctctgcttggcatctgcagagtgagctttccttgtcaggcctggcctggcaggtgtctggagggtctgagaggagagacactctggagggacgggttggcaggtgggagctgtctgccaaggacatccagaaggcagcagatgtgggggcagctgctaaggcctgcagcaccccaagtgggttacttggtccatactaagatatggaattaattattttgttgtggttgc

SEQ ID NO: 447705 - DNA, 190 bp, Homo sapiens
cagaacccaccctacagctactacctgtactacatgtatgccaacatcatggtgctcaacaacctccgcaggtgcgtgaggcctgccctcgcacatgcttgggttcatgtgttagtacatgcacgcatgcacacacatgcacacacacatgcatgtgatccttgtgtccgtgtgcacctgaaccaacatg

SEQ ID NO: 447706 - DNA, 384 bp, Homo sapiens
tgtttgtttgttttttgttttttttagatggagtcttgctctgtcacccaggctggtgcgatctcggctcactgcaacctccacctccggggttcaagtgattcttctgccttagcctcctgagtagctgagattacaggtgcacgccaccatgcccagctaatttttgtatttttttttactagagacggagtttcaccatgttgggcaggctggcctcgaactcctgacctcgtgatctgcccgtctcctcctcccaaagtgctaggattacaggcatgagccatcatgtctggccaaacctggtttcttgagcaactttcttaattgctttggccctggtttgctcaattgtaaaatggggctggcagccaacccctccct

SEQ ID NO: 447707 - DNA, 4313 bp, Homo sapiens
gagctcttctccccaggatttcaacagcaccacagaaatagccattttgctcatggttatttcccaggaccacaggatttgcctaagtcactgggaggctatgtgtctgttctgagccttcccactctcctaaagggcagatgaagatcagagctttgcaccctgtgatgccattttaatcaaccctgcttggttttagaggattgctcccgtgggtcacttgaggcaggctccaccttccccaggaggagtggcagagtccagccagcgctcggagctggaggcccacgtgggagcagtgagcggctctgagatgccgcggcagtttcccaagctgaacatctctgaagtggatgagcaagtccggctcctggcggagaaggtgtttgctaaagtgctccgagaagaggacagcaaagatgccctgtccctgttcactgtcccagaggactgccccatcgggcaaaaggaagccaaggagagggagctgcagaaggagctggcagagcagaagtctgtggagaccgcaaaaagaaagaaaagtttcaagatgattcggtcccagtccctgtctctgcaaatgccgccacagcaagattggaagggccccccggcagccagtccggccatgtctcccacaacccctgtggtcactggagccacttccctgcccacgccagcaccctatgccatgcctgagttccagcgggtcaccatcagcggagattactgtgccgggatcactttggaggactatgagcaggcagccaagagtctggccaaggccctaatgatccgggagaagtatgcgcggctcgcctaccaccgcttcccgcggatcacatcccagtacctgggtcatccgcgggcggatactgcacctccggaagagggccttccagacttccaccctcctccactgccccaggaagacccctactgcctggatgatgcaccccccaacctggattacttggtccacatgcaggggggcatcctctttgtgtatgataacaagaagatgctggagcaccaggagccgcacagcctaccctaccccgacctggagacctacacggtggacatgagccacatcctggctctcatcaccgatggccccacgaaaacctattgtcaccggcgactgaactttctggaatccaagttcagccttcatgagatgttaaacgaaatgtccgagttcaaagagttgaagagtaacccccaccgggacttctataacgtgagaaaggtggacacacacatccatgcggccgcctgcatgaaccaaaagcatctgctgcgcttcatcaagcacacataccagacggagcctgacaggactgtggcagagaagcggggccggaagatcaccctgcggcaggtgtttgacggcctgcacatggacccctacgacctcactgtggactcactggatgtccacgcgggccggcagacattccaccgctttgacaagttcaactccaaatacaaccctgtgggggccagtgagctgcgtgacctgtatttgaaaactgaaaactatctgggaggagagtactttgctcggatggtcaaggaggttgcccgggagctggaggagagcaagtaccagtactcagagccacggctctccatctacggccgcagtcctgaggagtggcccaacctggcctactggttcatccagcacaaggtctactctcccaacatgcgctggatcatccaggtgccccggatttatgacatatttaggtcaaagaagctgctgccaaactttgggaagatgctggagaacatcttcctgccccttttcaaggccactatcaacccccaagatcatcgagagcttcacctcttccttaaatatgtgacggggtttgacagcgtggatgatgagtccaagcacagcgaccacatgttttccgacaagagcccaaacccggacgtctggaccagtgagcagaacccaccctacagctactacctgtactacatgtatgccaacatcatggtgctcaacaacctccgcagggagcgcggcctgagcacgttcctgttccggccgcactgtggggaagccggctccatcacccacctggtgtctgccttcctcactgctgacaacatttcccacgggctgctcctcaagaagagtccggtattgcagtatctctactaccttgctcagatccccattgccatgtctcctcttagcaacaacagtttgttcctcgaatattccaagaaccctctgagggaattcctacacaagggactgcatgtttctctttccaccgatgaccccatgcagttccactacacgaaggaagcacttatggaagaatatgccattgcagctcaagtgtggaagctgagcacctgcgacctgtgtgagatcgccaggaacagcgtgctgcagagcggcctctcgcatcaggaaaagcaaaagtttctgggacaaaattattataaagaaggacctgaaggaaatgatattcgaaagacaaatgtggctcagatccggatggcattccgatatgagaccttatgcaatgagctcagcttcctgtctgatgctatgaaatcagaagagatcaccgccttgaccaactaggtccagcatttgacatgcattttaactttttggttcaatttcaagtctgctgtggctaatagtggtcaagattccgaactaggactttcctctgtgaagaggatgcctctgaagaaattttaaactggtgattttggttgcactgctcactttaagagttaacatgctcacttgttagtatttctgagtaacaagatggtgacttctccttggggatctgggagctgagcacttgtctatacttgttcctaattttccaagtatttctcttgaaactgccagtgcctgaactgttggggccaggattttccctggtcagatgccaagtaacatgtggttttctgccatacttttctccattggcccaggtaggctaattggtagttgttcatttcagcctctggatggctggctgccttaaacacaatcaatttcaaagctccatttcataaaggggctactttgaaggagttaagatggaagacttccttcttgacaaattgtgtttttagtgaatttcttaaaccgttttatttagccctccttccctctttctagttggaagccaaatgtactcatgaaaacagccactcctattctgagtcttggtttcttcacctagaaagtgagggtttggactagatgagtggctttcagggtgttctgtgaatctcctcatgaatactttagggtgggggagggaagggagtgagtgatgctcaggggctgtcaaagtgactgcgttcatcagttttacactggggctgctacataatattttcatttgaacgaagaacttcaaaaagcacaggactagatgatctctgttccttttggctctaatatgctacaactgtaggccaattatcactttaccaattaagagttaggccagataagtgaaatttaacttaagggcacacagctaataagtaataggcctaaactggatttccttattccaaatcctgtcttttccccactattccattagaccccacaaatgttagttgtgtgtgtgtgtgtgtgtgtttttaatcactgtaaccgggtgcatttttttaaggcaaaatttctcccttatctactgtgatgacttcagaagatacaatggtcccaggggccaagtagaaagcatttttaaagattaatctgaattaagctttatcagtgtactctttatctgtgttactagtgcctggtatgtagtaggtgctcaataaatgcatattgaataactaagtgaatttcttttggcaactttttaaggacatgtgctcttagtacttaagaggctgctcaaggaccttcctatctatttctgtggtcaaattcagactacaggaggtctttttgaatcattatagttagaagaagaatccagtttctgcctgtgaacttatttgactttagattgtctcatcttgtgactttataatgcctgtcccctccactggtcaattcagcatatggaagtataaatgcagtctttttactaggcagatatatatgctatcttacagctaattatgaaattgaatgaaaatccattgttatcttagggattagttttgaaaagcccccatttatatacatttgccctaacataggaagtattgtgtagtttctcattgtcattttatctgtatcaagtatctttttttaaattgttaaataaagtcagctaggactgtgg

SEQ ID NO: 447708 - DNA, 4258 bp, Homo sapiens
ttcagggctcttggaaattttccactcatatttcatattcacgagagaatttccagcccaggcttttcctgctctggctcactgctgctcacagatatgcaaaacagagacctcctactccagccggcagacaggacccagccagctgcacgcacgcactgactcagctgagcctcctgggtggcaggcagcacctcacccgggtgcatcacttgagtggcatcttcaggaccagtcatggagccaggctcagctgagatgccgcggcagtttcccaagctgaacatctctgaagtggatgagcaagtccggctcctggcggagaaggtgtttgctaaagtgctccgagaagaggacagcaaagatgccctgtccctgttcactgtcccagaggactgccccatcgggcaaaaggaagccaaggagagggagctgcagaaggagctggcagagcagaagtctgtggagaccgcaaaaagaaagaaaagtttcaagatgattcggtcccagtccctgtctctgcaaatgccgccacagcaagattggaagggccccccggcagccagtccggccatgtctcccacaacccctgtggtcactggagccacttccctgcccacgccagcaccctatgccatgcctgagttccagcgggtcaccatcagcggagattactgtgccgggatcactttggaggactatgagcaggcagccaagagtctggccaaggccctaatgatccgggagaagtatgcgcggctcgcctaccaccgcttcccgcggatcacatcccagtacctgggtcatccgcgggcggatactgcacctccggaagagggccttccagacttccaccctcctccactgccccaggaagacccctactgcctggatgatgcaccccccaacctggattacttggtccacatgcaggggggcatcctctttgtgtatgataacaagaagatgctggagcaccaggagccgcacagcctaccctaccccgacctggagacctacacggtggacatgagccacatcctggctctcatcaccgatggccccacgaaaacctattgtcaccggcgactgaactttctggaatccaagttcagccttcatgagatgttaaacgaaatgtccgagttcaaagagttgaagagtaacccccaccgggacttctataacgtgagaaaggtggacacacacatccatgcggccgcctgcatgaaccaaaagcatctgctgcgcttcatcaagcacacataccagacggagcctgacaggactgtggcagagaagcggggccggaagatcaccctgcggcaggtgtttgacggcctgcacatggacccctacgacctcactgtggactcactggatgtccacgcgggccggcagacattccaccgctttgacaagttcaactccaaatacaaccctgtgggggccagtgagctgcgtgacctgtatttgaaaactgaaaactatctgggaggagagtactttgctcggatggtcaaggaggttgcccgggagctggaggagagcaagtaccagtactcagagccacggctctccatctacggccgcagtcctgaggagtggcccaacctggcctactggttcatccagcacaaggtctactctcccaacatgcgctggatcatccaggtgccccggatttatgacatatttaggtcaaagaagctgctgccaaactttgggaagatgctggagaacatcttcctgccccttttcaaggccactatcaacccccaagatcatcgagagcttcacctcttccttaaatatgtgacggggtttgacagcgtggatgatgagtccaagcacagcgaccacatgttttccgacaagagcccaaacccggacgtctggaccagtgagcagaacccaccctacagctactacctgtactacatgtatgccaacatcatggtgctcaacaacctccgcagggagcgcggcctgagcacgttcctgttccggccgcactgtggggaagccggctccatcacccacctggtgtctgccttcctcactgctgacaacatttcccacgggctgctcctcaagaagagtccggtattgcagtatctctactaccttgctcagatccccattgccatgtctcctcttagcaacaacagtttgttcctcgaatattccaagaaccctctgagggaattcctacacaagggactgcatgtttctctttccaccgatgaccccatgcagttccactacacgaaggaagcacttatggaagaatatgccattgcagctcaagtgtggaagctgagcacctgcgacctgtgtgagatcgccaggaacagcgtgctgcagagcggcctctcgcatcaggaaaagcaaaagtttctgggacaaaattattataaagaaggacctgaaggaaatgatattcgaaagacaaatgtggctcagatccggatggcattccgatatgagaccttatgcaatgagctcagcttcctgtctgatgctatgaaatcagaagagatcaccgccttgaccaactaggtccagcatttgacatgcattttaactttttggttcaatttcaagtctgctgtggctaatagtggtcaagattccgaactaggactttcctctgtgaagaggatgcctctgaagaaattttaaactggtgattttggttgcactgctcactttaagagttaacatgctcacttgttagtatttctgagtaacaagatggtgacttctccttggggatctgggagctgagcacttgtctatacttgttcctaattttccaagtatttctcttgaaactgccagtgcctgaactgttggggccaggattttccctggtcagatgccaagtaacatgtggttttctgccatacttttctccattggcccaggtaggctaattggtagttgttcatttcagcctctggatggctggctgccttaaacacaatcaatttcaaagctccatttcataaaggggctactttgaaggagttaagatggaagacttccttcttgacaaattgtgtttttagtgaatttcttaaaccgttttatttagccctccttccctctttctagttggaagccaaatgtactcatgaaaacagccactcctattctgagtcttggtttcttcacctagaaagtgagggtttggactagatgagtggctttcagggtgttctgtgaatctcctcatgaatactttagggtgggggagggaagggagtgagtgatgctcaggggctgtcaaagtgactgcgttcatcagttttacactggggctgctacataatattttcatttgaacgaagaacttcaaaaagcacaggactagatgatctctgttccttttggctctaatatgctacaactgtaggccaattatcactttaccaattaagagttaggccagataagtgaaatttaacttaagggcacacagctaataagtaataggcctaaactggatttccttattccaaatcctgtcttttccccactattccattagaccccacaaatgttagttgtgtgtgtgtgtgtgtgtgtttttaatcactgtaaccgggtgcatttttttaaggcaaaatttctcccttatctactgtgatgacttcagaagatacaatggtcccaggggccaagtagaaagcatttttaaagattaatctgaattaagctttatcagtgtactctttatctgtgttactagtgcctggtatgtagtaggtgctcaataaatgcatattgaataactaagtgaatttcttttggcaactttttaaggacatgtgctcttagtacttaagaggctgctcaaggaccttcctatctatttctgtggtcaaattcagactacaggaggtctttttgaatcattatagttagaagaagaatccagtttctgcctgtgaacttatttgactttagattgtctcatcttgtgactttataatgcctgtcccctccactggtcaattcagcatatggaagtataaatgcagtctttttactaggcagatatatatgctatcttacagctaattatgaaattgaatgaaaatccattgttatcttagggattagttttgaaaagcccccatttatatacatttgccctaacataggaagtattgtgtagtttctcattgtcattttatctgtatcaagtatctttttttaaattgttaaataaagtcagctaggactgtgg

SEQ ID NO: 447709 - DNA, 4076 bp, Homo sapiens
ggttgaggccagtgactgttagtaaggaatcagtatgcgaggaggtggatagagaaagcttctttgagggactgagatgccgcggcagtttcccaagctgaacatctctgaagtggatgagcaagtccggctcctggcggagaaggtgtttgctaaagtgctccgagaagaggacagcaaagatgccctgtccctgttcactgtcccagaggactgccccatcgggcaaaaggaagccaaggagagggagctgcagaaggagctggcagagcagaagtctgtggagaccgcaaaaagaaagaaaagtttcaagatgattcggtcccagtccctgtctctgcaaatgccgccacagcaagattggaagggccccccggcagccagtccggccatgtctcccacaacccctgtggtcactggagccacttccctgcccacgccagcaccctatgccatgcctgagttccagcgggtcaccatcagcggagattactgtgccgggatcactttggaggactatgagcaggcagccaagagtctggccaaggccctaatgatccgggagaagtatgcgcggctcgcctaccaccgcttcccgcggatcacatcccagtacctgggtcatccgcgggcggatactgcacctccggaagagggccttccagacttccaccctcctccactgccccaggaagacccctactgcctggatgatgcaccccccaacctggattacttggtccacatgcaggggggcatcctctttgtgtatgataacaagaagatgctggagcaccaggagccgcacagcctaccctaccccgacctggagacctacacggtggacatgagccacatcctggctctcatcaccgatggccccacgaaaacctattgtcaccggcgactgaactttctggaatccaagttcagccttcatgagatgttaaacgaaatgtccgagttcaaagagttgaagagtaacccccaccgggacttctataacgtgagaaaggtggacacacacatccatgcggccgcctgcatgaaccaaaagcatctgctgcgcttcatcaagcacacataccagacggagcctgacaggactgtggcagagaagcggggccggaagatcaccctgcggcaggtgtttgacggcctgcacatggacccctacgacctcactgtggactcactggatgtccacgcgggccggcagacattccaccgctttgacaagttcaactccaaatacaaccctgtgggggccagtgagctgcgtgacctgtatttgaaaactgaaaactatctgggaggagagtactttgctcggatggtcaaggaggttgcccgggagctggaggagagcaagtaccagtactcagagccacggctctccatctacggccgcagtcctgaggagtggcccaacctggcctactggttcatccagcacaaggtctactctcccaacatgcgctggatcatccaggtgccccggatttatgacatatttaggtcaaagaagctgctgccaaactttgggaagatgctggagaacatcttcctgccccttttcaaggccactatcaacccccaagatcatcgagagcttcacctcttccttaaatatgtgacggggtttgacagcgtggatgatgagtccaagcacagcgaccacatgttttccgacaagagcccaaacccggacgtctggaccagtgagcagaacccaccctacagctactacctgtactacatgtatgccaacatcatggtgctcaacaacctccgcagggagcgcggcctgagcacgttcctgttccggccgcactgtggggaagccggctccatcacccacctggtgtctgccttcctcactgctgacaacatttcccacgggctgctcctcaagaagagtccggtattgcagtatctctactaccttgctcagatccccattgccatgtctcctcttagcaacaacagtttgttcctcgaatattccaagaaccctctgagggaattcctacacaagggactgcatgtttctctttccaccgatgaccccatgcagttccactacacgaaggaagcacttatggaagaatatgccattgcagctcaagtgtggaagctgagcacctgcgacctgtgtgagatcgccaggaacagcgtgctgcagagcggcctctcgcatcaggaaaagcaaaagtttctgggacaaaattattataaagaaggacctgaaggaaatgatattcgaaagacaaatgtggctcagatccggatggcattccgatatgagaccttatgcaatgagctcagcttcctgtctgatgctatgaaatcagaagagatcaccgccttgaccaactaggtccagcatttgacatgcattttaactttttggttcaatttcaagtctgctgtggctaatagtggtcaagattccgaactaggactttcctctgtgaagaggatgcctctgaagaaattttaaactggtgattttggttgcactgctcactttaagagttaacatgctcacttgttagtatttctgagtaacaagatggtgacttctccttggggatctgggagctgagcacttgtctatacttgttcctaattttccaagtatttctcttgaaactgccagtgcctgaactgttggggccaggattttccctggtcagatgccaagtaacatgtggttttctgccatacttttctccattggcccaggtaggctaattggtagttgttcatttcagcctctggatggctggctgccttaaacacaatcaatttcaaagctccatttcataaaggggctactttgaaggagttaagatggaagacttccttcttgacaaattgtgtttttagtgaatttcttaaaccgttttatttagccctccttccctctttctagttggaagccaaatgtactcatgaaaacagccactcctattctgagtcttggtttcttcacctagaaagtgagggtttggactagatgagtggctttcagggtgttctgtgaatctcctcatgaatactttagggtgggggagggaagggagtgagtgatgctcaggggctgtcaaagtgactgcgttcatcagttttacactggggctgctacataatattttcatttgaacgaagaacttcaaaaagcacaggactagatgatctctgttccttttggctctaatatgctacaactgtaggccaattatcactttaccaattaagagttaggccagataagtgaaatttaacttaagggcacacagctaataagtaataggcctaaactggatttccttattccaaatcctgtcttttccccactattccattagaccccacaaatgttagttgtgtgtgtgtgtgtgtgtgtttttaatcactgtaaccgggtgcatttttttaaggcaaaatttctcccttatctactgtgatgacttcagaagatacaatggtcccaggggccaagtagaaagcatttttaaagattaatctgaattaagctttatcagtgtactctttatctgtgttactagtgcctggtatgtagtaggtgctcaataaatgcatattgaataactaagtgaatttcttttggcaactttttaaggacatgtgctcttagtacttaagaggctgctcaaggaccttcctatctatttctgtggtcaaattcagactacaggaggtctttttgaatcattatagttagaagaagaatccagtttctgcctgtgaacttatttgactttagattgtctcatcttgtgactttataatgcctgtcccctccactggtcaattcagcatatggaagtataaatgcagtctttttactaggcagatatatatgctatcttacagctaattatgaaattgaatgaaaatccattgttatcttagggattagttttgaaaagcccccatttatatacatttgccctaacataggaagtattgtgtagtttctcattgtcattttatctgtatcaagtatctttttttaaattgttaaataaagtcagctaggactgtgg

SEQ ID NO: 447710 - DNA, 3468 bp, Homo sapiens
acctgctctgcgaacatctacggccagtgccagaaccagtgtcagaaggccttgcatacttccaccctcctccactgccccaggaagacccctactgcctggatgatgcaccccccaacctggattacttggtccacatgcaggggggcatcctctttgtgtatgataacaagaagatgctggagcaccaggagccgcacagcctaccctaccccgacctggagacctacacggtggacatgagccacatcctggctctcatcaccgatggccccacgaaaacctattgtcaccggcgactgaactttctggaatccaagttcagccttcatgagatgttaaacgaaatgtccgagttcaaagagttgaagagtaacccccaccgggacttctataacgtgagaaaggtggacacacacatccatgcggccgcctgcatgaaccaaaagcatctgctgcgcttcatcaagcacacataccagacggagcctgacaggactgtggcagagaagcggggccggaagatcaccctgcggcaggtgtttgacggcctgcacatggacccctacgacctcactgtggactcactggatgtccacgcgggccggcagacattccaccgctttgacaagttcaactccaaatacaaccctgtgggggccagtgagctgcgtgacctgtatttgaaaactgaaaactatctgggaggagagtactttgctcggatggtcaaggaggttgcccgggagctggaggagagcaagtaccagtactcagagccacggctctccatctacggccgcagtcctgaggagtggcccaacctggcctactggttcatccagcacaaggtctactctcccaacatgcgctggatcatccaggtgccccggatttatgacatatttaggtcaaagaagctgctgccaaactttgggaagatgctggagaacatcttcctgccccttttcaaggccactatcaacccccaagatcatcgagagcttcacctcttccttaaatatgtgacggggtttgacagcgtggatgatgagtccaagcacagcgaccacatgttttccgacaagagcccaaacccggacgtctggaccagtgagcagaacccaccctacagctactacctgtactacatgtatgccaacatcatggtgctcaacaacctccgcagggagcgcggcctgagcacgttcctgttccggccgcactgtggggaagccggctccatcacccacctggtgtctgccttcctcactgctgacaacatttcccacgggctgctcctcaagaagagtccggtattgcagtatctctactaccttgctcagatccccattgccatgtctcctcttagcaacaacagtttgttcctcgaatattccaagaaccctctgagggaattcctacacaagggactgcatgtttctctttccaccgatgaccccatgcagttccactacacgaaggaagcacttatggaagaatatgccattgcagctcaagtgtggaagctgagcacctgcgacctgtgtgagatcgccaggaacagcgtgctgcagagcggcctctcgcatcaggaaaagcaaaagtttctgggacaaaattattataaagaaggacctgaaggaaatgatattcgaaagacaaatgtggctcagatccggatggcattccgatatgagaccttatgcaatgagctcagcttcctgtctgatgctatgaaatcagaagagatcaccgccttgaccaactaggtccagcatttgacatgcattttaactttttggttcaatttcaagtctgctgtggctaatagtggtcaagattccgaactaggactttcctctgtgaagaggatgcctctgaagaaattttaaactggtgattttggttgcactgctcactttaagagttaacatgctcacttgttagtatttctgagtaacaagatggtgacttctccttggggatctgggagctgagcacttgtctatacttgttcctaattttccaagtatttctcttgaaactgccagtgcctgaactgttggggccaggattttccctggtcagatgccaagtaacatgtggttttctgccatacttttctccattggcccaggtaggctaattggtagttgttcatttcagcctctggatggctggctgccttaaacacaatcaatttcaaagctccatttcataaaggggctactttgaaggagttaagatggaagacttccttcttgacaaattgtgtttttagtgaatttcttaaaccgttttatttagccctccttccctctttctagttggaagccaaatgtactcatgaaaacagccactcctattctgagtcttggtttcttcacctagaaagtgagggtttggactagatgagtggctttcagggtgttctgtgaatctcctcatgaatactttagggtgggggagggaagggagtgagtgatgctcaggggctgtcaaagtgactgcgttcatcagttttacactggggctgctacataatattttcatttgaacgaagaacttcaaaaagcacaggactagatgatctctgttccttttggctctaatatgctacaactgtaggccaattatcactttaccaattaagagttaggccagataagtgaaatttaacttaagggcacacagctaataagtaataggcctaaactggatttccttattccaaatcctgtcttttccccactattccattagaccccacaaatgttagttgtgtgtgtgtgtgtgtgtgtttttaatcactgtaaccgggtgcatttttttaaggcaaaatttctcccttatctactgtgatgacttcagaagatacaatggtcccaggggccaagtagaaagcatttttaaagattaatctgaattaagctttatcagtgtactctttatctgtgttactagtgcctggtatgtagtaggtgctcaataaatgcatattgaataactaagtgaatttcttttggcaactttttaaggacatgtgctcttagtacttaagaggctgctcaaggaccttcctatctatttctgtggtcaaattcagactacaggaggtctttttgaatcattatagttagaagaagaatccagtttctgcctgtgaacttatttgactttagattgtctcatcttgtgactttataatgcctgtcccctccactggtcaattcagcatatggaagtataaatgcagtctttttactaggcagatatatatgctatcttacagctaattatgaaattgaatgaaaatccattgttatcttagggattagttttgaaaagcccccatttatatacatttgccctaacataggaagtattgtgtagtttctcattgtcattttatctgtatcaagtatctttttttaaattgttaaataaagtcagctaggactgtgg

SEQ ID NO: 447711 - DNA, 2974 bp, Homo sapiens
caggcggctggccagggtggagcccatggctccaggatgggctggggtatgtggttagggaaacagagctgagtaacagaatgtttgggtcactgggaatttgaggattcatatctcagtctcttggacagccagaatgccaccatcccattcctagtggcttctggcttgagaaagtgctctgatgggcatgggtaggtgtggagcttgcaaaccaaggcagaatattgcagacattgctgggagaggaggacagaggagggatctgttttctggtcccatctgacttgattctgggtgtttgatggggacacagggtgcctgaggaagtgaccggggctggtctctgacagggcagcaggctgttggatccacctgacaagcgagtctttgctgtcccccagtgacatatttaggtcaaagaagctgctgccaaactttgggaagatgctggagaacatcttcctgccccttttcaaggccactatcaacccccaagatcatcgagagcttcacctcttccttaaatatgtgacggggtttgacagcgtggatgatgagtccaagcacagcgaccacatgttttccgacaagagcccaaacccggacgtctggaccagtgagcagaacccaccctacagctactacctgtactacatgtatgccaacatcatggtgctcaacaacctccgcagggagcgcggcctgagcacgttcctgttccggccgcactgtggggaagccggctccatcacccacctggtgtctgccttcctcactgctgacaacatttcccacgggctgctcctcaagaagagtccggtattgcagtatctctactaccttgctcagatccccattgccatgtctcctcttagcaacaacagtttgttcctcgaatattccaagaaccctctgagggaattcctacacaagggactgcatgtttctctttccaccgatgaccccatgcagttccactacacgaaggaagcacttatggaagaatatgccattgcagctcaagtgtggaagctgagcacctgcgacctgtgtgagatcgccaggaacagcgtgctgcagagcggcctctcgcatcaggaaaagcaaaagtttctgggacaaaattattataaagaaggacctgaaggaaatgatattcgaaagacaaatgtggctcagatccggatggcattccgatatgagaccttatgcaatgagctcagcttcctgtctgatgctatgaaatcagaagagatcaccgccttgaccaactaggtccagcatttgacatgcattttaactttttggttcaatttcaagtctgctgtggctaatagtggtcaagattccgaactaggactttcctctgtgaagaggatgcctctgaagaaattttaaactggtgattttggttgcactgctcactttaagagttaacatgctcacttgttagtatttctgagtaacaagatggtgacttctccttggggatctgggagctgagcacttgtctatacttgttcctaattttccaagtatttctcttgaaactgccagtgcctgaactgttggggccaggattttccctggtcagatgccaagtaacatgtggttttctgccatacttttctccattggcccaggtaggctaattggtagttgttcatttcagcctctggatggctggctgccttaaacacaatcaatttcaaagctccatttcataaaggggctactttgaaggagttaagatggaagacttccttcttgacaaattgtgtttttagtgaatttcttaaaccgttttatttagccctccttccctctttctagttggaagccaaatgtactcatgaaaacagccactcctattctgagtcttggtttcttcacctagaaagtgagggtttggactagatgagtggctttcagggtgttctgtgaatctcctcatgaatactttagggtgggggagggaagggagtgagtgatgctcaggggctgtcaaagtgactgcgttcatcagttttacactggggctgctacataatattttcatttgaacgaagaacttcaaaaagcacaggactagatgatctctgttccttttggctctaatatgctacaactgtaggccaattatcactttaccaattaagagttaggccagataagtgaaatttaacttaagggcacacagctaataagtaataggcctaaactggatttccttattccaaatcctgtcttttccccactattccattagaccccacaaatgttagttgtgtgtgtgtgtgtgtgtgtttttaatcactgtaaccgggtgcatttttttaaggcaaaatttctcccttatctactgtgatgacttcagaagatacaatggtcccaggggccaagtagaaagcatttttaaagattaatctgaattaagctttatcagtgtactctttatctgtgttactagtgcctggtatgtagtaggtgctcaataaatgcatattgaataactaagtgaatttcttttggcaactttttaaggacatgtgctcttagtacttaagaggctgctcaaggaccttcctatctatttctgtggtcaaattcagactacaggaggtctttttgaatcattatagttagaagaagaatccagtttctgcctgtgaacttatttgactttagattgtctcatcttgtgactttataatgcctgtcccctccactggtcaattcagcatatggaagtataaatgcagtctttttactaggcagatatatatgctatcttacagctaattatgaaattgaatgaaaatccattgttatcttagggattagttttgaaaagcccccatttatatacatttgccctaacataggaagtattgtgtagtttctcattgtcattttatctgtatcaagtatctttttttaaattgttaaataaagtcagctaggactgtgg

SEQ ID NO: 447712 - DNA, 1752 bp, Homo sapiens
  misc_feature (31)..(31): n is a, c, g, or t
cccctgctgctctcaagtttcccgttggcgncgcggcccgggcgcttcaggtagcctctcggctctctctgctccgctccgcgcccaggtagggcaccgacgggggctgcacgcggctggccggcttcctccctgctgaggcggccctccctcctcccgcggggccctcctggccggggatccgcagcgctgcgccctctgaacgcccggcccccgcgcctgctgcggggcggggcctggccgggccctggccccggcgggcctcagtgccagcagccccgctccgctctgcccagcgcgtcccctttgctccagccctgcggccgtccctttcggccggcggcatggccctgtcgtccgaacccgctgagatgccgcggcagtttcccaagctgaacatctctgaagtggatgagcaagtccggctcctggcggagaaggtgtttgctaaagtgctccgagaagaggacagcaaagatgccctgtccctgttcactgtcccagaggactgccccatcgggcaaaaggaagccaaggagagggagctgcagaaggagctggcagagcagaagtctgtggagaccgcaaaaagaaagaaaagtttcaagatgattcggtcccagtccctgtctctgcaaatgccgccacagcaagattggaagggccccccggcagccagtccggccatgtctcccacaacccctgtggtcactggagccacttccctgcccacgccagcaccctatgccatgcctgagttccagcgggtcaccatcagcggagattactgtgccgggatcactttggaggactatgagcaggcagccaagagtctggccaaggccctaatgatccgggagaagtatgcgcggctcgcctaccaccgcttcccgcggatcacatcccagtacctgggtcatccgcgggcggatactgcacctccggaagagggccttccagacttccaccctcctccactgccccaggaagacccctactgcctggatgatgcaccccccaacctggattacttggtccacatgcaggggggcatcctctttgtgtatgataacaagaagatgctggagcaccaggagccgcacagcctaccctaccccgacctggagacctacacggtggacatgagccacatcctggctctcatcaccgatggccccacgaaaacctattgtcaccggcgactgaactttctggaatccaagttcagccttcatgagatgttaaacgaaatgtccgagttcaaagagttgaagagtaacccccaccgggacttctataacgtgagaaaggtggacacacacatccatgcggccgcctgcatgaaccaaaagcatctgctgcgcttcatcaagcacacataccagacggagcctgacaggactgtggcagagaagcggggccggaagatcaccctgcggcaggtgtttgacggcctgcacatggacccctacgacctcactgtggactcactggatgtccacgcggtgagtgagcttctgctccagtgccgccagcagacagcagccctggctggggactcagccccctggaaagccaccatgattgtgcttgccgggaggtgctacggaagcagctttctcttctatctgactgagaggtcatgcggcctcagagaataacaggtctggggcagccatgggacagggaaagagggtgtgtggcttggggcctgacaggtctaagcactaatcccactcctgccacttagga

SEQ ID NO: 447713 - DNA, 2221 bp, Homo sapiens
gacgccgtgctcactgctgggtgctgcgcctgagtccgcctcctgcggcttcccggacttgaccccgcccacgccctggtcccgcctcctgccgacgccggcacagaccccggtgacggaagtgacgtaaggccggggctggagggcagcgctgggctggtcccgcaggcgctcggggttggagccagcgaccgtcggtagcagcatggctctcctctttctcctaccccttgtcatgcagggtgtgagcagggctgagatgggcaccgcggatctggggccgtcctcagtgcctacaccaactaatgttacaattgaatcctataacatgaaccctatcgtatattgggagtaccagatcatgccacaggtccctgtttttaccgtagaggtaaagaactatggtgttaagaattcagaatggattgatgcctgcatcaatatttctcatcattattgtaatatttctgatcatgttggtgatccatcaaattctctttgggtcagagttaaagccagggttggacaaaaagaatctgcctatgcaaagtcagaagaatttgctgtatgccgagatggaaaaattggaccacctaaactggatatcagaaaggaggagaagcaaatcatgattgacatatttcacccttcagtttttgtaaatggagacgagcaggaagtcgattatgatcccgaaactacctgttacattagggtgtacaatgtgtatgtgagaatgaacggaagtgagatccagtataaaatactcacgcagaaggaagatgattgtgacgagattcagtgccagttagcgattccagtatcctcactgaattctcagtactgtgtttcagcagaaggagtcttacatgtgtggggtgttacaactgaaaagtcaaaagaagtttgtattaccattttcaatagcagtataaaaggttctctttggattccagttgttgctgctttactactctttctagtgcttagcctggtattcatctgtttttatattaagaaaattaatccattgaaggaaaaaagcataatattacccaagtccttgatctctgtggtaagaagtgctactttagagacaaaacctgaatcaaaatatgtatcactcatcacgtcataccagccattttccttagaaaaggaggtggtctgtgaagagccgttgtctccagcaacagttccaggcatgcataccgaagacaatccaggaaaagtggaacatacagaagaactttctagtataacagaagtggtgactactgaagaaaatattcctgacgtggtcccgggcagccatctgactccaatagagagagagagttcttcacctttaagtagtaaccagtctgaacctggcagcatcgctttaaactcgtatcactccagaaattgttctgagagtgatcactccagaaatggttttgatactgattccagctgtctggaatcacatagctccttatctgactcagaatttcccccaaataataaaggtgaaataaaaacagaaggacaagagctcataaccgtaataaaagcccccacctcctttggttatgataaaccacatgtgctagtggatctacttgtggatgatagcggtaaagagtccttgattggttatagaccaacagaagattccaaagaattttcatgagatcagctaagttgcaccaactttgaagtctgattttcctggacagttttctgctttaatttcatgaaaagattatgatctcagaaattgtatcttagttggtatcaaccaaatggagtgacttagtgtacatgaaagcgtaaagaggatgtgtggcattttcacttttggcttgtaaagtacagacttttttttttttttaaacaaaaaaagcattgtaacttatgaacctttacatccagataggttaccagtaacggaacagtatccagtactcctggttcctaggtgagcaggtgatgccccagggacctttgtagccacttcactttttttcttttctctgccttggtatagcatatgtttttgtaagtttatgcatacagtaattttaagtaatttcagaagaaattctgcaagcttttcaaaattggacttaaaatctaattcaaactaatagaattaatggaatatgtaaatagaaacgtgtatattttttatgaaacattacagttagagatttttaaataaagaattttaaaactc

SEQ ID NO: 447714 - DNA, 1409 bp, Homo sapiens
caggattaagcatgtatttattttagttcagttaaaacaaacatacattgtttcattgaaacggtgtagcactctttgccaacaagccatactagaattgttggcctctaacagtacagtggggatatttacactatatacacaaagttaatacacccaggttctcaaaggtcttccattacactagatcacattttatttcattacactagatcacattttgattactgcattttgaaaatgtattccttatttaaattttaaataagagatctgaatttgtaccaagatttcatgaaaaaatttgatgttgtttattgcaaatacaatttaaacaagttttttttagtgtttgtacacaatttgtcaatttttcaatattcaattttctgtacaggtacttttgggacaattcttatagttacataatgtgaattcatcaaaatgcagttaagaaacttacaggaatatatacacttgaacccaagacccaaacctgacattatatacaacctatttacaaatacatatggacagacaatatatgtacatagattatcataaatattgaaaaataggttagctttaatggattaatgttgttctataaataacattacagttgtaactgaaacatccacggaagacagtaatgcaaaatgaggtgacaagacagtggttttaatactgaagactgctcattaatgggaattcattgttcaggaacctcaaggtagacaagatagctcccagaaaatcatccattggaattttccctaggcacttgattttgaaccttaaatagccagaggattggaggagcttcctcacattaatttgctgtagagaaaagattttcatgagatcagctaagttgcaccaactttgaagtctgattttcctggacagttttctgctttaatttcatgaaaagattatgatctcagaaattgtatcttagttggtatcaaccaaatggagtgacttagtgtacatgaaagcgtaaagaggatgtgtggcattttcacttttggcttgtaaagtacagacttttttttttttttaaacaaaaaaagcattgtaacttatgaacctttacatccagataggttaccagtaacggaacagtatccagtactcctggttcctaggtgagcaggtgatgccccagggacctttgtagccacttcactttttttcttttctctgccttggtatagcatatgtttttgtaagtttatgcatacagtaattttaagtaatttcagaagaaattctgcaagcttttcaaaattggacttaaaatctaattcaaactaatagaattaatggaatatgtaaatagaaacgtgtatattttttatgaaacattacagttagagatttttaaataaagaattttaaaactc

SEQ ID NO: 447715 - DNA, 686 bp, Homo sapiens
gacgccgtgctcactgctgggtgctgcgcctgagtccgcctcctgcggcttcccggacttgaccccgcccacgccctggtcccgcctcctgccgacgccggcacagaccccggtgacggaagtgacgtaaggccggggctggagggcagcgctgggctggtcccgcaggcgctcggggttggagccagcgaccgtcggtagcagcatggctctcctctttctcctaccccttgtcatgcagggtgtgagcagggctgagatgggcaccgcggatctggggccgtcctcaggtaccgtcgttcgcggcagggctgcggccgggtcgggacgagagggagggagggatccgccccagccgggaagccccgccccgcttctccgaggtcgccctagcccgggacccctgcgtcgggccctgagcgggcgacggggacgcgaggtggggtcgcgagactggggctccgtggtttgaactcgtcggttgcctttctcctgcctcttccctggttgccgccacaacaaatcacgccgcttgtttttccgactcttgtaatccacttttaaatacgattatgcgctgcagaaggacgttgctggtcaatgtgggacagcgtggtctcaaagattataatatcgtcttcttactgtacctttttttatggttagatacgcagatactcactagt

SEQ ID NO: 447716 - DNA, 726 bp, Homo sapiens
gacgccgtgctcactgctgggtgctgcgcctgagtccgcctcctgcggcttcccggacttgaccccgcccacgccctggtcccgcctcctgccgacgccggcacagaccccggtgacggaagtgacgtaaggccggggctggagggcagcgctgggctggtcccgcaggcgctcggggttggagccagcgaccgtcggtagcagcatggctctcctctttctcctaccccttgtcatgcagggtgtgagcagggctgagatgggcaccgcggatctggggccgtcctcagtgcctacaccaactaatgttacaattgaatcctataacatgaaccctatcgtatattgggagtaccagatcatgccacaggtccctgtttttaccgtagaggtaaagaactatgggtgagtgtcactcttttatttatcctttttattccatttttgtttaggtccttggaaattccacaactgtgttctttcatcagccttcccacgtggcaaaacattctaaactgcttatagaggtccaaaagtactaaagatgcaaattctttgccaaatatttcttgcctcttatttcctcttccttatcagtattgaaatagagaagtatcactaaacttctgagattagcatgacaaataaagctaatagttactatgtcatcttcctgtagtgtatttttagtagaacaatataaatttcaaaaaacttttttgacaa

SEQ ID NO: 447717 - DNA, 497 bp, Homo sapiens
tccttcagtgttctttaaaactctggccctattcactaatttgtaaatctattcaagaatggcactaagactttttgatagataatagcagtattccatcttaattgtaacttgtgatttctgccttttttaaggttctctttggattccagttgttgctgctttactactctttctagtgcttagcctggtattcatctgtttttatattaagaaaattaatccattgaaggaaaaaagcataatattacccaagtccttggtaatgtatttaatttttttatatacactaaaaagttaacttgaaccttttttgatagtttcttaaattatgtttttaaagtagaatgatattcaacaagatgtcacctgccatcaatcagtcagtctaccacacatgcaaaatcacatactgtgtcttttgctgtgcagcaagtattttgtttttttttttattctcagggaaaaacacggtgagacaattctgttaaagatct

SEQ ID NO: 447718 - DNA, 413 bp, Homo sapiens
cttacattttgaattgagcctctttactgtaacagagtttgtagttcttctaactaaagagtaagggtttcctactttctctggcgtctccatcctattcttagctctgctctttctaccgctttgtgctgtgaataaaaagcaaagcacagacagaaatggtttgagtttatttaataacaataaaagttatcttcgcatttttttattctttttagtgttaagaattcagaatggattgatgcctgcatcaatatttctcatcattattgtaatatttctgatcatgttggtgatccatcaaattctctttgggtcagagttgccttcggtcaatccacaagccacggtcaatccacaagccacggtcaaaccacaagccacggtcaacccacaagccacggtcaacccac

SEQ ID NO: 447719 - DNA, 2332 bp, Homo sapiens
gacgccgtgctcactgctgggtgctgcgcctgagtccgcctcctgcggcttcccggacttgaccccgcccacgccctggtcccgcctcctgccgacgccggcacagaccccggtgacggaagtgacgtaaggccggggctggagggcagcgctgggctggtcccgcaggcgctcggggttggagccagcgaccgtcggtagcagcatggctctcctctttctcctaccccttgtcatgcagggtgtgagcagggctgagatgggcaccgcggatctggggccgtcctcagtggccataatataattgtgataatgtaataaaatcaggaaacattacctgaagcagatgcttttgaagtcaccagaaaatagtcttctccaattccaatttaaatatggagtgcctacaccaactaatgttacaattgaatcctataacatgaaccctatcgtatattgggagtaccagatcatgccacaggtccctgtttttaccgtagaggtaaagaactatggtgttaagaattcagaatggattgatgcctgcatcaatatttctcatcattattgtaatatttctgatcatgttggtgatccatcaaattctctttgggtcagagttaaagccagggttggacaaaaagaatctgcctatgcaaagtcagaagaatttgctgtatgccgagatggaaaaattggaccacctaaactggatatcagaaaggaggagaagcaaatcatgattgacatatttcacccttcagtttttgtaaatggagacgagcaggaagtcgattatgatcccgaaactacctgttacattagggtgtacaatgtgtatgtgagaatgaacggaagtgagatccagtataaaatactcacgcagaaggaagatgattgtgacgagattcagtgccagttagcgattccagtatcctcactgaattctcagtactgtgtttcagcagaaggagtcttacatgtgtggggtgttacaactgaaaagtcaaaagaagtttgtattaccattttcaatagcagtataaaaggttctctttggattccagttgttgctgctttactactctttctagtgcttagcctggtattcatctgtttttatattaagaaaattaatccattgaaggaaaaaagcataatattacccaagtccttgatctctgtggtaagaagtgctactttagagacaaaacctgaatcaaaatatgtatcactcatcacgtcataccagccattttccttagaaaaggaggtggtctgtgaagagccgttgtctccagcaacagttccaggcatgcataccgaagacaatccaggaaaagtggaacatacagaagaactttctagtataacagaagtggtgactactgaagaaaatattcctgacgtggtcccgggcagccatctgactccaatagagagagagagttcttcacctttaagtagtaaccagtctgaacctggcagcatcgctttaaactcgtatcactccagaaattgttctgagagtgatcactccagaaatggttttgatactgattccagctgtctggaatcacatagctccttatctgactcagaatttcccccaaataataaaggtgaaataaaaacagaaggacaagagctcataaccgtaataaaagcccccacctcctttggttatgataaaccacatgtgctagtggatctacttgtggatgatagcggtaaagagtccttgattggttatagaccaacagaagattccaaagaattttcatgagatcagctaagttgcaccaactttgaagtctgattttcctggacagttttctgctttaatttcatgaaaagattatgatctcagaaattgtatcttagttggtatcaaccaaatggagtgacttagtgtacatgaaagcgtaaagaggatgtgtggcattttcacttttggcttgtaaagtacagacttttttttttttttaaacaaaaaaagcattgtaacttatgaacctttacatccagataggttaccagtaacggaacagtatccagtactcctggttcctaggtgagcaggtgatgccccagggacctttgtagccacttcactttttttcttttctctgccttggtatagcatatgtttttgtaagtttatgcatacagtaattttaagtaatttcagaagaaattctgcaagcttttcaaaattggacttaaaatctaattcaaactaatagaattaatggaatatgtaaatagaaacgtgtatattttttatgaaacattacagttagagatttttaaataaagaattttaaaactc

SEQ ID NO: 447720 - DNA, 2220 bp, Homo sapiens
  misc_feature (1674)..(1674): n is a, c, g, or t
  misc_feature (1676)..(1676): n is a, c, g, or t
  misc_feature (1679)..(1680): n is a, c, g, or t
  misc_feature (1686)..(1686): n is a, c, g, or t
  misc_feature (1693)..(1694): n is a, c, g, or t
  misc_feature (1699)..(1700): n is a, c, g, or t
  misc_feature (1707)..(1707): n is a, c, g, or t
  misc_feature (1716)..(1717): n is a, c, g, or t
  misc_feature (1720)..(1720): n is a, c, g, or t
  misc_feature (1727)..(1727): n is a, c, g, or t
  misc_feature (1738)..(1738): n is a, c, g, or t
  misc_feature (1740)..(1740): n is a, c, g, or t
  misc_feature (1742)..(1742): n is a, c, g, or t
  misc_feature (1744)..(1744): n is a, c, g, or t
  misc_feature (1751)..(1751): n is a, c, g, or t
  misc_feature (1758)..(1759): n is a, c, g, or t
  misc_feature (1764)..(1764): n is a, c, g, or t
  misc_feature (1766)..(1766): n is a, c, g, or t
  misc_feature (1775)..(1775): n is a, c, g, or t
  misc_feature (1778)..(1778): n is a, c, g, or t
  misc_feature (1781)..(1781): n is a, c, g, or t
  misc_feature (1785)..(1785): n is a, c, g, or t
  misc_feature (1794)..(1794): n is a, c, g, or t
  misc_feature (1799)..(1799): n is a, c, g, or t
  misc_feature (1814)..(1814): n is a, c, g, or t
  misc_feature (1832)..(1832): n is a, c, g, or t
  misc_feature (1838)..(1838): n is a, c, g, or t
  misc_feature (1842)..(1842): n is a, c, g, or t
  misc_feature (1855)..(1855): n is a, c, g, or t
  misc_feature (1863)..(1863): n is a, c, g, or t
  misc_feature (1865)..(1865): n is a, c, g, or t
  misc_feature (1873)..(1873): n is a, c, g, or t
  misc_feature (1877)..(1877): n is a, c, g, or t
  misc_feature (1880)..(1881): n is a, c, g, or t
  misc_feature (1886)..(1886): n is a, c, g, or t
  misc_feature (1891)..(1891): n is a, c, g, or t
  misc_feature (1903)..(1903): n is a, c, g, or t
gacgccgtgctcactgctgggtgctgcgcctgagtccgcctcctgcggcttcccggacttgaccccgcccacgccctggtcccgcctcctgccgacgccggcacagaccccggtgacggaagtgacgtaaggccggggctggagggcagcgctgggctggtcccgcaggcgctcggggttggagccagcgaccgtcggtagcagcatggctctcctctttctcctaccccttgtcatgcagggtgtgagcagggctgagatgggcaccgcggatctggggccgtcctcagtgcctacaccaactaatgttacaattgaatcctataacatgaaccctatcgtatattgggagtaccagatcatgccacaggtccctgtttttaccgtagaggtaaagaactatggtgttaagaattcagaatggattgatgcctgcatcaatatttctcatcattattgtaatatttctgatcatgttggtgatccatcaaattctctttgggtcagagttaaagccagggttggacaaaaagaatctgcctatgcaaagtcagaagaatttgctgtatgccgagatggaaaaattggaccacctaaactggatatcagaaaggaggagaagcaaatcatgattgacatatttcacccttcagtttttgtaaatggagacgagcaggaagtcgattatgatcccgaaactacctgttacattagggtgtacaatgtgtatgtgagaatgaacggaagtgagatccagtataaaatactcacgcagaaggaagatgattgtgacgagattcagtgccagttagcgattccagtatcctcactgaattctcagtactgtgtttcagcagaaggagtcttacatgtgtggggtgttacaactgaaaagtcaaaagaagtttgtattaccattttcaatagcagtataaaaggttctctttggattccagttgttgctgctttactactctttctagtgcttagcctggtattcatctgtttttatattaagaaaattaatccattgaaggaaaaaagcataatattacccaagtccttgatctctgtggtaagaagtgctactttagagacaaaacctgaatcaaaatatgtatcactcatcacgtcataccagccattttccttagaaaaggaggtggtctgtgaagagccgttgtctccagcaacagttccaggcatgcataccgaagacaatccaggaaaagtggaacatacagaagaactttctagtataacagaagtggtgactactgaagaaaatattcctgacgtggtcccgggcagccatctgactccaatagagagagagagttcttcacctttaagtagtaaccagtctgaacctggcagcatcgctttaaactcgtatcactccagaaattgttctgagagtgatcactccagaaatggttttgatactgattccagctgtctggaatcacatagctccttatctgactcagaatttcccccaaataataaaggtgaaataaaaacagaaggacaagagctcataaccgtaataaaagcccccacctcctttggttatgataaaccacatgtgctagtggatctacttgtggatgatagcggtaaagagtccttgattggttatagaccaacagaagattccaaagacccccaccngnccnncccagncgccccnnccccnnacccccncccccccgnnccnccccccnccccaaccccncnanangaccacnacccccnnaaccncnccccagccngcnccncccnaatggagtnacccngtgcacacgaaagcncaaagaggacgcgcggcncccccncctntggcctgcaaagnacagaccncngctctccnccanacnngaaangcagngcgacccacganccctcacatccagataggttaccagtaacggaacagtatccagtactcctggttcctaggtgagcaggtgatgccccagggacctttgtagccacttcactttttttcttttctctgccttggtatagcatatgtttttgtaagtttatgcatacagtaattttaagtaatttcagaagaaattctgcaagcttttcaaaattggacttaaaatctaattcaaactaatagaattaatggaatatgtaaatagaaacgtgtatattttttatgaaacattacagttagagatttttaaataaagaattttaaaactc

SEQ ID NO: 447721 - DNA, 1128 bp, Homo sapiens
gacgccgtgctcactgctgggtgctgcgcctgagtccgcctcctgcggcttcccggacttgaccccgcccacgccctggtcccgcctcctgccgacgccggcacagaccccggtgacggaagtgacgtaaggccggggctggagggcagcgctgggctggtcccgcaggcgctcggggttggagccagcgaccgtcggtagcagcatggctctcctctttctcctaccccttgtcatgcagggtgtgagcagggctgagatgggcaccgcggatctggggccgtcctcagtgcctacaccaactaatgttacaattgaatcctataacatgaaccctatcgtatattgggagtaccagatcatgccacaggtccctgtttttaccgtagaggtaaagaactatggtgttaagaattcagaatggattgatgcctgcatcaatatttctcatcattattgtaatatttctgatcatgttggtgatccatcaaattctctttgggtcagagttaaagccagggttggacaaaaagaatctgcctatgcaaagtcagaagaatttgctgtatgccgagatggaaaaattggaccacctaaactggatatcagaaaggaggagaagcaaatcatgattgacatatttcacccttcagtttttgtaaatggagacgagcaggaagtcgattatgatcccgaaactacctgttacattagggtgtacaatgtgtatgtgagaatgaacggaagtgaggtatgtgtttcacatttttcataatggaaattcttgtgtagctagcaaaagttgttcctttctgtagtgtaatgaaaataggatgcttataaatattcaagcaagactcacagatcatagatttgataagaaaaatatgtgaatgctattaaagcaaaaatgatacagagttagtcactaacactgaccatgtgaatacatttagtttttatttgcttcatttagcagaatggctctaatctaggatttttcccagtacacctccattgctccactggtaaaatgaggattttcttcctcattggcggtgacgtaaagtaatattaatacttctgtttcccaccagctaaatttctggacaaatgaataggacaaat

SEQ ID NO: 447722 - DNA, 1064 bp, Homo sapiens
gacgccgtgctcactgctgggtgctgcgcctgagtccgcctcctgcggcttcccggacttgaccccgcccacgccctggtcccgcctcctgccgacgccggcacagaccccggtgacggaagtgacgtaaggccggggctggagggcagcgctgggctggtcccgcaggcgctcggggttggagccagcgaccgtcggtagcagcatggctctcctctttctcctaccccttgtcatgcagggtgtgagcagggctgagatgggcaccgcggatctggggccgtcctcagtgcctacaccaactaatgttacaattgaatcctataacatgaaccctatcgtatattgggagtaccagatcatgccacaggtccctgtttttaccgtagaggtaaagaactatggttaaagccagggttggacaaaaagaatctgcctatgcaaagtcagaagaatttgctgtatgccgagatggaaaaattggaccacctaaactggatatcagaaaggaggagaagcaaatcatgattgacatatttcacccttcagtttttgtaaatggagacgagcaggaagtcgattatgatcccgaaactacctgttacattagggtgtacaatgtgtatgtgagaatgaacggaagtgagatccagtataaaatactcacgcagaaggaagatgattgtgacgagattcagtgccagttagcgattccagtatcctcactgaattctcagtactgtgtttcagcagaaggagtcttacatgtgtggggtgttacaactgaaaagtcaaaagaagtttgtattaccattttcaatagcagtataaaaggtaagttcttgccattttttttctaaatatagagggagcagtaactaaaataggatcatgtgaggaaagcaaactcatttgcagtttcaaaagatctgttttaacaatattcatttgcattagttccattccttagagaagttcaaaattaaaaataaagcagtttctcacacatttaaagatatagaacaactaatttggaaagccatgtgatggccccttgacccagg

SEQ ID NO: 447723 - DNA, 2167 bp, Homo sapiens
gacgccgtgctcactgctgggtgctgcgcctgagtccgcctcctgcggcttcccggacttgaccccgcccacgccctggtcccgcctcctgccgacgccggcacagaccccggtgacggaagtgacgtaaggccggggctggagggcagcgctgggctggtcccgcaggcgctcggggttggagccagcgaccgtcggtagcagcatggctctcctctttctcctaccccttgtcatgcagggtgtgagcagggctgagatgggcaccgcggatctggggccgtcctcagtgcctacaccaactaatgttacaattgaatcctataacatgaaccctatcgtatattgggagtaccagatcatgccacaggtccctgtttttaccgtagaggtaaagaactatggtgttaagaattcagaatggattgatgcctgcatcaatatttctcatcattattgtaatatttctgatcatgttggtgatccatcaaattctctttgggtcagagttaaagccagggttggacaaaaagaatctgcctatgcaaagtcagaagaatttgctgtatgccgagatggaaaaattggaccacctaaactggatatcagaaaggaggagaagcaaatcatgattgacatatttcacccttcagtttttgtaaatggagacgagcaggaagtcgattatgatcccgaaactacctgttacattagggtgtacaatgtgtatgtgagaatgaacggaagtgagatccagtataaaatactcacgcagaaggaagatgattgtgacgagattcagtgccagttagcgattccagtatcctcactgaattctcagtactgtgtttcagcagaaggagtcttacatgtgtggggtgttacaactgaaaagtcaaaagaagtttgtattaccattttcaatagcagtataaaaggttctctttggattccagttgttgctgctttactactctttctagtgcttagcctggtattcatctgtttttatattaagaaaattaatccattgaaggaaaaaagcataatattacccaagtccttgatctctgtggtaagaagtgctactttagagacaaaacctgaatcaaaatatgtatcactcatcacgtcataccagccattttccttagaaaaggaggtggtctgtgaagagccgttgtctccagcaacagttccaggcatgcataccgaagacaatccaggaaaagtggaacatacagaagaactttctagtataacagaagtggtgactactgaaggttcttcacctttaagtagtaaccagtctgaacctggcagcatcgctttaaactcgtatcactccagaaattgttctgagagtgatcactccagaaatggttttgatactgattccagctgtctggaatcacatagctccttatctgactcagaatttcccccaaataataaaggtgaaataaaaacagaaggacaagagctcataaccgtaataaaagcccccacctcctttggttatgataaaccacatgtgctagtggatctacttgtggatgatagcggtaaagagtccttgattggttatagaccaacagaagattccaaagaattttcatgagatcagctaagttgcaccaactttgaagtctgattttcctggacagttttctgctttaatttcatgaaaagattatgatctcagaaattgtatcttagttggtatcaaccaaatggagtgacttagtgtacatgaaagcgtaaagaggatgtgtggcattttcacttttggcttgtaaagtacagacttttttttttttttaaacaaaaaaagcattgtaacttatgaacctttacatccagataggttaccagtaacggaacagtatccagtactcctggttcctaggtgagcaggtgatgccccagggacctttgtagccacttcactttttttcttttctctgccttggtatagcatatgtttttgtaagtttatgcatacagtaattttaagtaatttcagaagaaattctgcaagcttttcaaaattggacttaaaatctaattcaaactaatagaattaatggaatatgtaaatagaaacgtgtatattttttatgaaacattacagttagagatttttaaataaagaattttaaaactc

SEQ ID NO: 447724 - DNA, 1738 bp, Homo sapiens
cacaataggccatctgcaggctgaggagcaaggagagccagtccaagctccaaacttgaagaattcagagtccgatgttcaagggcaggaagcattcagcatgggagaaagatgtaggctgggaggctaggccagtctctcttttcacatttttctgcctgcttacattctagccatgctggcagctgattagattgtgcccattcgggttaagggcgggtcttcctttcccagcccactgactcaaatgttaatctcctttggcagcaccctcacagacacacccaggatcaatactttgtatccttcagtccaatcaagttgacactcagtattaaccatcacagtaacgtacaaaaagcaacatatattagtaagatatctgatggctttttaaaaattctaaaactttgtttttaatattactatgggacctttcattaaaaagaaatggcaacatctgattcacccattatcctaaatgtgccatttggtggtccattacttcagacctttgttttttttgagggtaggcacttaagcttaacaattttttatctttaatcaatttttctccccatagatctctgtggtaagaagtgctactttagagacaaaacctgaatcaaaatatgtatcactcatcacgtcataccagccattttccttagaaaaggaggtggtctgtgaagagccgttgtctccagcaacagttccaggcatgcataccgaagacaatccaggaaaagtggaacatacagaagaactttctagtataacagaagtggtgactactgaagaaaatattcctgacgtggtcccgggcagccatctgactccaatagagagagagagttcttcacctttaagtagtaaccagtctgaacctggcagcatcgctttaaactcgtatcactccagaaattgttctgagagtgatcactccagaaatggttttgatactgattccagctgtctggaatcacatagctccttatctgactcagaatttcccccaaataataaaggtgaaataaaaacagaaggacaagagctcataaccgtaataaaagcccccacctcctttggttatgataaaccacatgtgctagtggatctacttgtggatgatagcggtaaagagtccttgattggttatagaccaacagaagattccaaagaattttcatgagatcagctaagttgcaccaactttgaagtctgattttcctggacagttttctgctttaatttcatgaaaagattatgatctcagaaattgtatcttagttggtatcaaccaaatggagtgacttagtgtacatgaaagcgtaaagaggatgtgtggcattttcacttttggcttgtaaagtacagacttttttttttttttaaacaaaaaaagcattgtaacttatgaacctttacatccagataggttaccagtaacggaacagtatccagtactcctggttcctaggtgagcaggtgatgccccagggacctttgtagccacttcactttttttcttttctctgccttggtatagcatatgtttttgtaagtttatgcatacagtaattttaagtaatttcagaagaaattctgcaagcttttcaaaattggacttaaaatctaattcaaactaatagaattaatggaatatgtaaatagaaacgtgtatattttttatgaaacattacagttagagatttttaaataaagaattttaaaactc

SEQ ID NO: 447725 - DNA, 1168 bp, Homo sapiens
gacgccgtgctcactgctgggtgctgcgcctgagtccgcctcctgcggcttcccggacttgaccccgcccacgccctggtcccgcctcctgccgacgccggcacagaccccggtgacggaagtgacgtaaggccggggctggagggcagcgctgggctggtcccgcaggcgctcggggttggagccagcgaccgtcggtagcagcatggctctcctctttctcctaccccttgtcatgcagggtgtgagcagggctgagatgggcaccgcggatctggggccgtcctcagtgcctacaccaactaatgttacaattgaatcctataacatgaaccctatcgtatattgggagtaccagatcatgccacaggtccctgtttttaccgtagaggtaaagaactatggtgttaagaattcagaatggattgatgcctgcatcaatatttctcatcattattgtaatatttctgatcatgttggtgatccatcaaattctctttgggtcagagttaaagccagggttggacaaaaagaatctgcctatgcaaagtcagaagaatttgctgtatgccgagatggaaaaattggaccacctaaactggatatcagaaaggaggagaagcaaatcatgattgacatatttcacccttcagtttttgtaaatggagacgagcaggaagtcgattatgatcccgaaactacctgttacattagggtgtacaatgtgtatgtgagaatgaacggaagtgagatccagtataaaatactcacgcagaaggaagatgattgtgacgagattcagtgccagttagcgattccagtatcctcactgaattctcagtactgtgtttcagcagaaggagtcttacatgtgtggggtgttacaactgaaaagtcaaaagaagtttgtattaccattttcaatagcagtataaaaggtaagttcttgccattttttttctaaatatagagggagcagtaactaaaataggatcatgtgaggaaagcaaactcatttgcagtttcaaaagatctgttttaacaatattcatttgcattagttccattccttagagaagttcaaaattaaaaataaagcagtttctcacacatttaaagatatagaacaactaatttggaaagccatgtgatggccccttgacccagg

SEQ ID NO: 447726 - DNA, 498 bp, Homo sapiens
catcttcaggcctggactacaccactcaccctcccagtgtgcttgagaaacaaactgcacccactgaactccgcagctagcatccaaatcagcccttgagatttgaggccttggagactcaggagttttgagagcaaaatgacaacacccagaaattcagtaaatgggactttcccggcagagccaatgaaaggccctattgctatgcaatctggtccaaaaccactcttcaggaggatgtcttcactggtgggccccacgcaaagcttcttcatgagggaatctaagactttgggggctgtccagattatgaatgggctcttccacattgccctggggggtcttctgatgatcccagcagggatctatgcacccatctgtgtgactgtgtggtaccctctctggggaggcattatgtatattatttccggatcactcctggcagcaacggagaaaaactccaggaagtgtttggcaagtaaccatatgtccttcttt

SEQ ID NO: 447727 - DNA, 2621 bp, Homo sapiens
catcttcaggcctggactacaccactcaccctcccagtgtgcttgagaaacaaactgcacccactgaactccgcagctagcatccaaatcagcccttgagatttgaggccttggagactcaggagttttgagagcaaaatgacaacacccagaaattcagtaaatgggactttcccggcagagccaatgaaaggccctattgctatgcaatctggtccaaaaccactcttcaggaggatgtcttcactggtgggccccacgcaaagcttcttcatgagggaatctaagactttgggggctgtccagattatgaatgggctcttccacattgccctggggggtcttctgatgatcccagcagggatctatgcacccatctgtgtgactgtgtggtaccctctctggggaggcattatgtatattatttccggatcactcctggcagcaacggagaaaaactccaggaagtgtttggtcaaaggaaaaatgataatgaattcattgagcctctttgctgccatttctggaatgattctttcaatcatggacatacttaatattaaaatttcccattttttaaaaatggagagtctgaattttattagagctcacacaccatatattaacatatacaactgtgaaccagctaatccctctgagaaaaactccccatctacccaatactgttacagcatacaatctctgttcttgggcattttgtcagtgatgctgatctttgccttcttccaggaacttgtaatagctggcatcgttgagaatgaatggaaaagaacgtgctccagacccaaatctaacatagttctcctgtcagcagaagaaaaaaaagaacagactattgaaataaaagaagaagtggttgggctaactgaaacatcttcccaaccaaagaatgaagaagacattgaaattattccaatccaagaagaggaagaagaagaaacagagacgaactttccagaacctccccaagatcaggaatcctcaccaatagaaaatgacagctctccttaagtgatttcttctgttttctgtttccttttttaaacattagtgttcatagcttccaagagacatgctgactttcatttcttgaggtactctgcacatacgcaccacatctctatctggcctttgcatggagtgaccatagctccttctctcttacattgaatgtagagaatgtagccattgtagcagcttgtgttgtcacgcttcttcttttgagcaactttcttacactgaagaaaggcagaatgagtgcttcagaatgtgatttcctactaacctgttccttggataggctttttagtatagtatttttttttgtcattttctccatcagcaaccagggagactgcacctgatggaaaagatatatgactgcttcatgacattcctaaactatcttttttttattccacatctacgtttttggtggagtcccttttgcatcattgttttaaggatgataaaaaaaaataacaactagggacaatacagaacccattccatttatctttctacagggctgacattgtggcacattcttagagttaccacaccccatgagggaagctctaaatagccaacacccatctgttttttgtaaaaacagcatagcttatacatggacatgtctctgccttaacttttcctaactcccactctaggctattgtttgcatgtctacctacttttagccattatgcgagaaaagaaaaaaatgaccatagaaaatgccaccatgaggtgcccaaatttcaaataataattaacatttagttatatttataatttccagatgacaaagtatttcatcaaataacttcatttgatgttccatgatcaagaaagaatccctatctctattttacaagtaattcaaagaggccaaataacttgtaaacaagaaaaggtaacttgtcaacagtcataactagtaattatgagagccttgtttcataaccaggtcttcttactcaaatcctgtgatgtttgaaataaccaaattgtctctccaatgtctgcataaactgtgagagccaagtcaacagcttttatcaagaatttactctctgaccagcaataaacaagcactgagagacacagagagccagattcagattttacccatggggataaaaagactcagactttcaccacatttggaaaactacttgcatcataaatatataataactggtagtttatatgaagcagacactaagtgctatagacactctcagaatatcatacttggaaacaatgtaattaaaatgccgaatctgagtcaacagctgccctacttttcaattcagatatactagtaccttacctagaaataatgttaacctagggtgaagtcactataatctgtagtctattatttgggcatttgctacatgatgagtgctgccagattgtggcaggtaaagagacaatgtaatttgcactccctatgatatttctacatttttagcgaccactagtggaagacattccccaaaattagaaaaaaaggagatagaagatttctgtctatgtaaagttctcaaaatttgttctaaattaataaaactatctttgtgttcttttctgca

SEQ ID NO: 447728 - DNA, 3419 bp, Homo sapiens
ttcagctatatgaagtgttaacccagtaattgggcgaagccagtgaccaactaatgagattctggtactgaatgtaatagagaattctattctcggcttgaataaacaattaacttcccatgtgtgctagaaccaatgggccaattgaactcggaataagcatccaattcagcctttagatattgagaggccttgagacatctcagacattgtgagaacgcaaatgagcacaccaccagaaattcagtaaatgggactttcccggcagagccaatgaaaggccctattgctatgcaatctggtccaaaaccactcttcaggaggatgtcttcactggtgggccccacgcaaagcttcttcatgagggaatctaagactttgggggctgtccagattatgaatgggctcttccacattgccctggggggtcttctgatgatcccagcagggatctatgcacccatctgtgtgactgtgtggtaccctctctggggaggcattatgtatattatttccggatcactcctggcagcaacggagaaaaactccaggaagtgtttggtcaaaggaaaaatgataatgaattcattgagcctctttgctgccatttctggaatgattctttcaatcatggacatacttaatattaaaatttcccattttttaaaaatggagagtctgaattttattagagctcacacaccatatattaacatatacaactgtgaaccagctaatccctctgagaaaaactccccatctacccaatactgttacagcatacaatctctgttcttgggcattttgtcagtgatgctgatctttgccttcttccaggaacttgtaatagctggcatcgttgagaatgaatggaaaagaacgtgctccagacccaaatctaacatagttctcctgtcagcagaagaaaaaaaagaacagactattgaaataaaagaagaagtggttgggctaactgaaacatcttcccaaccaaagaatgaagaagacattgaaattattccaatccaagaagaggaagaagaagaaacagagacgaactttccagaacctccccaagatcaggaatcctcaccaatagaaaatgacagctctccttaagtgatttcttctgttttctgtttccttttttaaacattagtgttcatagcttccaagagacatgctgactttcatttcttgaggtactctgcacatacgcaccacatctctatctggcctttgcatggagtgaccatagctccttctctcttacattgaatgtagagaatgtagccattgtagcagcttgtgttgtcacgcttcttcttttgagcaactttcttacactgaagaaaggcagaatgagtgcttcagaatgtgatttcctactaacctgttccttggataggctttttagtatagtatttttttttgtcattttctccatcagcaaccagggagactgcacctgatggaaaagatatatgactgcttcatgacattcctaaactatcttttttttattccacatctacgtttttggtggagtcccttttgcatcattgttttaaggatgataaaaaaaaataacaactagggacaatacagaacccattccatttatctttctacagggctgacattgtggcacattcttagagttaccacaccccatgagggaagctctaaatagccaacacccatctgttttttgtaaaaacagcatagcttatacatggacatgtctctgccttaacttttcctaactcccactctaggctattgtttgcatgtctacctacttttagccattatgcgagaaaagaaaaaaatgaccatagaaaatgccaccatgaggtgcccaaatttcaaataataattaacatttagttatatttataatttccagatgacaaagtatttcatcaaataacttcatttgatgttccatgatcaagaaagaatccctatctctattttacaagtaattcaaagaggccaaataacttgtaaacaagaaaaggtaacttgtcaacagtcataactagtaattatgagagccttgtttcataaccaggtcttcttactcaaatcctgtgatgtttgaaataaccaaattgtctctccaatgtctgcataaactgtgagagccaagtcaacagcttttatcaagaatttactctctgaccagcaataaacaagcactgagagacacagagagccagattcagattttacccatggggataaaaagactcagactttcaccacatttggaaaactacttgcatcataaatatataataactggtagtttatatgaagcagacactaagtgctatagacactctcagaatatcatacttggaaacaatgtaattaaaatgccgaatctgagtcaacagctgccctacttttcaattcagatatactagtaccttacctagaaataatgttaacctagggtgaagtcactataatctgtagtctattatttgggcatttgctacatgatgagtgctgccagattgtggcaggtaaagagacaatgtaatttgcactccctatgatatttctacatttttagcgaccactagtggaagacattccccaaaattagaaaaaaaggagatagaagatttctgtctatgtaaagttctcaaaatttgttctaaattaataaaactatctttgtgttcttttctgcaacagatgattccaacatgggtgtttgtctattcttctttactcttgaaacattagaccatgggaggctcttacagccttgagttgatatttatacaacccaaatctaggtttgaacggtgaggtgtcaggtcatcaaatattcatgtctatatagtcttacacaggttctcaaaaaaaatgttcatgggataggtcattgataatggattccttattctgagaactccagacgactgaaatatatgagagaaggaaaaggacatagtaggagcaggcctgagaaaaaaatgaaagtcagaaatctttaaaaaaatacaagatcttatttctatcttattttttctcctcttctgaaatatatatgaggattcctctccaaacccatggtttctctaagaattttgagtcatttgtatgacctcaaataattagttttagctgacctcacataactccttataataggagacatctttaatgtctgctattaaagaaggatgaaaattcctatgaccttctccccgattatccctttggcaatatagagtcaaataataacattgaccaatagtaaacatgctttgccaagaagtagaagatatattctctagccttagtttttcctcccaatttgcatttttgtaaaaataatgttgtatccacaaaggaaataaactttaaaaacccaagtgcactcattgaaaaaaaaa

SEQ ID NO: 447729 - DNA, 3077 bp, Homo sapiens
atggatggtgaatgagatagggaagactgagaaaagaacaggatagagacatgattttattttatagtgacaaagaggctaaaaacaactgagagaacttcagtatatttagttgtagttgctttgtgagtcagggcagttgcatttggaattccctcccagattatgttttccaaagggaaatcaaacccaattaataaatctgtgtctccatttcaggtcaaaggaaaaatgataatgaattcattgagcctctttgctgccatttctggaatgattctttcaatcatggacatacttaatattaaaatttcccattttttaaaaatggagagtctgaattttattagagctcacacaccatatattaacatatacaactgtgaaccagctaatccctctgagaaaaactccccatctacccaatactgttacagcatacaatctctgttcttgggcattttgtcagtgatgctgatctttgccttcttccaggaacttgtaatagctggcatcgttgagaatgaatggaaaagaacgtgctccagacccaaatctaacatagttctcctgtcagcagaagaaaaaaaagaacagactattgaaataaaagaagaagtggttgggctaactgaaacatcttcccaaccaaagaatgaagaagacattgaaattattccaatccaagaagaggaagaagaagaaacagagacgaactttccagaacctccccaagatcaggaatcctcaccaatagaaaatgacagctctccttaagtgatttcttctgttttctgtttccttttttaaacattagtgttcatagcttccaagagacatgctgactttcatttcttgaggtactctgcacatacgcaccacatctctatctggcctttgcatggagtgaccatagctccttctctcttacattgaatgtagagaatgtagccattgtagcagcttgtgttgtcacgcttcttcttttgagcaactttcttacactgaagaaaggcagaatgagtgcttcagaatgtgatttcctactaacctgttccttggataggctttttagtatagtatttttttttgtcattttctccatcagcaaccagggagactgcacctgatggaaaagatatatgactgcttcatgacattcctaaactatcttttttttattccacatctacgtttttggtggagtcccttttgcatcattgttttaaggatgataaaaaaaaataacaactagggacaatacagaacccattccatttatctttctacagggctgacattgtggcacattcttagagttaccacaccccatgagggaagctctaaatagccaacacccatctgttttttgtaaaaacagcatagcttatacatggacatgtctctgccttaacttttcctaactcccactctaggctattgtttgcatgtctacctacttttagccattatgcgagaaaagaaaaaaatgaccatagaaaatgccaccatgaggtgcccaaatttcaaataataattaacatttagttatatttataatttccagatgacaaagtatttcatcaaataacttcatttgatgttccatgatcaagaaagaatccctatctctattttacaagtaattcaaagaggccaaataacttgtaaacaagaaaaggtaacttgtcaacagtcataactagtaattatgagagccttgtttcataaccaggtcttcttactcaaatcctgtgatgtttgaaataaccaaattgtctctccaatgtctgcataaactgtgagagccaagtcaacagcttttatcaagaatttactctctgaccagcaataaacaagcactgagagacacagagagccagattcagattttacccatggggataaaaagactcagactttcaccacatttggaaaactacttgcatcataaatatataataactggtagtttatatgaagcagacactaagtgctatagacactctcagaatatcatacttggaaacaatgtaattaaaatgccgaatctgagtcaacagctgccctacttttcaattcagatatactagtaccttacctagaaataatgttaacctagggtgaagtcactataatctgtagtctattatttgggcatttgctacatgatgagtgctgccagattgtggcaggtaaagagacaatgtaatttgcactccctatgatatttctacatttttagcgaccactagtggaagacattccccaaaattagaaaaaaaggagatagaagatttctgtctatgtaaagttctcaaaatttgttctaaattaataaaactatctttgtgttcttttctgcaacagatgattccaacatgggtgtttgtctattcttctttactcttgaaacattagaccatgggaggctcttacagccttgagttgatatttatacaacccaaatctaggtttgaacggtgaggtgtcaggtcatcaaatattcatgtctatatagtcttacacaggttctcaaaaaaaatgttcatgggataggtcattgataatggattccttattctgagaactccagacgactgaaatatatgagagaaggaaaaggacatagtaggagcaggcctgagaaaaaaatgaaagtcagaaatctttaaaaaaatacaagatcttatttctatcttattttttctcctcttctgaaatatatatgaggattcctctccaaacccatggtttctctaagaattttgagtcatttgtatgacctcaaataattagttttagctgacctcacataactccttataataggagacatctttaatgtctgctattaaagaaggatgaaaattcctatgaccttctccccgattatccctttggcaatatagagtcaaataataacattgaccaatagtaaacatgctttgccaagaagtagaagatatattctctagccttagtttttcctcccaatttgcatttttgtaaaaataatgttgtatccacaaaggaaataaactttaaaaacccaagtgcactcattgaaaaaaaaa

SEQ ID NO: 447730 - DNA, 1519 bp, Homo sapiens
catcttcaggcctggactacaccactcaccctcccagtgtgcttgagaaacaaactgcacccactgaactccgcagctagcatccaaatcagcccttgagatttgaggccttggagactcaggagttttgagagcaaaatgacaacacccagaaattcagtaaatgggactttcccggcagagccaatgaaaggccctattgctatgcaatctggtccaaaaccactcttcaggaggatgtcttcactggtgggccccacgcaaagcttcttcatgagggaatctaagactttgggggctgtccagattatgaatgggctcttccacattgccctggggggtcttctgatgatcccagcagggatctatgcacccatctgtgtgactgtgtggtaccctctctggggaggcattatgtatattatttccggatcactcctggcagcaacggagaaaaactccaggaagtgtttggtcaaaggaaaaatgataatgaattcattgagcctctttgctgccatttctggaatgattctttcaatcatggacatacttaatattaaaatttcccattttttaaaaatggagagtctgaattttattagagctcacacaccatatattaacatatacaactgtgaaccagctaatccctctgagaaaaactccccatctacccaatactgttacagcatacaatctctgttcttgggcattttgtcagtgatgctgatctttgccttcttccaggaacttgtaatagctggcatcgttgagaatgaatggaaaagaacgtgctccagacccaaatctaacatagttctcctgtcagcagaagaaaaaaaagaacagactattgaaataaaagaagaagtggttgggctaactgaaacatcttcccaaccaaagaatgaagaagacattgaaattattccaatccaagaagaggaagaagaagaaacagagacgaactttccagaacctccccaagatcaggaatcctcaccaatagaaaatgacagctctccttaagtgatttcttctgttttctgtttccttttttaaacattagtgttcatagcttccaagagacatgctgactttcatttcttgaggtactctgcacatacgcaccacatctctatctggcctttgcatggagtgaccatagctccttctctcttacattgaatgtagagaatgtagccattgtagcagcttgtgttgtcacgcttcttcttttgagcaactttcttacactgaagaaaggcagaatgagtgcttcagaatgtgatttcctactaacctgttccttggataggctttttagtatagtatttttttttgtcattttctccatcagcaaccagggagactgcacctgatggaaaagatatatgactgcttcatgacattcctaaactatcttttttttattccacatctacgtttttggtggagtccctttttatcatccttaaaacaatgatgcaaaagggctttagagcacaatggatct

SEQ ID NO: 447731 - DNA, 3332 bp, Homo sapiens
catcttcaggcctggactacaccactcaccctcccagtgtgcttgagaaacaaactgcacccactgaactccgcagctagcatccaaatcagcccttgagatttgaggccttggagactcaggagttttgagagcaaaatgacaacacccagaaattcagtaaatgggactttcccggcagagccaatgaaaggccctattgctatgcaatctggtccaaaaccactcttcaggaggatgtcttcactggtgggccccacgcaaagcttcttcatgagggaatctaagactttgggggctgtccagattatgaatgggctcttccacattgccctggggggtcttctgatgatcccagcagggatctatgcacccatctgtgtgactgtgtggtaccctctctggggaggcattatgtatattatttccggatcactcctggcagcaacggagaaaaactccaggaagtgtttggtcaaaggaaaaatgataatgaattcattgagcctctttgctgccatttctggaatgattctttcaatcatggacatacttaatattaaaatttcccattttttaaaaatggagagtctgaattttattagagctcacacaccatatattaacatatacaactgtgaaccagctaatccctctgagaaaaactccccatctacccaatactgttacagcatacaatctctgttcttgggcattttgtcagtgatgctgatctttgccttcttccaggaacttgtaatagctggcatcgttgagaatgaatggaaaagaacgtgctccagacccaaatctaacatagttctcctgtcagcagaagaaaaaaaagaacagactattgaaataaaagaagaagtggttgggctaactgaaacatcttcccaaccaaagaatgaagaagacattgaaattattccaatccaagaagaggaagaagaagaaacagagacgaactttccagaacctccccaagatcaggaatcctcaccaatagaaaatgacagctctccttaagtgatttcttctgttttctgtttccttttttaaacattagtgttcatagcttccaagagacatgctgactttcatttcttgaggtactctgcacatacgcaccacatctctatctggcctttgcatggagtgaccatagctccttctctcttacattgaatgtagagaatgtagccattgtagcagcttgtgttgtcacgcttcttcttttgagcaactttcttacactgaagaaaggcagaatgagtgcttcagaatgtgatttcctactaacctgttccttggataggctttttagtatagtatttttttttgtcattttctccatcagcaaccagggagactgcacctgatggaaaagatatatgactgcttcatgacattcctaaactatcttttttttattccacatctacgtttttggtggagtcccttttgcatcattgttttaaggatgataaaaaaaaataacaactagggacaatacagaacccattccatttatctttctacagggctgacattgtggcacattcttagagttaccacaccccatgagggaagctctaaatagccaacacccatctgttttttgtaaaaacagcatagcttatacatggacatgtctctgccttaacttttcctaactcccactctaggctattgtttgcatgtctacctacttttagccattatgcgagaaaagaaaaaaatgaccatagaaaatgccaccatgaggtgcccaaatttcaaataataattaacatttagttatatttataatttccagatgacaaagtatttcatcaaataacttcatttgatgttccatgatcaagaaagaatccctatctctattttacaagtaattcaaagaggccaaataacttgtaaacaagaaaaggtaacttgtcaacagtcataactagtaattatgagagccttgtttcataaccaggtcttcttactcaaatcctgtgatgtttgaaataaccaaattgtctctccaatgtctgcataaactgtgagagccaagtcaacagcttttatcaagaatttactctctgaccagcaataaacaagcactgagagacacagagagccagattcagattttacccatggggataaaaagactcagactttcaccacatttggaaaactacttgcatcataaatatataataactggtagtttatatgaagcagacactaagtgctatagacactctcagaatatcatacttggaaacaatgtaattaaaatgccgaatctgagtcaacagctgccctacttttcaattcagatatactagtaccttacctagaaataatgttaacctagggtgaagtcactataatctgtagtctattatttgggcatttgctacatgatgagtgctgccagattgtggcaggtaaagagacaatgtaatttgcactccctatgatatttctacatttttagcgaccactagtggaagacattccccaaaattagaaaaaaaggagatagaagatttctgtctatgtaaagttctcaaaatttgttctaaattaataaaactatctttgtgttcttttctgcaacagatgattccaacatgggtgtttgtctattcttctttactcttgaaacattagaccatgggaggctcttacagccttgagttgatatttatacaacccaaatctaggtttgaacggtgaggtgtcaggtcatcaaatattcatgtctatatagtcttacacaggttctcaaaaaaaatgttcatgggataggtcattgataatggattccttattctgagaactccagacgactgaaatatatgagagaaggaaaaggacatagtaggagcaggcctgagaaaaaaatgaaagtcagaaatctttaaaaaaatacaagatcttatttctatcttattttttctcctcttctgaaatatatatgaggattcctctccaaacccatggtttctctaagaattttgagtcatttgtatgacctcaaataattagttttagctgacctcacataactccttataataggagacatctttaatgtctgctattaaagaaggatgaaaattcctatgaccttctccccgattatccctttggcaatatagagtcaaataataacattgaccaatagtaaacatgctttgccaagaagtagaagatatattctctagccttagtttttcctcccaatttgcatttttgtaaaaataatgttgtatccacaaaggaaataaactttaaaaacccaagtgcactcattgaaaaaaaaa

SEQ ID NO: 447732 - DNA, 3595 bp, Homo sapiens
catcttcaggcctggactacaccactcaccctcccagtgtgcttgagaaacaaactgcacccactgaactccgcagctagcatccaaatcagcccttgagatttgaggccttggagactcagatcctgaacaagagagaacaaaatctctactttgatggaacttccattctgtggggaagagactgacaataagcaattaaataaataagaactcagcagtaggccttgcctcagatccaaggtcactcggaagaggccatgtctaccctcaatgacactcatggaggaaatgctgagagaagcattcagatgcatgacacaaggtaagactgccaaaaatcttgttcttgctctcctcattttgttatttgttttatttttaggagttttgagagcaaaatgacaacacccagaaattcagtaaatgggactttcccggcagagccaatgaaaggccctattgctatgcaatctggtccaaaaccactcttcaggaggatgtcttcactggtgggccccacgcaaagcttcttcatgagggaatctaagactttgggggctgtccagattatgaatgggctcttccacattgccctggggggtcttctgatgatcccagcagggatctatgcacccatctgtgtgactgtgtggtaccctctctggggaggcattatgtatattatttccggatcactcctggcagcaacggagaaaaactccaggaagtgtttggtcaaaggaaaaatgataatgaattcattgagcctctttgctgccatttctggaatgattctttcaatcatggacatacttaatattaaaatttcccattttttaaaaatggagagtctgaattttattagagctcacacaccatatattaacatatacaactgtgaaccagctaatccctctgagaaaaactccccatctacccaatactgttacagcatacaatctctgttcttgggcattttgtcagtgatgctgatctttgccttcttccaggaacttgtaatagctggcatcgttgagaatgaatggaaaagaacgtgctccagacccaaatctaacatagttctcctgtcagcagaagaaaaaaaagaacagactattgaaataaaagaagaagtggttgggctaactgaaacatcttcccaaccaaagaatgaagaagacattgaaattattccaatccaagaagaggaagaagaagaaacagagacgaactttccagaacctccccaagatcaggaatcctcaccaatagaaaatgacagctctccttaagtgatttcttctgttttctgtttccttttttaaacattagtgttcatagcttccaagagacatgctgactttcatttcttgaggtactctgcacatacgcaccacatctctatctggcctttgcatggagtgaccatagctccttctctcttacattgaatgtagagaatgtagccattgtagcagcttgtgttgtcacgcttcttcttttgagcaactttcttacactgaagaaaggcagaatgagtgcttcagaatgtgatttcctactaacctgttccttggataggctttttagtatagtatttttttttgtcattttctccatcagcaaccagggagactgcacctgatggaaaagatatatgactgcttcatgacattcctaaactatcttttttttattccacatctacgtttttggtggagtcccttttgcatcattgttttaaggatgataaaaaaaaataacaactagggacaatacagaacccattccatttatctttctacagggctgacattgtggcacattcttagagttaccacaccccatgagggaagctctaaatagccaacacccatctgttttttgtaaaaacagcatagcttatacatggacatgtctctgccttaacttttcctaactcccactctaggctattgtttgcatgtctacctacttttagccattatgcgagaaaagaaaaaaatgaccatagaaaatgccaccatgaggtgcccaaatttcaaataataattaacatttagttatatttataatttccagatgacaaagtatttcatcaaataacttcatttgatgttccatgatcaagaaagaatccctatctctattttacaagtaattcaaagaggccaaataacttgtaaacaagaaaaggtaacttgtcaacagtcataactagtaattatgagagccttgtttcataaccaggtcttcttactcaaatcctgtgatgtttgaaataaccaaattgtctctccaatgtctgcataaactgtgagagccaagtcaacagcttttatcaagaatttactctctgaccagcaataaacaagcactgagagacacagagagccagattcagattttacccatggggataaaaagactcagactttcaccacatttggaaaactacttgcatcataaatatataataactggtagtttatatgaagcagacactaagtgctatagacactctcagaatatcatacttggaaacaatgtaattaaaatgccgaatctgagtcaacagctgccctacttttcaattcagatatactagtaccttacctagaaataatgttaacctagggtgaagtcactataatctgtagtctattatttgggcatttgctacatgatgagtgctgccagattgtggcaggtaaagagacaatgtaatttgcactccctatgatatttctacatttttagcgaccactagtggaagacattccccaaaattagaaaaaaaggagatagaagatttctgtctatgtaaagttctcaaaatttgttctaaattaataaaactatctttgtgttcttttctgcaacagatgattccaacatgggtgtttgtctattcttctttactcttgaaacattagaccatgggaggctcttacagccttgagttgatatttatacaacccaaatctaggtttgaacggtgaggtgtcaggtcatcaaatattcatgtctatatagtcttacacaggttctcaaaaaaaatgttcatgggataggtcattgataatggattccttattctgagaactccagacgactgaaatatatgagagaaggaaaaggacatagtaggagcaggcctgagaaaaaaatgaaagtcagaaatctttaaaaaaatacaagatcttatttctatcttattttttctcctcttctgaaatatatatgaggattcctctccaaacccatggtttctctaagaattttgagtcatttgtatgacctcaaataattagttttagctgacctcacataactccttataataggagacatctttaatgtctgctattaaagaaggatgaaaattcctatgaccttctccccgattatccctttggcaatatagagtcaaataataacattgaccaatagtaaacatgctttgccaagaagtagaagatatattctctagccttagtttttcctcccaatttgcatttttgtaaaaataatgttgtatccacaaaggaaataaactttaaaaacccaagtgcactcattgaaaaaaaaa

SEQ ID NO: 447733 - DNA, 2983 bp, Homo sapiens
tctcccaaggatgaagaggtctcctaggcatgatgccacaccaactaaggctgaatacaatttaatttgagactcattacttattctttcctatacagaattgattcttcaactgattattcataccttactttctatcagcaatacacattaaccatctgttgtgtgccaaaagttgtgttaagagttagggttataaagatgctgtctcctgtactagcagttctcacagctattcattacttgtctaaagaattgatctcttaatcgttcaattatagtcaacaataacttactgaacaccaacaatgttctttgtgccattattacattttcaccttcattcttctgttgtttttcagggcattttgtcagtgatgctgatctttgccttcttccaggaacttgtaatagctggcatcgttgagaatgaatggaaaagaacgtgctccagacccaaatctaacatagttctcctgtcagcagaagaaaaaaaagaacagactattgaaataaaagaagaagtggttgggctaactgaaacatcttcccaaccaaagaatgaagaagacattgaaattattccaatccaagaagaggaagaagaagaaacagagacgaactttccagaacctccccaagatcaggaatcctcaccaatagaaaatgacagctctccttaagtgatttcttctgttttctgtttccttttttaaacattagtgttcatagcttccaagagacatgctgactttcatttcttgaggtactctgcacatacgcaccacatctctatctggcctttgcatggagtgaccatagctccttctctcttacattgaatgtagagaatgtagccattgtagcagcttgtgttgtcacgcttcttcttttgagcaactttcttacactgaagaaaggcagaatgagtgcttcagaatgtgatttcctactaacctgttccttggataggctttttagtatagtatttttttttgtcattttctccatcagcaaccagggagactgcacctgatggaaaagatatatgactgcttcatgacattcctaaactatcttttttttattccacatctacgtttttggtggagtcccttttgcatcattgttttaaggatgataaaaaaaaataacaactagggacaatacagaacccattccatttatctttctacagggctgacattgtggcacattcttagagttaccacaccccatgagggaagctctaaatagccaacacccatctgttttttgtaaaaacagcatagcttatacatggacatgtctctgccttaacttttcctaactcccactctaggctattgtttgcatgtctacctacttttagccattatgcgagaaaagaaaaaaatgaccatagaaaatgccaccatgaggtgcccaaatttcaaataataattaacatttagttatatttataatttccagatgacaaagtatttcatcaaataacttcatttgatgttccatgatcaagaaagaatccctatctctattttacaagtaattcaaagaggccaaataacttgtaaacaagaaaaggtaacttgtcaacagtcataactagtaattatgagagccttgtttcataaccaggtcttcttactcaaatcctgtgatgtttgaaataaccaaattgtctctccaatgtctgcataaactgtgagagccaagtcaacagcttttatcaagaatttactctctgaccagcaataaacaagcactgagagacacagagagccagattcagattttacccatggggataaaaagactcagactttcaccacatttggaaaactacttgcatcataaatatataataactggtagtttatatgaagcagacactaagtgctatagacactctcagaatatcatacttggaaacaatgtaattaaaatgccgaatctgagtcaacagctgccctacttttcaattcagatatactagtaccttacctagaaataatgttaacctagggtgaagtcactataatctgtagtctattatttgggcatttgctacatgatgagtgctgccagattgtggcaggtaaagagacaatgtaatttgcactccctatgatatttctacatttttagcgaccactagtggaagacattccccaaaattagaaaaaaaggagatagaagatttctgtctatgtaaagttctcaaaatttgttctaaattaataaaactatctttgtgttcttttctgcaacagatgattccaacatgggtgtttgtctattcttctttactcttgaaacattagaccatgggaggctcttacagccttgagttgatatttatacaacccaaatctaggtttgaacggtgaggtgtcaggtcatcaaatattcatgtctatatagtcttacacaggttctcaaaaaaaatgttcatgggataggtcattgataatggattccttattctgagaactccagacgactgaaatatatgagagaaggaaaaggacatagtaggagcaggcctgagaaaaaaatgaaagtcagaaatctttaaaaaaatacaagatcttatttctatcttattttttctcctcttctgaaatatatatgaggattcctctccaaacccatggtttctctaagaattttgagtcatttgtatgacctcaaataattagttttagctgacctcacataactccttataataggagacatctttaatgtctgctattaaagaaggatgaaaattcctatgaccttctccccgattatccctttggcaatatagagtcaaataataacattgaccaatagtaaacatgctttgccaagaagtagaagatatattctctagccttagtttttcctcccaatttgcatttttgtaaaaataatgttgtatccacaaaggaaataaactttaaaaacccaagtgcactcattgaaaaaaaaa

SEQ ID NO: 447734 - DNA, 574 bp, Homo sapiens
  misc_feature (1)..(2): n is a, c, g, or t
nntttttttgtagagatggagtctcagtatgtttcccagtctggtcccgaactgtgctggcctcaagccatcctccccccttagcctcccaaagtgctgggattataggtgtgagcctctggacccagccccagtatcatgctattccaaacaatgctacctcaaaatattttgcacttatatgtaaatatatacaatcatataattacacgtgggttcatatctctgtagaatatggacttcagtgtggaatttctgggtcaaatgggatgcatactaaatatttttctagatcatagcaaattatcttctcaaaaggctgtatcattttatattcccaccaacatacttgtttactctttcttgccaacattggatattatctctaatattttacaagtctgtaaagtgatgttagtataccaaatgagcaaaattaacaacatttgaagttatttttagcttatccaatcttgctcatactcacttgctcaagaagaaaagttatgtgcaagccattctgcaactactacctccccttttaattaagaaatgtcttccaaacttttgcctt

SEQ ID NO: 447735 - DNA, 4138 bp, Homo sapiens
  misc_feature (1112)..(1112): n is a, c, g, or t
  misc_feature (1114)..(1115): n is a, c, g, or t
  misc_feature (1121)..(1121): n is a, c, g, or t
cccactatgttggccaggatggtcttgatttcttgacctcgtgttctgcccgcctctacctcccaaagtgccgggattacaggcgtgactgctgtgcccggccccagcatcacttttatagctttctgtgcctcttcctctgggccttggtgtatgaagccacttgcctttctctgttgggaagcgagcagaatcagattgctactcatgatgcagtccgggcagggcatactgtcacctttggctgtggacacagttgtcaggataggggagaagccctttaggtccgtcttcttgacacagccctcctacctggttacgctggtgctttcgcttggtttagacaaccaagacacttgagaattatgctgtcctcagaatgtctgatgaaaagaacagattcactttttggacacaatgcccattagccatctttggcagtgtttctgatcaaaggttccccatgcctgctctaggaaagtaaacttttttcagaataaatcctcaaatggattactgagtagtctttgcaccattcccatcagcctaatcagactgaatggtcacgctcagtgcaaaaagctgttttgctgttaggatgtttcagtgtttcttgtctttcctggaacagttcagttgtttaaatttagtaattcaatcctgaccagtgtaaacccacttaattattgcagcctaaagaattcagctacttctactcttcataaatgtgcccaagtaaatatgtgtttttaatattcaaccctggaaaattagtaattcagatgataaaagctcatgttttggtgtctttgtactcagattgtgaacaggcatatttcactgatttagacttagtatacttgatgagaatgctcaggttgaagagatagttctgtcagcaatccaacatctatagcaatgtggaaaaagtaatcaactcatatttcacgaatttgatgtatgttgtgatttagagggcatgagataaagtttatatttgaactgtgtggggtagggggaagaagaggttgcttaagcaaatgggggggtgattgaggaacaagatgtctctaagatgagaagttattttcttgcatcatagaagcactctntnnacccgngagtgattgtgttaactataaatcatttatatctgtacattaaagcagattccctcaattaggcaaatttggttagccaagcccaagttattgtttgtacttgaaagtaataaagctgcatttccttaaaaatatattctgtagttaagactttgtcttgctttccggaattcttgtttttcttttcctctagagacctcggcttgcaactggatcaaacgctgtcgaaaggatgtaaataggcagagcaactgttaccaagaaggccaccacccccacccaaaggcagtgaggagtgtggggcttcgtctgggctcccccgagtctcaacagtaatcaacagtcaggtgttgattgcaacttttcaaggtcagccaccgggagtagcctattccctctaggaaccttggagggcataccttgctgggactcaacttggctgagaaatgcacaagatgccaaaggaggaaggattatagggggcgtgtgtgtgacccccaagaccgatcttccgctatcaccctaatctccggttccccgctacccgggcgggggtgagtatgtgacatgtgcctaactctcagcagcaacttcggcagcaggtgtcgatcctaactaagcaggagctgcggctgccgggtgtgccctcaccaagccatgcgagccccgggcgcgcttctcgcccgcatgtcgcggctactgcttctgctactgctcaaggtgtctgcctcttctgccctcggggtcgcccctgcgtccagaaacgaaacttgtctgggggagagctgtgcacctacagtgatccagcgccgcggcagggacgcctggggaccgggaaattctgcaagagacgttctgcgagcccgagcacccagggaggagcagggggcagcgtttcttgcgggaccctcctgggacctgccggcggccccgggccgtgacccggctgcaggcagaggggcggaggcgtcggcagccggacccccgggacctccaaccaggccacctggcccctggaggtggaaaggtgctcggggtcaggagccttctgaaactttggggagagggaaccccacggccctccagctcttccttcagatctcagaggaggaagagaagggtcccagaggcgctggcatttccgggcgtagccaggagcagagtgtgaagacagtccccggagccagcgatcttttttactggccaaggagagccgggaaactccagggttcccaccacaagcccctgtccaagacggccaatggactggcggggcacgaagggtggacaattgcactcccgggccgggcgctggcccagaatggatccttgggtgaaggaatccatgagcctgggggtccccgccggggaaacagcacgaaccggcgtgtgagactgaagaaccccttctacccgctgacccaggagtcctatggagcctacgcggtcatgtgtctgtccgtggtgatcttcgggaccggcatcattggcaacctggcggtgatgtgcatcgtgtgccacaactactacatgcggagcatctccaactccctcttggccaacctggccttctgggactttctcatcatcttcttctgccttccgctggtcatcttccacgagctgaccaagaagtggctgctggaggacttctcctgcaagatcgtgccctatatagaggtcgcttctctgggagtcaccaccttcaccttatgtgctctgtgcatagaccgcttccgtgctgccaccaacgtacagatgtactacgaaatgatcgaaaactgttcctcaacaactgccaaacttgctgttatatgggtgggagctctattgttagcacttccagaagttgttctccgccagctgagcaaggaggatttggggtttagtggccgagctccggcagaaaggtgcattattaagatctctcctgatttaccagacaccatctatgttctagccctcacctacgacagtgcgagactgtggtggtattttggctgttacttttgtttgcccacgcttttcaccatcacctgctctctagtgactgcgaggaaaatccgcaaagcagagaaagcctgtacccgagggaataaacggcagattcaactagagagtcagatgaactgtacagtagtggcactgaccattttatatggattttgcattattcctgaaaatatctgcaacattgttactgcctacatggctacaggggtttcacagcagacaatggacctccttaatatcatcagccagttccttttgttctttaagtcctgtgtcaccccagtcctccttttctgtctctgcaaacccttcagtcgggccttcatggagtgctgctgctgttgctgtgaggaatgcattcagaagtcttcaacggtgaccagtgatgacaatgacaacgagtacaccacggaactcgaactctcgcctttcagtaccatacgccgtgaaatgtccacttttgcttctgtcggaactcattgctgaaggacagtacttggttgggtcagatttatttgtttgattttcatatcccgtgaaagtttttaattcatatttttccttatagggaaaaatgcaaaaaagaaacaataaagaaagaaatattaactactgtagaactgattttacaaattaatatttgtgctttgaaaaaaagtttctatttagttatttaagaagaatgagaaggccaatagttttagattattttatctggtatggtgctaatattttatttgaaaaaagttactgcaacttaacttaaaattgctaacgttttttcttcttttaaaaatacaattattgtatattgattatagcaatgtgattttgtaggttattttatatttgagttgtgattgaaagtatgttgtatatggtattgtgagatgatttgtacttggaagcattcacaaagtagcaccaaataaattacactttattctttaatgtcattgtcaatctacttttaaccaatattcaataaatcttctaattgcctt

SEQ ID NO: 447736 - DNA, 3965 bp, Homo sapiens
ggctcggggacctgtcaggctggtttcgacagctggggaattaacctgtcccgcccatccctagcctcgagccgcgcaggctccgcgcctccgcccttgttccctcccagctcctccgagtggaagccgctacaaatggcttgaatgaaacgtgtgtgggtttagtgagtggtgaaccaccagggatcccgtctccccacaaaccagtatctctccgaggaggaggcgaaggagtgggaggaggcaacgagccgagagtcgagcttcgcgggcgcgcgcagcggctggagcgcgggggcgaggccgggccacctccccttcccggccgcgcactgcctggcccgcggcggttccaggcaccacccttcccgtccgggctgagcccgctgtggcagtgactagctcccgcggctagcggcactgtccaccgacgagcggcgccctcttctcccccttctccccacgatttccttctctgcggcggcacgccgtccagcagcctgcttcgccccgtcgtcaactttgagctggaggagaagcaactttggcagtggccgcggggttggaatcccgcttctcctcggcagcagtaggctcgcaagtcgctggggttaggtggggcaagagtttcgccggcgcatcagcgctgcttcggactgtttgcaacgtgtttccagcgagctgggagcggggttgtgactgcgagtcgtctgggggagggggacttgtttttcttttcctctagagacctcggcttgcaactggatcaaacgctgtcgaaaggatgtaaataggcagagcaactgttaccaagaaggccaccacccccacccaaaggcagtgaggagtgtggggcttcgtctgggctcccccgagtctcaacagtaatcaacagtcaggtgttgattgcaacttttcaaggtcagccaccgggagtagcctattccctctaggaaccttggagggcataccttgctgggactcaacttggctgagaaatgcacaagatgccaaaggaggaaggattatagggggcgtgtgtgtgacccccaagaccgatcttccgctatcaccctaatctccggttccccgctacccgggcgggggtgagtatgtgacatgtgcctaactctcagcagcaacttcggcagcaggtgtcgatcctaactaagcaggagctgcggctgccgggtgtgccctcaccaagccatgcgagccccgggcgcgcttctcgcccgcatgtcgcggctactgcttctgctactgctcaaggtgtctgcctcttctgccctcggggtcgcccctgcgtccagaaacgaaacttgtctgggggagagctgtgcacctacagtgatccagcgccgcggcagggacgcctggggaccgggaaattctgcaagagacgttctgcgagcccgagcacccagggaggagcagggggcagcgtttcttgcgggaccctcctgggacctgccggcggccccgggccgtgacccggctgcaggcagaggggcggaggcgtcggcagccggacccccgggacctccaaccaggccacctggcccctggaggtggaaaggtgctcggggtcaggagccttctgaaactttggggagagggaaccccacggccctccagctcttccttcagatctcagaggaggaagagaagggtcccagaggcgctggcatttccgggcgtagccaggagcagagtgtgaagacagtccccggagccagcgatcttttttactggccaaggagagccgggaaactccagggttcccaccacaagcccctgtccaagacggccaatggactggcggggcacgaagggtggacaattgcactcccgggccgggcgctggcccagaatggatccttgggtgaaggaatccatgagcctgggggtccccgccggggaaacagcacgaaccggcgtgtgagactgaagaaccccttctacccgctgacccaggagtcctatggagcctacgcggtcatgtgtctgtccgtggtgatcttcgggaccggcatcattggcaacctggcggtgatgtgcatcgtgtgccacaactactacatgcggagcatctccaactccctcttggccaacctggccttctgggactttctcatcatcttcttctgccttccgctggtcatcttccacgagctgaccaagaagtggctgctggaggacttctcctgcaagatcgtgccctatatagaggtcgcttctctgggagtcaccaccttcaccttatgtgctctgtgcatagaccgcttccgtgctgccaccaacgtacagatgtactacgaaatgatcgaaaactgttcctcaacaactgccaaacttgctgttatatgggtgggagctctattgttagcacttccagaagttgttctccgccagctgagcaaggaggatttggggtttagtggccgagctccggcagaaaggtgcattattaagatctctcctgatttaccagacaccatctatgttctagccctcacctacgacagtgcgagactgtggtggtattttggctgttacttttgtttgcccacgcttttcaccatcacctgctctctagtgactgcgaggaaaatccgcaaagcagagaaagcctgtacccgagggaataaacggcagattcaactagagagtcagatgaactgtacagtagtggcactgaccattttatatggattttgcattattcagacaatggacctccttaatatcatcagccagttccttttgttctttaagtcctgtgtcaccccagtcctccttttctgtctctgcaaacccttcagtcgggccttcatggagtgctgctgctgttgctgtgaggaatgcattcagaagtcttcaacggtgaccagtgatgacaatgacaacgagtacaccacggaactcgaactctcgcctttcagtaccatacgccgtgaaatgtccacttttgcttctgtcggaactcattgctgaaggacagtacttggttgggtcagatttatttgtttgattttcatatcccgtgaaagtttttaattcatatttttccttatagggaaaaatgcaaaaaagaaacaataaagaaagaaatattaactactgtagaactgattttacaaattaatatttgtgctttgaaaaaaagtttctatttagttatttaagaagaatgagaaggccaatagttttagattattttatctggtatggtgctaatattttatttgaaaaaagttactgcaacttaacttaaaattgctaacgttttttcttcttttaaaaatacaattattgtatattgattatagcaatgtgattttgtaggttattttatatttgagttgtgattgaaagtatgttgtatatggtattgtgagatgatttgtacttggaagcattcacaaagtagcaccaaataaattacactttattctttaatgtcattgtcaatctacttttaaccaatattcaataaatcttctaattgccttaaagatacaattactggttctatgcacaatttaaaaccggccttactgttttataacgtattttcttttaaggcaggtaatcattatgttataaagaagtttttctaatagcagtattttatatgcatgattcataaaactatgttgtatgttaaaacaaagctgtatttttaatattcaggtatagatgtcaaattacttctgaatacttataaaatatgaataaatagcagagtaggaagaaagtttcttttttaaaaaattcacctctgaactagcacatagagctacagattttcccttggggaattatgggcagaatcaagaattttaaaatgcagttgtcatctgatttcctctgaacactgacctttgaagctttgtgaatcctacgttaagcactctgagttctaatttttctccttttgaaaaataaacttgatgaaatct

SEQ ID NO: 447737 - DNA, 4019 bp, Homo sapiens
ggctcggggacctgtcaggctggtttcgacagctggggaattaacctgtcccgcccatccctagcctcgagccgcgcaggctccgcgcctccgcccttgttccctcccagctcctccgagtggaagccgctacaaatggcttgaatgaaacgtgtgtgggtttagtgagtggtgaaccaccagggatcccgtctccccacaaaccagtatctctccgaggaggaggcgaaggagtgggaggaggcaacgagccgagagtcgagcttcgcgggcgcgcgcagcggctggagcgcgggggcgaggccgggccacctccccttcccggccgcgcactgcctggcccgcggcggttccaggcaccacccttcccgtccgggctgagcccgctgtggcagtgactagctcccgcggctagcggcactgtccaccgacgagcggcgccctcttctcccccttctccccacgatttccttctctgcggcggcacgccgtccagcagcctgcttcgccccgtcgtcaactttgagctggaggagaagcaactttggcagtggccgcggggttggaatcccgcttctcctcggcagcagtaggctcgcaagtcgctggggttaggtggggcaagagtttcgccggcgcatcagcgctgcttcggactgtttgcaacgtgtttccagcgagctgggagcggggttgtgactgcgagtcgtctgggggagggggacttgtttttcttttcctctagagacctcggcttgcaactggatcaaacgctgtcgaaaggatgtaaataggcagagcaactgttaccaagaaggccaccacccccacccaaaggcagtgaggagtgtggggcttcgtctgggctcccccgagtctcaacagtaatcaacagtcaggtgttgattgcaacttttcaaggtcagccaccgggagtagcctattccctctaggaaccttggagggcataccttgctgggactcaacttggctgagaaatgcacaagatgccaaaggaggaaggattatagggggcgtgtgtgtgacccccaagaccgatcttccgctatcaccctaatctccggttccccgctacccgggcgggggtgagtatgtgacatgtgcctaactctcagcagcaacttcggcagcaggtgtcgatcctaactaagcaggagctgcggctgccgggtgtgccctcaccaagccatgcgagccccgggcgcgcttctcgcccgcatgtcgcggctactgcttctgctactgctcaaggtgtctgcctcttctgccctcggggtcgcccctgcgtccagaaacgaaacttgtctgggggagagctgtgcacctacagtgatccagcgccgcggcagggacgcctggggaccgggaaattctgcaagagacgttctgcgagcccgagcacccagggaggagcagggggcagcgtttcttgcgggaccctcctgggacctgccggcggccccgggccgtgacccggctgcaggcagaggggcggaggcgtcggcagccggacccccgggacctccaaccaggccacctggcccctggaggtggaaaggtgctcggggtcaggagccttctgaaactttggggagagggaaccccacggccctccagctcttccttcagatctcagaggaggaagagaagggtcccagaggcgctggcatttccgggcgtagccaggagcagagtgtgaagacagtccccggagccagcgatcttttttactggccaaggagagccgggaaactccagggttcccaccacaagcccctgtccaagacggccaatggactggcggggcacgaagggtggacaattgcactcccgggccgggcgctggcccagaatggatccttgggtgaaggaatccatgagcctgggggtccccgccggggaaacagcacgaaccggcgtgtgagactgaagaaccccttctacccgctgacccaggagtcctatggagcctacgcggtcatgtgtctgtccgtggtgatcttcgggaccggcatcattggcaacctggcggtgatgtgcatcgtgtgccacaactactacatgcggagcatctccaactccctcttggccaacctggccttctgggactttctcatcatcttcttctgccttccgctggtcatcttccacgagctgaccaagaagtggctgctggaggacttctcctgcaagatcgtgccctatatagaggtcgcttctctgggagtcaccaccttcaccttatgtgctctgtgcatagaccgcttccgtgctgccaccaacgtacagatgtactacgaaatgatcgaaaactgttcctcaacaactgccaaacttgctgttatatgggtgggagctctattgttagcacttccagaagttgttctccgccagctgagcaaggaggatttggggtttagtggccgagctccggcagaaaggtgcattattaagatctctcctgatttaccagacaccatctatgttctagccctcacctacgacagtgcgagactgtggtggtattttggctgttacttttgtttgcccacgcttttcaccatcacctgctctctagtgactgcgaggaaaatccgcaaagcagagaaagcctgtacccgagggaataaacggcagattcaactagagagtcagatgaactgtacagtagtggcactgaccattttatatggattttgcattattcctgaaaatatctgcaacattgttactgcctacatggctacaggggtttcacagcagacaatggacctccttaatatcatcagccagttccttttgttctttaagtcctgtgtcaccccagtcctccttttctgtctctgcaaacccttcagtcgggccttcatggagtgctgctgctgttgctgtgaggaatgcattcagaagtcttcaacggtgaccagtgatgacaatgacaacgagtacaccacggaactcgaactctcgcctttcagtaccatacgccgtgaaatgtccacttttgcttctgtcggaactcattgctgaaggacagtacttggttgggtcagatttatttgtttgattttcatatcccgtgaaagtttttaattcatatttttccttatagggaaaaatgcaaaaaagaaacaataaagaaagaaatattaactactgtagaactgattttacaaattaatatttgtgctttgaaaaaaagtttctatttagttatttaagaagaatgagaaggccaatagttttagattattttatctggtatggtgctaatattttatttgaaaaaagttactgcaacttaacttaaaattgctaacgttttttcttcttttaaaaatacaattattgtatattgattatagcaatgtgattttgtaggttattttatatttgagttgtgattgaaagtatgttgtatatggtattgtgagatgatttgtacttggaagcattcacaaagtagcaccaaataaattacactttattctttaatgtcattgtcaatctacttttaaccaatattcaataaatcttctaattgccttaaagatacaattactggttctatgcacaatttaaaaccggccttactgttttataacgtattttcttttaaggcaggtaatcattatgttataaagaagtttttctaatagcagtattttatatgcatgattcataaaactatgttgtatgttaaaacaaagctgtatttttaatattcaggtatagatgtcaaattacttctgaatacttataaaatatgaataaatagcagagtaggaagaaagtttcttttttaaaaaattcacctctgaactagcacatagagctacagattttcccttggggaattatgggcagaatcaagaattttaaaatgcagttgtcatctgatttcctctgaacactgacctttgaagctttgtgaatcctacgttaagcactctgagttctaatttttctccttttgaaaaataaacttgatgaaatct

SEQ ID NO: 447738 - DNA, 807 bp, Homo sapiens
agcccagttacccatgcctcattctggaaaactgttctctctctctctctcatttttatttatccatatttttttttacagttttgccaatctgcatttatttcctagtgctttgatctttcgggggacaccgggaataaatgtcttctatgttcccccacaggtcgcttctctgggagtcaccaccttcaccttatgtgctctgtgcatagaccgcttccgtgctgccaccaacgtacagatgtactacgaaatgatcgaaaactgttcctcaacaactgccaaacttgctgttatatgggtgggagctctattgttagcacttccagaagttgttctccgccagctgagcaaggaggatttggggtttagtggccgagctccggcagaaaggtgcattattaagatctctcctgatttaccagacaccatctatgttctagccctcacctacgacagtgcgagactgtggtggtattttggctgttacttttgtttgcccacgcttttcaccatcacctgctctctagtgactgcgaggaaaatccgcaaagcagagaaagcctgtacccgagggaataaacggcagattcaactagagagtcagatgaactgtacagtagtggcactgaccattttatatggattttgcattattcctgaaaatatctgcaacattgttactgcctacatggctacaggggtttcacagcagacaatggacctccttaatatcatcagccagttccttttgttctttaagtcctgtgtcaccccagtcctccttttctgtctctgcaaaccctt

SEQ ID NO: 447739 - DNA, 2829 bp, Homo sapiens
caggggacaacagatgcttcctgttctccatctgccccagcatggctgtgtacacacacacgggctacaacgaccactacatgtacttgaaccatggacagcagacgatcccgaacggactgggtatgggggggcagcacaattactttgggctttgggtggatgttgattttgggaaaggacacagcagagccaagcccacgtgcaccacgtacaacagcccgcagctgtcggctcaggagaacttccagtttgataagatggaggtgtgggcggttggagacccctcagaggagcagttggccaagggcaacaagagcatcctggatgcggaccctgaggcccaggccctgctggagatcagtgggcattcgcgccacagcgaagggctccgggaagtcccggacgatgaatgaggagccgcctgagccttcctggagccaggacctggattcctctgggtagagggcaccgcctgcagcccctcttccctcccacatggtttaactgtaatagcgtaccgcacgggtcacagcctggtagtcccacatgtgccaagaagacgccctctgaagccatgtcctgactcatgggtggatctcccagaaatagatgttttttaagttttcttttttgccctacagggtcaccctcaggatctctccaagaaatcttgtgtcaaattagtaactcagtcttatactttgttcttttttaccaacgaaatcctaagcagctgagacctttcagacccccgctggcattagggaattccgctggcattagggaattccgctggcattagggaattccgctggcattagggaattccgctggcattagggaattccgctggcattagggaattccgctggcattagggaattccgctggcattagggaattccgctggcattagggaattccgctggcattagcattgctgggatctcaacttctctattgaggagggggttcctcccgctggggttcatatggcctcactcaggccatccctgttagaaggtggtacctgatggtctgttctgacgggtgagggacagaggcatctggatgaaaatctcgacgctttctgggaacagcttccaatggcatgggagttctgtatttaaaagcatgaactgtgtataaaatggggaaatggaggcaggagactttgaggtaacatggtctggtggtggcatgagtcctcagaaggtatttgtaataaggttccacacccagctctctcagctgtttttaaatgaatgtgtgtgaggaacagatgggaaagttgggagatctgtctacagagaagcaaagttgtggttctcttgctaacttcaaggtgagggacattgggcaccctaagtttgggaacttggttgataaatacgtatatggtccattccataaatcagtggtgagtgactggcctgggttctagacctctgggaaccagcacctgagtcacagctgtctaggcctcggtgctggcctgggttctagatctctgggaaccagtgcctgagtcacagctgtcagtgcagccatttgcccagggctgctcccgagggggatgatgggaaattcagcagtgtagactcactttaaacaagctccggtgatcctgaaatgctgaagatcgtgtaggtgggttgtggggtcagcagagctgccatctgcccacgtctggaaaacaacacacggtgagtcaccggttggccatgagatctccccacttaaaggtgctgtgagcttgtctctaagatatatacctcttccttttgtcttttgctgtaagctttgaccttttgcagatctgatgaaaatacaacctcttattgtatagtttgccttgattataagccatagtaaatcgagctgttcgcatttttgcaggccttgcattttctactgggaggttcatcaaaccttccacttagcaatagccctgactcaggcagaatgcctcataaattagccttcgaaagaaaagtgcacgctcagacagtgtgtggaggggcaggagcgtgatgcagacaaggacttagtcatgactgattttccttagccagtttgtaatggcttatggggaacattgtgagcttcctacctgacatgttggcagaagtagaatattaggatcctcaagcatctctaccgtaagtccaaagaatttaggtccctattgtcactttgttttgcaatgttttttataaaaatgcaattaaatacctcactattaaactgccatgatgcctcagttaaaaaaaaaaattaaatgtccgtcagtgtctgtgccttggtgaccattgattgctgcttctgcccaggccgctgcaaaggttaggactttgtccactcacatgctttccaccctgagcttgttctaaggagagtgcagatcacgaatgcacctgcttccaggcagtgcacttagagaaaggtcactggcccgggcttgggagcctgggggatgcagctctctctgtgggcttctcttggtgcacggttctgcctctggacactcaaacctttttagggcgtgtgcagggctggggccagtggacctgacagtaccttacctggctctgagaaactcgcaatcctagtttgcacaaatgaatagtttgttcttttgtgaaaccagaatgagaattcaggttctaaggactagaggtctccctacaaatgaagacttatcagggccctagaaagtgctaggaggaaggggttaaaaaaaaaatttgtccgcgttgcaaactattataaatgattgccacattgcaagctattattttctcccaccatattttttaattaaaa

SEQ ID NO: 447740 - DNA, 2407 bp, Homo sapiens
  misc_feature (11)..(11): n is a, c, g, or t
  misc_feature (24)..(24): n is a, c, g, or t
  misc_feature (43)..(43): n is a, c, g, or t
  misc_feature (45)..(45): n is a, c, g, or t
gctcagagganagttggccaaggnaacaagagcatcctggatngnaccctgaggcccagcccctcttccctcccacatggtttaactgtaatagcgtaccgcacgggtcacagcctggtagtcccacatgtgccaagaagacgccctctgaagccatgtcctgactcatgggtggatctcccagaaatagatgttttttaagttttcttttttgccctacagggtcaccctcaggatctctccaagaaatcttgtgtcaaattagtaactcagtcttatactttgttcttttttaccaacgaaatcctaagcagctgagacctttcagacccccgctggcattagggaattccgctggcattagggaattccgctggcattagggaattccgctggcattagggaattccgctggcattagggaattccgctggcattagggaattccgctggcattagggaattccgctggcattagggaattccgctggcattagggaattccgctggcattagcattgctgggatctcaacttctctattgaggagggggttcctcccgctggggttcatatggcctcactcaggccatccctgttagaaggtggtacctgatggtctgttctgacgggtgagggacagaggcatctggatgaaaatctcgacgctttctgggaacagcttccaatggcatgggagttctgtatttaaaagcatgaactgtgtataaaatggggaaatggaggcaggagactttgaggtaacatggtctggtggtggcatgagtcctcagaaggtatttgtaataaggttccacacccagctctctcagctgtttttaaatgaatgtgtgtgaggaacagatgggaaagttgggagatctgtctacagagaagcaaagttgtggttctcttgctaacttcaaggtgagggacattgggcaccctaagtttgggaacttggttgataaatacgtatatggtccattccataaatcagtggtgagtgactggcctgggttctagacctctgggaaccagcacctgagtcacagctgtctaggcctcggtgctggcctgggttctagatctctgggaaccagtgcctgagtcacagctgtcagtgcagccatttgcccagggctgctcccgagggggatgatgggaaattcagcagtgtagactcactttaaacaagctccggtgatcctgaaatgctgaagatcgtgtaggtgggttgtggggtcagcagagctgccatctgcccacgtctggaaaacaacacacggtgagtcaccggttggccatgagatctccccacttaaaggtgctgtgagcttgtctctaagatatatacctcttccttttgtcttttgctgtaagctttgaccttttgcagatctgatgaaaatacaacctcttattgtatagtttgccttgattataagccatagtaaatcgagctgttcgcatttttgcaggccttgcattttctactgggaggttcatcaaaccttccacttagcaatagccctgactcaggcagaatgcctcataaattagccttcgaaagaaaagtgcacgctcagacagtgtgtggaggggcaggagcgtgatgcagacaaggacttagtcatgactgattttccttagccagtttgtaatggcttatggggaacattgtgagcttcctacctgacatgttggcagaagtagaatattaggatcctcaagcatctctaccgtaagtccaaagaatttaggtccctattgtcactttgttttgcaatgttttttataaaaatgcaattaaatacctcactattaaactgccatgatgcctcagttaaaaaaaaaaattaaatgtccgtcagtgtctgtgccttggtgaccattgattgctgcttctgcccaggccgctgcaaaggttaggactttgtccactcacatgctttccaccctgagcttgttctaaggagagtgcagatcacgaatgcacctgcttccaggcagtgcacttagagaaaggtcactggcccgggcttgggagcctgggggatgcagctctctctgtgggcttctcttggtgcacggttctgcctctggacactcaaacctttttagggcgtgtgcagggctggggccagtggacctgacagtaccttacctggctctgagaaactcgcaatcctagtttgcacaaatgaatagtttgttcttttgtgaaaccagaatgagaattcaggttctaaggactagaggtctccctacaaatgaagacttatcagggccctagaaagtgctaggaggaaggggttaaaaaaaaaatttgtccgcgttgcaaactattataaatgattgccacattgcaagctattattttctcccaccatattttttaattaaaa

SEQ ID NO: 447741 - DNA, 2772 bp, Homo sapiens
caggggacaacagatgcttcctgttctccatctgccccagcatggctgtgtacacacacacgggctacaacgaccactacatgtacttgaaccatggacagcagacgatcccgaacggactgggtatgggggggcagcacaattactttgggctttgggtggatgttgattttgggaaaggacacagcagagccaagcccacgtgcaccacgtacaacagcccgcagctgtcggctcaggagaacttccagtttgataagatggaggtgtgggcggttggagacccctcagaggagcagttggccaagggcaacaagagcatcctggatgcggaccctgaggcccaggccctgctggagatcagtgggcattcgcgccacagcgaagggctccgggaagtcccggacgatgaatgaggagccgcctgagccttcctggagccaggacctggattcctctgggtagagggcaccgcctgcagcccctcttccctcccacatggtttaactgtaatagcgtaccgcacgggtcacagcctggtagtcccacatgtgccaagaagacgccctctgaagccatgtcctgactcatgggtggatctcccagaaatagatgttttttaagttttcttttttgccctacagggtcaccctcaggatctctccaagaaatcttgtgtcaaattagtaactcagtcttatactttgttcttttttaccaacgaaatcctaagcagctgagacctttcagacccccgctggcattagggaattccgctggcattagggaattccgctggcattagggaattccgctggcattagggaattccgctggcattagggaattccgctggcattagggaattccgctggcattagcattgctgggatctcaacttctctattgaggagggggttcctcccgctggggttcatatggcctcactcaggccatccctgttagaaggtggtacctgatggtctgttctgacgggtgagggacagaggcatctggatgaaaatctcgacgctttctgggaacagcttccaatggcatgggagttctgtatttaaaagcatgaactgtgtataaaatggggaaatggaggcaggagactttgaggtaacatggtctggtggtggcatgagtcctcagaaggtatttgtaataaggttccacacccagctctctcagctgtttttaaatgaatgtgtgtgaggaacagatgggaaagttgggagatctgtctacagagaagcaaagttgtggttctcttgctaacttcaaggtgagggacattgggcaccctaagtttgggaacttggttgataaatacgtatatggtccattccataaatcagtggtgagtgactggcctgggttctagacctctgggaaccagcacctgagtcacagctgtctaggcctcggtgctggcctgggttctagatctctgggaaccagtgcctgagtcacagctgtcagtgcagccatttgcccagggctgctcccgagggggatgatgggaaattcagcagtgtagactcactttaaacaagctccggtgatcctgaaatgctgaagatcgtgtaggtgggttgtggggtcagcagagctgccatctgcccacgtctggaaaacaacacacggtgagtcaccggttggccatgagatctccccacttaaaggtgctgtgagcttgtctctaagatatatacctcttccttttgtcttttgctgtaagctttgaccttttgcagatctgatgaaaatacaacctcttattgtatagtttgccttgattataagccatagtaaatcgagctgttcgcatttttgcaggccttgcattttctactgggaggttcatcaaaccttccacttagcaatagccctgactcaggcagaatgcctcataaattagccttcgaaagaaaagtgcacgctcagacagtgtgtggaggggcaggagcgtgatgcagacaaggacttagtcatgactgattttccttagccagtttgtaatggcttatggggaacattgtgagcttcctacctgacatgttggcagaagtagaatattaggatcctcaagcatctctaccgtaagtccaaagaatttaggtccctattgtcactttgttttgcaatgttttttataaaaatgcaattaaatacctcactattaaactgccatgatgcctcagttaaaaaaaaaaattaaatgtccgtcagtgtctgtgccttggtgaccattgattgctgcttctgcccaggccgctgcaaaggttaggactttgtccactcacatgctttccaccctgagcttgttctaaggagagtgcagatcacgaatgcacctgcttccaggcagtgcacttagagaaaggtcactggcccgggcttgggagcctgggggatgcagctctctctgtgggcttctcttggtgcacggttctgcctctggacactcaaacctttttagggcgtgtgcagggctggggccagtggacctgacagtaccttacctggctctgagaaactcgcaatcctagtttgcacaaatgaatagtttgttcttttgtgaaaccagaatgagaattcaggttctaaggactagaggtctccctacaaatgaagacttatcagggccctagaaagtgctaggaggaaggggttaaaaaaaaaatttgtccgcgttgcaaactattataaatgattgccacattgcaagctattattttctcccaccatattttttaattaaaa

SEQ ID NO: 447742 - DNA, 2468 bp, Homo sapiens
cgcctcccggccccctccccgcccgacagcggccgctcgggccccggctctcggttataagatggcggcgctgagcggtggcggtggtggcggcgcggagccgggccaggctctgttcaacggggacatggagcccgaggccggcgccggccggcccgcggcctcttcggctgcggaccctgccattccggaggaggtgtggaatatcaaacaaatgattaagttgacacaggaacatatagaggccctattggacaaatttggtggggagcataatccaccatcaatatatctggaggcctatgaagaatacaccagcaagctagatgcactccaacaaagagaacaacagttattggaatctctggggaacggaactgatttttctgtttctagctctgcatcaatggataccgttacatcttcttcctcttctagcctttcagtgctaccttcatctctttcagtttttcaaaatcccacagatgtggcacggagcaaccccaagtcaccacaaaaacctatcgttagagtcttcctgcccaacaaacagaggacagtggtacctgcaaggtgtggagttacagtccgagacagtctaaagaaagcactgatgatgagaggtctaatcccagagtgctgtgctgtttacagaattcaggatggagagaagaaaccaattggttgggacactgatatttcctggcttactggagaagaattgcatgtggaagtgttggagaatgttccacttacaacacacaactttgtacgaaaaacgtttttcaccttagcattttgtgacttttgtcgaaagctgcttttccagggtttccgctgtcaaacatgtggttataaatttcaccagcgttgtagtacagaagttccactgatgtgtgttaattatgaccaacttgatttgctgtttgtctccaagttctttgaacaccacccaataccacaggaagaggcgtccttagcagagactgccctaacatctggatcatccccttccgcacccgcctcggactctattgggccccaaattctcaccagtccgtctccttcaaaatccattccaattccacagcccttccgaccagcagatgaagatcatcgaaatcaatttgggcaacgagaccgatcctcatcagctcccaatgtgcatataaacacaatagaacctgtcaatattgatgacttgattagagaccaaggatttcgtggtgatggaggatcaaccacaggtttgtctgctaccccccctgcctcattacctggctcactaactaacgtgaaagccttacagaaatctccaggacctcagcgagaaaggaagtcatcttcatcctcagaagacaggaatcgaatgaaaacacttggtagacgggactcgagtgatgattgggagattcctgatgggcagattacagtgggacaaagaattggatctggatcatttggaacagtctacaagggaaagtggcatggtgatgtggcagtgaaaatgttgaatgtgacagcacctacacctcagcagttacaagccttcaaaaatgaagtaggagtactcaggaaaacacgacatgtgaatatcctactcttcatgggctattccacaaagccacaactggctattgttacccagtggtgtgagggctccagcttgtatcaccatctccatatcattgagaccaaatttgagatgatcaaacttatagatattgcacgacagactgcacagggcatggattacttacacgccaagtcaatcatccacagagacctcaagagtaataatatatttcttcatgaagacctcacagtaaaaataggtgattttggtctagctacagtgaaatctcgatggagtgggtcccatcagtttgaacagttgtctggatccattttgtggatggcaccagaagtcatcagaatgcaagataaaaatccatacagctttcagtcagatgtatatgcatttggaattgttctgtatgaattgatgactggacagttaccttattcaaacatcaacaacagggaccagataatttttatggtgggacgaggatacctgtctccagatctcagtaaggtacggagtaactgtccaaaagccatgaagagattaatggcagagtgcctcaaaaagaaaagagatgagagaccactctttccccaaattctcgcctctattgagctgctggcccgctcattgccaaaaattcaccgcagtgcatcagaaccctccttgaatcgggctggtttccaaacagaggattttagtctatatgcttgtgcttctccaaaaacacccatccaggcagggggatatggtgcgtttcctgtccactgaaacaaatgagtgagagagttcaggagagtagccaacaaaaggaaaataaatgaacatatgtttgcttatatgttaaattgaataaaatactctctttttttttaaggtg

SEQ ID NO: 447743 - DNA, 3455 bp, Homo sapiens
cgcctcccggccccctccccgcccgacagcggccgctcgggccccggctctcggttataagatggcggcgctgagcggtggcggtggtggcggcgcggagccgggccaggctctgttcaacggggacatggagcccgaggccggcgccggccggcccgcggcctcttcggctgcggaccctgccattccggaggaggtgtggaatatcaaacaaatgattaagttgacacaggaacatatagaggccctattggacaaatttggtggggagcataatccaccatcaatatatctggaggcctatgaagaatacaccagcaagctagatgcactccaacaaagagaacaacagttattggaatctctggggaacggaactgatttttctgtttctagctctgcatcaatggataccgttacatcttcttcctcttctagcctttcagtgctaccttcatctctttcagtttttcaaaatcccacagatgtggcacggagcaaccccaagtcaccacaaaaacctatcgttagagtcttcctgcccaacaaacagaggacagtggtacctgcaaggtgtggagttacagtccgagacagtctaaagaaagcactgatgatgagaggtctaatcccagagtgctgtgctgtttacagaattcaggatggagagaagaaaccaattggttgggacactgatatttcctggcttactggagaagaattgcatgtggaagtgttggagaatgttccacttacaacacacaactttgtacgaaaaacgtttttcaccttagcattttgtgacttttgtcgaaagctgcttttccagggtttccgctgtcaaacatgtggttataaatttcaccagcgttgtagtacagaagttccactgatgtgtgttaattatgaccaacttgatttgctgtttgtctccaagttctttgaacaccacccaataccacaggaagaggcgtccttagcagagactgccctaacatctggatcatccccttccgcacccgcctcggactctattgggccccaaattctcaccagtccgtctccttcaaaatccattccaattccacagcccttccgaccagcagatgaagatcatcgaaatcaatttgggcaacgagaccgatcctcatcagctcccaatgtgcatataaacacaatagaacctgtcaatattgatgacttgattagagaccaaggatttcgtggtgatggaggatcaaccacaggtttgtctgctaccccccctgcctcattacctggctcactaactaacgtgaaagccttacagaaatctccaggacctcagcgagaaaggaagtcatcttcatcctcagaagacaggaatcgaatgaaaacacttggtagacgggactcgagtgatgattgggagattcctgatgggcagattacagtgggacaaagaattggatctggatcatttggaacagtctacaagggaaagtggcatggtgatgtggcagtgaaaatgttgaatgtgacagcacctacacctcagcagttacaagccttcaaaaatgaagtaggagtactcaggaaaacacgacatgtgaatatcctactcttcatgggctattccacaaagccacaactggctattgttacccagtggtgtgagggctccagcttgtatcaccatctccatatcattgagaccaaatttgagatgatcaaacttatagatattgcacgacagactgcacagggcatggattacttacacgccaagtcaatcatccacagagacctcaagagtaataatatatttcttcatgaagacctcacagtaaaaataggtgattttggtctagctacagtgaaatctcgatggagtgggtcccatcagtttgaacagttgtctggatccattttgtggatggcaccagaagtcatcagaatgcaagataaaaatccatacagctttcagtcagatgtatatgcatttggaattgttctgtatgaattgatgactggacagttaccttattcaaacatcaacaacagggaccagataatttttatggtgggacgaggatacctgtctccagatctcagtaaggtacggagtaactgtccaaaagccatgaagagattaatggcagagtgcctcaaaaagaaaagagatgagagaccactctttccccaaattctcgcctctattgagctgctggcccgctcattgccaaaaattcaccgcagtgcatcagaaccctccttgaatcgggctggtttccaaacagaggattttagtctatatgcttgtgcttctccaaaaacacccatccaggcagggggatatggtgcgtttcctgtccactgaaacaaatgagtgagagagttcaggagagtagccaacaaaaggaaaataaatgaacatatgtttgcttatatgttaaattgaataaaatactctctttttttttaaggtgaaccaaagaacacttgtgtggttaaagactagatataatttttccccaaactaaaatttatacttaacattggatttttaacatccaagggttaaaatacatagacattgctaaaaattggcagagcctcttctagaggctttactttctgttccgggtttgtatcattcacttggttattttaagtagtaaacttcagtttctcatgcaacttttgttgccagctatcacatgtccactagggactccagaagaagaccctacctatgcctgtgtttgcaggtgagaagttggcagtcggttagcctgggttagataaggcaaactgaacagatctaatttaggaagtcagtagaatttaataattctattattattcttaataatttttctataactatttctttttataacaatttggaaaatgtggatgtcttttatttccttgaagcaataaactaagtttctttttataaattttgagtgcaggtgaccaaaaatattgctgaggagtggcacgtttgacatgagtaaaatgtcttaacttcggatttttagcgggaaaatgttataaattggagtttcttttaaatagctttttttaaaatacattaaggatgtctcgctcatgtagaagtcaaattttgttgcaaacgcattgctcccttcacacccaatctctcccctgcaaaaaatcttcacagaattctgtgagaacttttaggtgtgtttttctttgagatacctctggttgccaaacaccaggtaatagattttttaaagttgttattagattattcttacctctcatgatgcatattttagcaatcaccttatcattgtgtctcatgttctgtcctccttatattctttgcccagcaagattctacttatgatgaatgaatgctcttctccttttttcattcaatggtatgaagtatttgttagggttctttagtacttacacttgttgtgtagaaaatgact

SEQ ID NO: 447744 - DNA, 2884 bp, Homo sapiens
aatttcaagaaaaggggaaggcctgcggcctcaaacccgtaaatctcagcgcaggtcaagctttccacctgcccctcactggacagaccttatcaggtagcacgtaccttaattgtgtgtttttctggttctttgtcattctcgtcgtccactcccgggagtggagagagaacgttccacttacaacacacaactgttgtacgaaaaacgtttttcaccttagcattttgtgacttttgtcgaaagctgcttttccagggtttccgctgtcaaacatgtggttataaatttcaccagcgttgtagtacagaagttccactgatgtgtgttaattatgaccaacttgatttgctgtttgtctccaagttctttgaacaccacccaataccacaggaagaggcgtccttagcagagactgccctaacatctggatcatccccttccgcacccgcctcggactctattgggccccaaattctcaccagtccgtctccttcaaaatccattccaattccacagcccttccgaccagcagatgaagatcatcgaaatcaatttgggcaacgagaccgatcctcatcagctcccaatgtgcatataaacacaatagaacctgtcaatattgatgacttgattagagaccaaggatttcgtggtgatggaggatcaaccacaggtttgtctgctaccccccctgcctcattacctggctcactaactaacgtgaaagccttacagaaatctccaggacctcagcgagaaaggaagtcatcttcatcctcagaagacaggaatcgaatgaaaacacttggtagacgggactcgagtgatgattgggagattcctgatgggcagattacagtgggacaaagaattggatctggatcatttggaacagtctacaagggaaagtggcatggtgatgtggcagtgaaaatgttgaatgtgacagcacctacacctcagcagttacaagccttcaaaaatgaagtaggagtactcaggaaaacacgacatgtgaatatcctactcttcatgggctattccacaaagccacaactggctattgttacccagtggtgtgagggctccagcttgtatcaccatctccatatcattgagaccaaatttgagatgatcaaacttatagatattgcacgacagactgcacagggcatggattacttacacgccaagtcaatcatccacagagacctcaagagtaataatatatttcttcatgaagacctcacagtaaaaataggtgattttggtctagctacagtgaaatctcgatggagtgggtcccatcagtttgaacagttgtctggatccattttgtggatggcaccagaagtcatcagaatgcaagataaaaatccatacagctttcagtcagatgtatatgcatttggaattgttctgtatgaattgatgactggacagttaccttattcaaacatcaacaacagggaccagataatttttatggtgggacgaggatacctgtctccagatctcagtaaggtacggagtaactgtccaaaagccatgaagagattaatggcagagtgcctcaaaaagaaaagagatgagagaccactctttccccaaattctcgcctctattgagctgctggcccgctcattgccaaaaattcaccgcagtgcatcagaaccctccttgaatcgggctggtttccaaacagaggattttagtctatatgcttgtgcttctccaaaaacacccatccaggcagggggatatggtgcgtttcctgtccactgaaacaaatgagtgagagagttcaggagagtagccaacaaaaggaaaataaatgaacatatgtttgcttatatgttaaattgaataaaatactctctttttttttaaggtgaaccaaagaacacttgtgtggttaaagactagatataatttttccccaaactaaaatttatacttaacattggatttttaacatccaagggttaaaatacatagacattgctaaaaattggcagagcctcttctagaggctttactttctgttccgggtttgtatcattcacttggttattttaagtagtaaacttcagtttctcatgcaacttttgttgccagctatcacatgtccactagggactccagaagaagaccctacctatgcctgtgtttgcaggtgagaagttggcagtcggttagcctgggttagataaggcaaactgaacagatctaatttaggaagtcagtagaatttaataattctattattattcttaataatttttctataactatttctttttataacaatttggaaaatgtggatgtcttttatttccttgaagcaataaactaagtttctttttataaattttgagtgcaggtgaccaaaaatattgctgaggagtggcacgtttgacatgagtaaaatgtcttaacttcggatttttagcgggaaaatgttataaattggagtttcttttaaatagctttttttaaaatacattaaggatgtctcgctcatgtagaagtcaaattttgttgcaaacgcattgctcccttcacacccaatctctcccctgcaaaaaatcttcacagaattctgtgagaacttttaggtgtgtttttctttgagatacctctggttgccaaacaccaggtaatagattttttaaagttgttattagattattcttacctctcatgatgcatattttagcaatcaccttatcattgtgtctcatgttctgtcctccttatattctttgcccagcaagattctacttatgatgaatgaatgctcttctccttttttcattcaatggtatgaagtatttgttagggttctttagtacttacacttgttgtgtagaaaatgact

SEQ ID NO: 447745 - DNA, 4158 bp, Homo sapiens
cgcctcccggccccctccccgcccgacagcggccgctcgggccccggctctcggttataagatggcggcgctgagcggtggcggtggtggcggcgcggagccgggccaggctctgttcaacggggacatggagcccgaggccggcgccggccggcccgcggcctcttcggctgcggaccctgccattccggaggaggtgtggaatatcaaacaaatgattaagttgacacaggaacatatagaggccctattggacaaatttggtggggagcataatccaccatcaatatatctggaggcctatgaagaatacaccagcaagctagatgcactccaacaaagagaacaacagttattggaatctctggggaacggaactgatttttctgtttctagctctgcatcaatggataccgttacatcttcttcctcttctagcctttcagtgctaccttcatctctttcagtttttcaaaatcccacagatgtggcacggagcaaccccaagtcaccacaaaaacctatcgttagagtcttcctgcccaacaaacagaggacagtggtacctgcaaggtgtggagttacagtccgagacagtctaaagaaagcactgatgatgagaggtctaatcccagagtgctgtgctgtttacagaattcaggatggagagaagaaaccaattggttgggacactgatatttcctggcttactggagaagaattgcatgtggaagtgttggagaatgttccacttacaacacacaactttgtacgaaaaacgtttttcaccttagcattttgtgacttttgtcgaaagctgcttttccagggtttccgctgtcaaacatgtggttataaatttcaccagcgttgtagtacagaagttccactgatgtgtgttaattatgaccaacttgatttgctgtttgtctccaagttctttgaacaccacccaataccacaggaagaggcgtccttagcagagactgccctaacatctggatcatccccttccgcacccgcctcggactctattgggccccaaattctcaccagtccgtctccttcaaaatccattccaattccacagcccttccgaccagcagatgaagatcatcgaaatcaatttgggcaacgagaccgatcctcatcagctcccaatgtgcatataaacacaatagaacctgtcaatattgatgacttgattagagaccaaggatttcgtggtgatggaggatcaaccacaggtttgtctgctaccccccctgcctcattacctggctcactaactaacgtgaaagccttacagaaatctccaggacctcagcgagaaaggaagtcatcttcatcctcagaagacaggaatcgaatgaaaacacttggtagacgggactcgagtgatgattgggagattcctgatgggcagattacagtgggacaaagaattggatctggatcatttggaacagtctacaagggaaagtggcatggtgatgtggcagtgaaaatgttgaatgtgacagcacctacacctcagcagttacaagccttcaaaaatgaagtaggagtactcaggaaaacacgacatgtgaatatcctactcttcatgggctattccacaaagccacaactggctattgttacccagtggtgtgagggctccagcttgtatcaccatctccatatcattgagaccaaatttgagatgatcaaacttatagatattgcacgacagactgcacagggcatggattacttacacgccaagtcaatcatccacagagacctcaagagtaataatatatttcttcatgaagacctcacagtaaaaataggtgattttggtctagctacagtgaaatctcgatggagtgggtcccatcagtttgaacagttgtctggatccattttgtggatggcaccagaagtcatcagaatgcaagataaaaatccatacagctttcagtcagatgtatatgcatttggaattgttctgtatgaattgatgactggacagttaccttattcaaacatcaacaacagggaccagataatttttatggtgggacgaggatacctgtctccagatctcagtaaggtacggagtaactgtccaaaagccatgaagagattaatggcagagtgcctcaaaaagaaaagagatgagagaccactctttccccaaattctcgcctctattgagctgctggcccgctcattgccaaaaattcaccgcagtgcatcagaaccctccttgaatcgggctggtttccaaacagaggattttagtctatatgcttgtgcttctccaaaaacacccatccaggcagggggatatggagaatttgcagccttcaagtagccaccatcatggcagcatctgctcttatttcttaagccttgtgttcgtacaatttgttaacatcaaaacacagttctgttcctcaaatctttttttaaagatacaaaatttccaatgcataagctgatgtggaacagaatggaatttcccatccaacaaaagaggaaagaatgttttaggaaccagaattctctgctgccagtgtttcttcaacaaaaataccacgagcatacaagtctgcccagtcccaggaagaaagaggagagaccctgaattctgaccttttgatggtcaggcatgatggaaagaaactgctgctacagcttgggagatttgctatggaaagtctgccagtcaactttgcccttctaaccaccagatcaatttgtggctgatcatctgatggggcagtttcaatcaccaagcatcgttctctttcctgttctggaattttgttttggagctctttcccctagtgaccaccagttagtttctgagggatggaacaaaaatgcagcttgccctttctatgtggtgcgtgttcaggccttgacagattttatcaaaaggaaactattttatttaaatggaggctgagtggtgagtagatgtgtcttggtatggaggaaaagggcatgctgcatcttcttcctgacctccggggtctctggccttttgtttccttgctcactgaggggtctgtctaaccaagcaggctagatagtgctggcacacattgccttctttctcattgggtccagcaatgaagataagtgtttgggttttttttttttcctccacaatgtagcaaattctcaggaaatacagtttatatcttcctcctatgctcttccagtcaccaactacttatgcggctactttgtccagggcacaaaatgccgtggcagtatctaactaaacccccacaaaactgcttaataacagttttgaatgtgagaaatttagataatttaaatataaggtacaggttttaatttctgagtttcttcttttctatttttattaaaaagaaaataattttcagatttaattgaattggaaaaaaacaatacttcccaccagaattatatatcctgaaaattgtatttttgttatataaacaacttttaagaaagatcattatccttttctctacctaaatatgaggagtcttagcataatgacaaatatttataatttttcaattaatggtacttgctggatccacactaacatctttgctaataatctcattgtttcttccaactgattcctaacactatatcccacatcttctttctagtcttttatctagaatatgcaacctaaaataaaaatggtggcgtctccattcattctccttcttccttttttcccaagcctggtcttcaaaaggttgggcaatttggcagctgaattcccagacagagaatagagcaattttagggatattaggactgagggagggtgtgggaaagctgtcatcagttgtttttatagaaagaactggcattcattaagaacctaaatcttatctttgcacaaatggaaaatataacctagttatagcttcctttggcctttattaaagggtaatatcaatcacagtcatagcaaagaaagcggatgtattaatggcaaattaatggaaaacctcccttatcaggaatctagactcagaatttaggaacacaaatcaaatcagaccaaccaagctatagccaaggacttgaaagaaattaaacaagacccagaataaatcaaggaattagaaattgttatttaaaaatttcaga

SEQ ID NO: 447746 - DNA, 2153 bp, Homo sapiens
cgcctcccggccccctccccgcccgacagcggccgctcgggccccggctctcggttataagatggcggcgctgagcggtggcggtggtggcggcgcggagccgggccaggctctgttcaacggggacatggagcccgaggccggcgccggccggcccgcggcctcttcggctgcggaccctgccattccggaggaggtgtggaatatcaaacaaatgattaagttgacacaggaacatatagaggccctattggacaaatttggtggggagcataatccaccatcaatatatctggaggcctatgaagaatacaccagcaagctagatgcactccaacaaagagaacaacagttattggaatctctggggaacggaactgatttttctgtttctagctctgcatcaatggataccgttacatcttcttcctcttctagcctttcagtgctaccttcatctctttcagtttttcaaaatcccacagatgtggcacggagcaaccccaagtcaccacaaaaacctatcgttagagtcttcctgcccaacaaacagaggacagtggtacctgcaaggtgtggagttacagtccgagacagtctaaagaaagcactgatgatgagaggtctaatcccagagtgctgtgctgtttacagaattcaggatggagagaagaaaccaattggttgggacactgatatttcctggcttactggagaagaattgcatgtggaagtgttggagaatgttccacttacaacacacaactttgtacgaaaaacgtttttcaccttagcattttgtgacttttgtcgaaagctgcttttccagggtttccgctgtcaaacatgtggttataaatttcaccagcgttgtagtacagaagttccactgatgtgtgttaattatgaccaacttgatttgctgtttgtctccaagttctttgaacaccacccaataccacaggaagaggcgtccttagcagagactgccctaacatctggatcatccccttccgcacccgcctcggactctattgggccccaaattctcaccagtccgtctccttcaaaatccattccaattccacagcccttccgaccagcagatgaagatcatcgaaatcaatttgggcaacgagaccgatcctcatcagctcccaatgtgcatataaacacaatagaacctgtcaatattgatgacttgattagagaccaaggatttcgtggtgatggaggatcaaccacaggtttgtctgctaccccccctgcctcattacctggctcactaactaacgtgaaagccttacagaaatctccaggacctcagcgagaaaggaagtcatcttcatcctcagaagacaggaatcgaatgaaaacacttggtagacgggactcgagtgatgattgggagattcctgatgggcagattacagtgggacaaagaattggatctggatcatttggaacagtctacaagggaaagtggcatggtgatgtggcagtgaaaatgttgaatgtgacagcacctacacctcagcagttacaagccttcaaaaatgaagtaggagtactcaggaaaacacgacatgtgaatatcctactcttcatgggctattccacaaagccacaactggctattgttacccagtggtgtgagggctccagcttgtatcaccatctccatatcattgagaccaaatttgagatgatcaaacttatagatattgcacgacagactgcacagggcatggattacttacacgccaagtcaatcatccacagagacctcaagagtaataatatatttcttcatgaagacctcacagtaaaaataggtgattttggtctagctacagtgaaatctcgatggagtgggtcccatcagtttgaacagttgtctggatccattttgtggatggcaccagaagtcatcagaatgcaagataaaaatccatacagctttcagtcagatgtatatgcatttggaattgttctgtatgaattgatgactggacagttaccttattcaaacatcaacaacagggaccaggcttccccatccccgtacgttcgtataatcgacgaccagctccgagctacatgccatcagcatcgactctagagcatacagccagtcagaactggatctcgac

SEQ ID NO: 447747 - DNA, 408 bp, Homo sapiens
gtcttatcattgatagttcctggagggcctacttgagcaaagcagctttggcagtattggatttttaaattaatacttttaaaagtcattactgctaggtttttaatgctttaatgattttgagaatataaaaacaagaaaatccttttatcttcctttttaaatattattacctttatatcgttactctgaatcttatcttccaatgacttcatttttccaggccccaaattctcaccagtccgtctccttcaaaatccattccaattccacagcccttccgaccagcagatgaagatcatcgaaatcaatttgggcaacgagaccgatcctcatcagctcccaatgtgcatataaacacaatagaacctgtcaatattgatgtaagtatccagcattgctagaact

SEQ ID NO: 447748 - DNA, 280 bp, Homo sapiens
ttcatttttccaggccccaaattctcaccagtccgtctccttcaaaatccattccaattccacagcccttccgaccagcagatgaagatcatcgaaatcaatttgggcaacgagaccgatcctcatcagctcccaatgtgcatataaacacaatagaacctgtcaatattgatgtaagtatccagcattgctagaactaaaaaaaaaccaagtatgtatctttatttttctgctataattataacttagatcagaaataagtgccatttttcatttatca

SEQ ID NO: 447749 - DNA, 721 bp, Homo sapiens
ctgaagcactgggccaaattctcaccagtccgtctcttcaaaatccattccaattccacagcccttccgaccagcagatgaagatcatcgaaatcaatttgggtaacgagaccgatcctcatcagctcccaatgtgcatatgaacacaatagaacctgtcaatattgatgtacctgcaaggtgtggagttacagtccgagacagtctaaagaaagcactgatgatgagaggtctaatcccagagtgctgtgctgtttacagaattcaggatggagagaagaaaccaattggttgggacactgatatttcctggcttactggagaagaattgcatgtggaagtgttggagaatgttccacttacaacacacaactttgtacgaaaaacgtttttcaccttagcattttgtgacttttgtcgaaagctgcttttccagggtttccgctgtcaaacatgtggttataaatttcaccagcgttgtagtacagaagttccactgatgtgtgttaattatgaccaacttgatttgctgtttgtctccaagttctttgaacaccacccaataccacaggaagaggcgtccttagcagagactgccctaacatctggatcatccccttccgcacccgcctcggactctattgggcccaaattctcaccagtcgtctcctcaaatcattcattcccagccttcgacagaaataaatatgaatcattggca

SEQ ID NO: 447750 - DNA, 3713 bp, Homo sapiens
cgcctcccggccccctccccgcccgacagcggccgctcgggccccggctctcggttataagatggcggcgctgagcggtggcggtggtggcggcgcggagccgggccaggctctgttcaacggggacatggagcccgaggccggcgccggccggcccgcggcctcttcggctgcggaccctgccattccggaggaggtgtggaatatcaaacaaatgattaagttgacacaggaacatatagaggccctattggacaaatttggtggggagcataatccaccatcaatatatctggaggcctatgaagaatacaccagcaagctagatgcactccaacaaagagaacaacagttattggaatctctggggaacggaactgatttttctgtttctagctctgcatcaatggataccgttacatcttcttcctcttctagcctttcagtgctaccttcatctctttcagtttttcaaaatcccacagatgtggcacggagcaaccccaagtcaccacaaaaacctatcgttagagtcttcctgcccaacaaacagaggacagtggtacctgcaaggtgtggagttacagtccgagacagtctaaagaaagcactgatgatgagaggtctaatcccagagtgctgtgctgtttacagaattcaggatggagagaagaaaccaattggttgggacactgatatttcctggcttactggagaagaattgcatgtggaagtgttggagaatgttccacttacaacacacaactttgtacgaaaaacgtttttcaccttagcattttgtgacttttgtcgaaagctgcttttccagggtttccgctgtcaaacatgtggttataaatttcaccagcgttgtagtacagaagttccactgatgtgtgttaattatgaccaacttgatttgctgtttgtctccaagttctttgaacaccacccaataccacaggaagaggcgtccttagcagagactgccctaacatctggatcatccccttccgcacccgcctcggactctattgggccccaaattctcaccagtccgtctccttcaaaatccattccaattccacagcccttccgaccagcagatgaagatcatcgaaatcaatttgggcaacgagaccgatcctcatcagctcccaatgtgcatataaacacaatagaacctgtcaatattgatgacttgattagagaccaaggatttcgtggtgatggaggatcaaccacaggtttgtctgctaccccccctgcctcattacctggctcactaactaacgtgaaagccttacagaaatctccaggacctcagcgagaaaggaagtcatcttcatcctcagaagacaggaatcgaatgaaaacacttggtagacgggactcgagtgatgattgggagattcctgatgggcagattacagtgggacaaagaattggatctggatcatttggaacagtctacaagggaaagtggcatggtgatgtggcagtgaaaatgttgaatgtgacagcacctacacctcagcagttacaagccttcaaaaatgaagtaggagtactcaggaaaacacgacatgtgaatatcctactcttcatgggctattccacaaagccacaactggctattgttacccagtggtgtgagggctccagcttgtatcaccatctccatatcattgagaccaaatttgagatgatcaaacttatagatattgcacgacagactgcacagggcatggattacttacacgccaagtcaatcatccacagagacctcaagagtaataatatatttcttcatgaagacctcacagtaaaaataggtgattttggtctagctacagtgaaatctcgatggagtgggtcccatcagtttgaacagttgtctggatccattttgtggatggcaccagaagtcatcagaatgcaagataaaaatccatacagctttcagtcagatgtatatgcatttggaattgttctgtatgaattgatgactggacagttaccttattcaaacatcaacaacagggaccagataatttttatggtgggacgaggatacctgtctccagatctcagtaaggtacggagtaactgtccaaaagccatgaagagattaatggcagagtgcctcaaaaagaaaagagatgagagaccactctttccccaaattctcgcctctattgagctgctggcccgctcattgccaaaaattcaccgcagtgcatcagaaccctccttgaatcgggctggtttccaaacagaggattttagtctatatgcttgtgcttctccaaaaacacccatccaggcagggggatatggagaatttgcagccttcaagtagccaccatcatggcagcatctgctcttatttcttaagccttgtgttcgtacaatttgttaacatcaaaacacagttctgttcctcaaatctttttttaaagatacaaaatttccaatgcataagctgatgtggaacagaatggaatttcccatccaacaaaagaggaaagaatgttttaggaaccagaattctctgctgccagtgtttcttcaacaaaaataccacgagcatacaagtctgcccagtcccaggaagaaagaggagagaccctgaattctgaccttttgatggtcaggcatgatggaaagaaactgctgctacagcttgggagatttgctatggaaagtctgccagtcaactttgcccttctaaccaccagatcaatttgtggctgatcatctgatggggcagtttcaatcaccaagcatcgttctctttcctgttctggaattttgttttggagctctttcccctagtgaccaccagttagtttctgagggatggaacaaaaatgcagcttgccctttctatgtggtgcgtgttcaggccttgacagattttatcaaaaggaaactattttatttaaatggaggctgagtggtgagtagatgtgtcttggtatggaggaaaagggcatgctgcatcttcttcctgacctccggggtctctggccttttgtttccttgctcactgaggggtctgtctaaccaagcaggctagatagtgctggcacacattgccttctttctcattgggtccagcaatgaagataagtgtttgggttttttttttttcctccacaatgtagcaaattctcaggaaatacagtttatatcttcctcctatgctcttccagtcaccaactacttatgcggctactttgtccagggcacaaaatgccgtggcagtatctaactaaacccccacaaaactgcttaataacagttttgaatgtgagaaatttagataatttaaatataaggtacaggttttaatttctgagtttcttcttttctatttttattaaaaagaaaataattttcagatttaattgaattggaaaaaaacaatacttcccaccagaattatatatcctgaaaattgtatttttgttatataaacaacttttaagaaagatcattatccttttctctacctaaatatgaggagtcttagcataatgacaaatatttataatttttcaattaatggtacttgctggatccacactaacatctttgctaataatctcattgtttcttccaactgattcctaacactatatcccacatcttctttctagtcttttatctagaatatgcaacctaaaataaaaatggtggcgtctcca

SEQ ID NO: 447751 - DNA, 2136 bp, Homo sapiens
cgcctcccggccccctccccgcccgacagcggccgctcgggccccggctctcggttataagatggcggcgctgagcggtggcggtggtggcggcgcggagccgggccaggctctgttcaacggggacatggagcccgaggccggcgccggccggcccgcggcctcttcggctgcggaccctgccattccggaggaggtgtggaatatcaaacaaatgattaagttgacacaggaacatatagaggccctattggacaaatttggtggggagcataatccaccatcaatatatctggaggcctatgaagaatacaccagcaagctagatgcactccaacaaagagaacaacagttattggaatctctggggaacggaactgatttttctgtttctagctctgcatcaatggataccgttacatcttcttcctcttctagcctttcagtgctaccttcatctctttcagtttttcaaaatcccacagatgtggcacggagcaaccccaagtcaccacaaaaacctatcgttagagtcttcctgcccaacaaacagaggacagtggtacctgcaaggtgtggagttacagtccgagacagtctaaagaaagcactgatgatgagaggtctaatcccagagtgctgtgctgtttacagaattcaggatggagagaagaaaccaattggttgggacactgatatttcctggcttactggagaagaattgcatgtggaagtgttggagaatgttccacttacaacacacaactttgtacgaaaaacgtttttcaccttagcattttgtgacttttgtcgaaagctgcttttccagggtttccgctgtcaaacatgtggttataaatttcaccagcgttgtagtacagaagttccactgatgtgtgttaattatgaccaacttgatttgctgtttgtctccaagttctttgaacaccacccaataccacaggaagaggcgtccttagcagagactgccctaacatctggatcatccccttccgcacccgcctcggactctattgggccccaaattctcaccagtccgtctccttcaaaatccattccaattccacagcccttccgaccagcagatgaagatcatcgaaatcaatttgggcaacgagaccgatcctcatcagctcccaatgtgcatataaacacaatagaacctgtcaatattgatgacttgattagagaccaaggatttcgtggtgatggaggatcaaccacaggtttgtctgctaccccccctgcctcattacctggctcactaactaacgtgaaagccttacagaaatctccaggacctcagcgagaaaggaagtcatcttcatcctcagaagacaggaatcgaatgaaaacacttggtagacgggactcgagtgatgattgggagattcctgatgggcagattacagtgggacaaagaattggatctggatcatttggaacagtctacaagggaaagtggcatggtgatgtggcagtgaaaatgttgaatgtgacagcacctacacctcagcagttacaagccttcaaaaatgaagtaggagtactcaggaaaacacgacatgtgaatatcctactcttcatgggctattccacaaagccacaactggctattgttacccagtggtgtgagggctccagcttgtatcaccatctccatatcattgagaccaaatttgagatgatcaaacttatagatattgcacgacagactgcacagggcatggattacttacacgccaagtcaatcatccacagagacctcaagagtaataatatatttcttcatgaagacctcacagtaaaaataggtgattttggtctagctacagtgaaatctcgatggagtgggtcccatcagtttgaacagttgtctggatccattttgtggatggcaccagaagtcatcagaatgcaagataaaaatccatacagctttcagtcagatgtatatgcatttggaattgttctgtatgaattgatgactggacagttaccttattcaaacatcaacaacagggaccaggtgctttgtcctccatgggagtataataaatgatgtggcaagggcttactctccatgagaggaatgtgtgacccacagaaggataa

SEQ ID NO: 447752 - DNA, 1094 bp, Homo sapiens
cgcctcccggccccctccccgcccgacagcggccgctcgggccccggctctcggttataagatggcggcgctgagcggtggcggtggtggcggcgcggagccgggccaggctctgttcaacggggacatggagcccgaggccggcgccggccggcccgcggcctcttcggctgcggaccctgccattccggaggaggtgtggaatatcaaacaaatgattaagttgacacaggaacatatagaggccctattggacaaatttggtggggagcataatccaccatcaatatatctggaggcctatgaagaatacaccagcaagctagatgcactccaacaaagagaacaacagttattggaatctctggggaacggaactgatttttctgtttctagctctgcatcaatggataccgttacatcttcttcctcttctagcctttcagtgctaccttcatctctttcagtttttcaaaatcccacagatgtggcacggagcaaccccaagtcaccacaaaaacctatcgttagagtcttcctgcccaacaaacagaggacagtggtacctgcaaggtgtggagttacagtccgagacagtctaaagaaagcactgatgatgagaggtctaatcccagagtgctgtgctgtttacagaattcaggatgggtatggtttgtatgtgacgtgaaattttgtttaaaaagaaaatcacacattaaactttgaagttttcttaggatctttaccaaaacctagggaattgaaagtgtactttaggaaaaagtattaaaataatactaagttagcctgaagaaatactgtaggccatatgaggagttaaataattgtatatgactgtagggtttgttactttgatcaaatgattttatttggaatttgagattcttacaatttttgaaccattcagagtgtgatttatttggataatagactcttacccccctcccatttttaatacaaactcatagtttcacaaaaggtatatcaaaattaacattttatattgacctacttttctttcagaaagtgtctaacattgttccaagaccctcacattttgaatcctctttaaa

SEQ ID NO: 447753 - DNA, 2139 bp, Homo sapiens
cgagaccggtcctctgcggagagggccccgccctctgtgaaggcccgcccgggaattggcggcggcgctgcagccatttccggtttcggggaggtgggtggggtgcggagcgggacttggagcagccgccgccgctgccaccgcctacagagcctgccttgcgcctggtgctgccaggaagatgcggccggagcccggaggctgctgctgccgccgcacggtgcgggcgaatggctgcgtggcgaacggggaagtacggaacgggtacgtgaggagcagcgctgcagccgcagccgcagccgccgccggccagatccatcatgttacacaaaatggaggactatataaaagaccgtttaatgaagcttttgaagaaacaccaatgctggttgctgtgctcacgtatgtggggtatggcgtactcaccctctttggatatcttcgagatttcttgaggtattggagaattgaaaagtgtcaccatgcaacagaaagagaagaacaaaaggactttgtgtcattgtatcaagattttgaaaacttttatacaaggaatctgtacatgaggataagagacaactggaatcggccaatctgtagtgtgcctggagccagggtggacatcatggagagacagtctcatgattataactggtccttcaagtatacagggaatataataaagggtgttataaacatgggttcctacaactatcttggatttgcacggaatactggatcatgtcaagaagcagccgccaaagtccttgaggagtatggagctggagtgtgcagtactcggcaggaaattggaaacctggacaagcatgaagaactagaggagcttgtagcaaggttcttaggagtagaagctgctatggcgtatggcatgggatttgcaacgaattcaatgaacattcctgctcttgttggcaaaggttgcctgattctgagtgatgaactgaaccatgcatcactggttctgggagccagactgtcaggagcaaccattagaatcttcaaacacaacaatatgcaaagcctagagaagctattgaaagatgccattgtttatggtcagcctcggacacgaaggccctggaagaaaattctcatccttgtggaaggaatatatagcatggagggatctattgttcgtcttcctgaagtgattgccctcaagaagaaatacaaggcatacttgtatctggatgaggctcacagcattggcgccctgggccccacaggccggggtgtggtggagtactttggcctggatcccgaggatgtggatgttatgatgggaacgttcacaaagagttttggtgcttctggaggatatattggaggcaagaaggagctgatagactacctgcgaacacattctcatagtgcagtgtatgccacgtcattgtcacctcctgtagtggagcagatcatcacctccatgaagtgcatcatggggcaggatggcaccagccttggtaaagagtgtgtacaacagttagctgaaaacaccaggtatttcaggagacgcctgaaagagatgggcttcatcatctatggaaatgaagactctccagtagtgcctttgatgctctacatgcctgccaaaattggcgcctttggacgggagatgctgaagcggaacatcggtgtcgttgtggttggatttcctgccaccccaattattgagtccagagccaggttttgcctgtcagcagctcataccaaagaaatacttgatactgctttaaaggagatagatgaagttggggacctattgcagctgaagtattcccgtcatcggttggtacctctactggacaggccctttgacgagacgacgtatgaagaaacagaagactgagcctttttggtgctccctcagaggaactctccctcacccaggacagcctgtggcctttgtgagccagttccaggaaccacacttctgtggccatctcacgtgaaagacattgcctcagctactgaaggtggccacctccactctaaatgacattttgtaaatagtaaaaaactgcttctaatccttcctttgctaaatctcacctttaaaaacgaaggtgactcactttgctttttcagtccattaaaaaaacattttattttgcaacc

SEQ ID NO: 447754 - DNA, 8190 bp, Homo sapiens
  misc_feature (8167)..(8167): n is a, c, g, or t
cgagaccggtcctctgcggagagggccccgccctctgtgaaggcccgcccgggaattggcggcggcgctgcagccatttccggtttcggggaggtgggtggggtgcggagcgggacttggagcagccgccgccgctgccaccgcctacagagcctgccttgcgcctggtgctgccaggaagatgcggccggagcccggaggctgctgctgccgccgcacggtgcgggcgaatggctgcgtggcgaacggggaagtacggaacgggtacgtgaggagcagcgctgcagccgcagccgcagccgccgccggccagatccatcatgttacacaaaatggaggactatataaaagaccgtttaatgaagcttttgaagaaacaccaatgctggttgctgtgctcacgtatgtggggtatggcgtactcaccctctttggatatcttcgagatttcttgaggtattggagaattgaaaagtgtcaccatgcaacagaaagagaagaacaaaaggactttgtgtcattgtatcaagattttgaaaacttttatacaaggaatctgtacatgaggataagagacaactggaatcggccaatctgtagtgtgcctggagccagggtggacatcatggagagacagtctcatgattataactggtccttcaagtatacagggaatataataaagggtgttataaacatgggttcctacaactatcttggatttgcacggaatactggatcatgtcaagaagcagccgccaaagtccttgaggagtatggagctggagtgtgcagtactcggcaggaaattggaaacctggacaagcatgaagaactagaggagcttgtagcaaggttcttaggagtagaagctgctatggcgtatggcatgggatttgcaacgaattcaatgaacattcctgctcttgttggcaaaggttgcctgattctgagtgatgaactgaaccatgcatcactggttctgggagccagactgtcaggagcaaccattagaatcttcaaacacaacaatatgcaaagcctagagaagctattgaaagatgccattgtttatggtcagcctcggacacgaaggccctggaagaaaattctcatccttgtggaaggaatatatagcatggagggatctattgttcgtcttcctgaagtgattgccctcaagaagaaatacaaggcatacttgtatctggatgaggctcacagcattggcgccctgggccccacaggccggggtgtggtggagtactttggcctggatcccgaggatgtggatgttatgatgggaacgttcacaaagagttttggtgcttctggaggatatattggaggcaagaaggagctgatagactacctgcgaacacattctcatagtgcagtgtatgccacgtcattgtcacctcctgtagtggagcagatcatcacctccatgaagtgcatcatggggcaggatggcaccagccttggtaaagagtgtgtacaacagttagctgaaaacaccaggtatttcaggagacgcctgaaagagatgggcttcatcatctatggaaatgaagactctccagtagtgcctttgatgctctacatgcctgccaaaattggcgcctttggacgggagatgctgaagcggaacatcggtgtcgttgtggttggatttcctgccaccccaattattgagtccagagccaggttttgcctgtcagcagctcataccaaagaaatacttgatactgctttaaaggagatagatgaagttggggacctattgcagctgaagtattcccgtcatcggttggtacctctactggacaggccctttgacgagacgacgtatgaagaaacagaagactgagcctttttggtgctccctcagaggaactctccctcacccaggacagcctgtggcctttgtgagccagttccaggaaccacacttctgtggccatctcacgtgaaagacattgcctcagctactgaaggtggccacctccactctaaatgacattttgtaaatagtaaaaaactgcttctaatccttcctttgctaaatctcacctttaaaaacgaaggtgactcactttgctttttcagtccattaaaaaaacattttattttgcaaccattctacttgtgaaatcacgctgaccctagcctgtctctggctaaccacacaggccattcccctctcccagcaccttgcagacttgggcccatcaagagctactgctggccctggctccgcagcctggatacttacctggccctcctccctagggagcaagtgccttccacttacttcccatccaggtctcagaggtctcaaggccaaccttggaatccttatttaaccattcaagtaatcaacggaagttttcaccctttaatcttaagtttagccttttaagaaaaacagtaagcgatgactgctgaaaggctcattgtgtaatctcccaagggtttggtcttattccattttcttctggtcaccagatgatttcttcctttaccatcaaatacttcttcataatggtcacagtctgaggatgtgcgcaaattctggttcttcccaagctctaaccgtaacacgtcccaccccctttttaaagcacttactgttttcagagcacccatatcccaccctggtgagaaggccactctcacatctgagtgttgggtacaaagctgctccgtagagtgatgtgcactcctggtgggtgaggggcaggggcagtggcagtgtgcaaagaattgattactccttgcagagcctgtggcttgcatttcctactgctttctacgtttgaaaattatgacagtctctggctaggtctgggtccagattaggatttaaactgataaaggaaactgttggtaaatcctctgctcagaaagcatttatcatgttcctatttaaggattaggtttattaatttaggcctcttagaagctaacccacttaaatattactcttctgaatgctagttctcttttattcttgatgtcctaagtcaattgaatctggcatctggggctagggtctgcctgtctacatattttttatttttttctgagaaattctgaacacatagatctctttcctaaactgacattttctattttgactgttttcatactataaccaggtaaagggacttctttcagagagctttatactgcctgaccaaagaacaaatctgaaaatcaccattttaaagttattttttcagttgaaccaaagtttaagtgaagaggacttttggcatattatacccaggatcagtttgtctttttgtatccatcaagtattacaggagaaggattgggaacagaatggaaaaacagtgtatgaaagtcatgttacaggccgagtgcggtggctcacacctgtaatcctagcactttgggaggctgaggcaggtggctcacttgaggtcaggaattcaagaccagcctggccaacatggtgaaaccccgtctctactaaaaagacaaaaaattagctgggcgtggtggcgggcacctataatcccacctacttggtaggctgaggcaggagaatcgcttgaacccaggaggcggaggttgcagtgagacgagattgtgccactgcactctagcctgggtgacagagcaaaactgtgtctcaaaaaaaaaaaagtcatgttacacatttaagtttttgaaattgctccttttatcggtaaagattctcaatccaaattctcctgggtgtgttgtcatcagctgtgatatgtttgtgcacattacgtatagcagaggatgtaagcaatattattgtttgtgaagttttgtttttaatgtcttgagtatgagttatgtttagtcactgtcagcatctgagaactttaataagcccttgagatattccaaagttttattttacttttttaaagaacagaaaaagatgaatgaaagaaccaaggagagatgcagagactatatttagcatgtataggttaaagtaagaaggaggttgtggtaactaaataggagtcctataaaatcaaatacattgtcaaccttttctgcacatctagtttcctaccatagaatcccactggaataccacatagcttttgcactgcagttactatttactaatgtaaacgtagggtttgtaaaagtcacaaacttgtaagcaatgaacttacctgctagtctttttattttggcttgcatgaagtcactgcaaattcaaatgtcagtaccggcatttaaaatatatctatatcactttgttggtacaaagttatttcaagataagtgtaattttgttacaagtttattttgaagagacaaatctcctgtgatctatgcaggacctctgtactttctaaagaacaaaatgttatgtagacattatacatggttggttgtctcttcttgaaactgtaatgtaaatctagggtccagtcatatcctaggtatcatcatttatccaagtacttggaggaatacaagtatatataaatacagtcattgagaataagtcgatttgaggcatacaagagtagtttcttacacagtttaacacggcctgattcaagactctgataggattcaaacagataccggttaaccatgactaccaaaactgatcatctgagtcgattgatagaggtgtgactagtccttagcactttttctcattcctctttttattcagcattgctgttacctatttcaggtttataagacctctttcagcagatcacatcagaagccaggaaatgcatagctaggagatgtcaaaagcccatatgaggagtggaccaagcagcagtggcggtttctcctcgcatctttttttttttaagctttaacttagcaggggcatggactttatagcactttttcaactttttgctttgctttggataagaaatccttacctttaaaaaaagcttctagtctccataacccccaaagtactgcttatttgtttgaagaatccagccatcgtagtgctttagtcactatcgtaaacattcatgatagggcaaggattttaaaacaggattcttgcttctgtagtcatcaaggtgaacagaagcatcctacacaaccactaagggctctatgtttgtgtcatgcctcttcaaacaccaaggagttgaacatgcttccagtgatttgtctccgtaatgccttcttcctttatttggcctttctttctttctgtaccttcaagttcttgatttttaaaattccaactctagagaaaaccaatatatggtggtgctgggctttgaagatagcatatcagacgccttggttctgtttgtacacttagccttacatttcaggaggaggcttttcattaggggcttaagctagctcctttggcttttaaaaaaaattttttttcaaatttcttcattacctaagggagcctgcatctaaatttctcaactagttcagcctagctgaattttctagtgtgtaatacactttgcttccttcttattggtgaaaaccagggggatgagtggcttccatggagagatttcctgatttctcagggaggaaaaaagtgatgacatttaccactacttttatgtttttcccctttttccaaattgataaggatttctggttcctagtgatccgggattgggcaacagtgcagaactgccagtcatgccgtaggccgtgaagaaagaatgtgagtaactgttgttttgcaaggatttgtagggttatgggcagttgttgtttgaagcattgctatgacctaattcccaaggtatctttcctctcttggtgttctaggtaagccaatgagctttaatctctacttgctataaccgtgtgcttagaaaaagaggtgagagtagtggttttccttcaaactgtccacattcatgaagattatgaattgttaggacagccagggcaagatagaccctgtctctacaaaaatttttttctaaattaaccgggcatggtggtgcctgcctgtagtcccacctgtgtgggagaatcacttgagcctgggaggtcaaggctgcagtgagccatgattgcacccctgcactccagcctgggtgacagagtgagaccctggctcaataagagggggaaaaaaaattgttaggagctgggtgcggatgcagcctgcaatcccagctacttgagaggctgaggccggaggattgcttaaacccaagaatttgagcgtagcctgggcaacacagcaagaccccatctaagaaaaaaatgttttttaaatcagcttagcccaaaggggttgtgaatggggaggtataaaaagcaaagattattttttggctactaagccaagaacttacagggattttttttttcagtcccagaacctacagataccctgctacttgcttcacgtggatgctcagtgcccagcagccatcttaatacattaaaccagtttaaaaaataccttccatgtggagaaaaacatgtctttttctcgcctcaactttatccacatgaaatgtgtgcccatggctgggcgcagtggctcatgcctgtaatcccaacactttgggaggctgaagcaggcagattgcttgaggccaggagttcgagaacagtctggccaacatggcgaaacctcatctctactaaaattacaaaaattagccgggcatggtggcacatgcctgtaatcccagctacgtcaggaggctgaggcacaggaattgcttgaacccaagaggcagaggatgcaatgagccaagatcacaccactgcactccagccttggcgacagagggagactctgtctcaaaaaaaaaaaaaaaaggtgtgcccaggcccctagccattgccatgtgcccagccagagagccaaattagagggctggcttccctatcacacagaataaatgctagtgctagccaatgatccctttgcttttaatgtatagaaaatactgttgttccttttgtcatttccagtgacatctgttttctaagcagctcttttctagggaggaaaccaaaggggctaggttaagaccctaatagaaatgttttttctaatctctggtgagtctggaagtgtcacattcacagtccacccttgggagtggcttggtggagctggggacaaggttttgtttactacatagtgcacatgataaatggccttaaactgtgattctttctggtaggataagttataataaactgaccctaaagaatgcaatggcttttaaactgcagttactgtgttcttaatgaagcaatacccaaagctctgttcttttggagcacttgaggggagcttgaatgaaaggtgcagataagagcagtaccttgatcttatgctttctgagtgtcctgccttgttgccatctgcatggatgagtgaatgcttctatgcacgaggagactcaagccaactcagagtctgctttttccaacgctcttcccaggtttcttttgcaaagcttggtcatttggcccaggtcttcctggaaagtggagtacatgtcactgactagggtggcgtggtgtctttacccttaacattaagtcttgttacctcagtgatgtgaagccaatggttggaattataaaaagcatccttgctggttcttcacaggacactggaacccaccctgtcaattcagctagcatgtccacacagtcttgatgatccctctctgtaacaggcagctaacattaagagaagggggaaagagaagaagagagcaatagcttatgggagagctgagatcttacttcgttgacccatatttttcccctgaccaagttacctgtaaactggaatttgcaaggggatgctgtgatgataacccctttctattgctgtaatgttcatataacctgggaaactgagagaaggggatgtgtaaataaaagcttaaacattttagtaatgtgttaaaatgtcactctctcttaccctgtttcccttttttgccagatgatgatttttttatttttattttgtactttactggatgactgtgaagcgatgagtattgggttggggtaggtgtgttgattttgagagtgcatgttaagaactgaaggggaactacttgagatgacttaagaagcatcccatgcaaatatcttgttttgccctaataaaatattcagaaagataaaaacncacacaagaaacaaaaaaaaagg

SEQ ID NO: 447755 - DNA, 8195 bp, Homo sapiens
cgagaccggtcctctgcggagagggccccgccctctgtgaaggcccgcccgggaattggcggcggcgctgcagccatttccggtttcggggaggtgggtggggtgcggagcgggacttggagcagccgccgccgctgccaccgcctacagagcctgccttgcgcctggtgctgccaggaagatgcggccggagcccggaggctgctgctgccgccgcacggtgcgggcgaatggctgcgtggcgaacggggaagtacggaacgggtacgtgaggagcagcgctgcagccgcagccgcagccgccgccggccagatccatcatgttacacaaaatggaggactatataaaagaccgtttaatgaagcttttgaagaaacaccaatgctggttgctgtgctcacgtatgtggggtatggcgtactcaccctctttggatatcttcgagatttcttgaggtattggagaattgaaaagtgtcaccatgcaacagaaagagaagaacaaaaggactttgtgtcattgtatcaagattttgaaaacttttatacaaggaatctgtacatgaggataagagacaactggaatcggccaatctgtagtgtgcctggagccagggtggacatcatggagagacagtctcatgattataactggtccttcaagtatacagggaatataataaagggtgttataaacatgggttcctacaactatcttggatttgcacggaatactggatcatgtcaagaagcagccgccaaagtccttgaggagtatggagctggagtgtgcagtactcggcaggaaattggaaacctggacaagcatgaagaactagaggagcttgtagcaaggttcttaggagtagaagctgctatggcgtatggcatgggatttgcaacgaattcaatgaacattcctgctcttgttggcaaaggttgcctgattctgagtgatgaactgaaccatgcatcactggttctgggagccagactgtcaggagcaaccattagaatcttcaaacacaacaatatgcaaagcctagagaagctattgaaagatgccattgtttatggtcagcctcggacacgaaggccctggaagaaaattctcatccttgtggaaggaatatatagcatggagggatctattgttcgtcttcctgaagtgattgccctcaagaagaaatacaaggcatacttgtatctggatgaggctcacagcattggcgccctgggccccacaggccggggtgtggtggagtactttggcctggatcccgaggatgtggatgttatgatgggaacgttcacaaagagttttggtgcttctggaggatatattggaggcaagaaggagctgatagactacctgcgaacacattctcatagtgcagtgtatgccacgtcattgtcacctcctgtagtggagcagatcatcacctccatgaagtgcatcatggggcaggatggcaccagccttggattattttgttttctctcaccgtgactttccaggtaaagagtgtgtacaacagttagctgaaaacaccaggtatttcaggagacgcctgaaagagatgggcttcatcatctatggaaatgaagactctccagtagtgcctttgatgctctacatgcctgccaaaattggcgcctttggacgggagatgctgaagcggaacatcggtgtcgttgtggttggatttcctgccaccccaattattgagtccagagccaggttttgcctgtcagcagctcataccaaagaaatacttgatactgctttaaaggagatagatgaagttggggacctattgcagctgaagtattcccgtcatcggttggtacctctactggacaggccctttgacgagacgacgtatgaagaaacagaagactgagcctttttggtgctccctcagaggaactctccctcacccaggacagcctgtggcctttgtgagccagttccaggaaccacacttctgtggccatctcacgtgaaagacattgcctcagctactgaaggtggccacctccactctaaatgacattttgtaaatagtaaaaaactgcttctaatccttcctttgctaaatctcacctttaaaaacgaaggtgactcactttgctttttcagtccattaaaaaaacattttattttgcaaccattctacttgtgaaatcacgctgaccctagcctgtctctggctaaccacacaggccattcccctctcccagcaccttgcagacttgggcccatcaagagctactgctggccctggctccgcagcctggatacttacctggccctcctccctagggagcaagtgccttccacttacttcccatccaggtctcagaggtctcaaggccaaccttggaatccttatttaaccattcaagtaatcaacggaagttttcaccctttaatcttaagtttagccttttaagaaaaacagtaagcgatgactgctgaaaggctcattgtgtaatctcccaagggtttggtcttattccattttcttctggtcaccagatgatttcttcctttaccatcaaatacttcttcataatggtcacagtctgaggatgtgcgcaaattctggttcttcccaagctctaaccgtaacacgtcccaccccctttttaaagcacttactgttttcagagcacccatatcccaccctggtgagaaggccactctcacatctgagtgttgggtacaaagctgctccgtagagtgatgtgcactcctggtgggtgaggggcaggggcagtggcagtgtgcaaagaattgattactccttgcagagcctgtggcttgcatttcctactgctttctacgtttgaaaattatgacagtctctggctaggtctgggtccagattaggatttaaactgataaaggaaactgttggtaaatcctctgctcagaaagcatttatcatgttcctatttaaggattaggtttattaatttaggcctcttagaagctaacccacttaaatattactcttctgaatgctagttctcttttattcttgatgtcctaagtcaattgaatctggcatctggggctagggtctgcctgtctacatattttttatttttttctgagaaattctgaacacatagatctctttcctaaactgacattttctattttgactgttttcatactataaccaggtaaagggacttctttcagagagctttatactgcctgaccaaagaacaaatctgaaaatcaccattttaaagttattttttcagttgaaccaaagtttaagtgaagaggacttttggcatattatacccaggatcagtttgtctttttgtatccatcaagtattacaggagaaggattgggaacagaatggaaaaacagtgtatgaaagtcatgttacaggccgagtgcggtggctcacacctgtaatcctagcactttgggaggctgaggcaggtggctcacttgaggtcaggaattcaagaccagcctggccaacatggtgaaaccccgtctctactaaaaagacaaaaaattagctgggcgtggtggcgggcacctataatcccacctacttggtaggctgaggcaggagaatcgcttgaacccaggaggcggaggttgcagtgagacgagattgtgccactgcactctagcctgggtgacagagcaaaactgtgtctcaaaaaaaaaaaagtcatgttacacatttaagtttttgaaattgctccttttatcggtaaagattctcaatccaaattctcctgggtgtgttgtcatcagctgtgatatgtttgtgcacattacgtatagcagaggatgtaagcaatattattgtttgtgaagttttgtttttaatgtcttgagtatgagttatgtttagtcactgtcagcatctgagaactttaataagcccttgagatattccaaagttttattttacttttttaaagaacagaaaaagatgaatgaaagaaccaaggagagatgcagagactatatttagcatgtataggttaaagtaagaaggaggttgtggtaactaaataggagtcctataaaatcaaatacattgtcaaccttttctgcacatctagtttcctaccatagaatcccactggaataccacatagcttttgcactgcagttactatttactaatgtaaacgtagggtttgtaaaagtcacaaacttgtaagcaatgaacttacctgctagtctttttattttggcttgcatgaagtcactgcaaattcaaatgtcagtaccggcatttaaaatatatctatatcactttgttggtacaaagttatttcaagataagtgtaattttgttacaagtttattttgaagagacaaatctcctgtgatctatgcaggacctctgtactttctaaagaacaaaatgttatgtagacattatacatggttggttgtctcttcttgaaactgtaatgtaaatctagggtccagtcatatcctaggtatcatcatttatccaagtacttggaggaatacaagtatatataaatacagtcattgagaataagtcgatttgaggcatacaagagtagtttcttacacagtttaacacggcctgattcaagactctgataggattcaaacagataccggttaaccatgactaccaaaactgatcatctgagtcgattgatagaggtgtgactagtccttagcactttttctcattcctctttttattcagcattgctgttacctatttcaggtttataagacctctttcagcagatcacatcagaagccaggaaatgcatagctaggagatgtcaaaagcccatatgaggagtggaccaagcagcagtggcggtttctcctcgcatctttttttttttaagctttaacttagcaggggcatggactttatagcactttttcaactttttgctttgctttggataagaaatccttacctttaaaaaaagcttctagtctccataacccccaaagtactgcttatttgtttgaagaatccagccatcgtagtgctttagtcactatcgtaaacattcatgatagggcaaggattttaaaacaggattcttgcttctgtagtcatcaaggtgaacagaagcatcctacacaaccactaagggctctatgtttgtgtcatgcctcttcaaacaccaaggagttgaacatgcttccagtgatttgtctccgtaatgccttcttcctttatttggcctttctttctttctgtaccttcaagttcttgatttttaaaattccaactctagagaaaaccaatatatggtggtgctgggctttgaagatagcatatcagacgccttggttctgtttgtacacttagccttacatttcaggaggaggcttttcattaggggcttaagctagctcctttggcttttaaaaaaaattttttttcaaatttcttcattacctaagggagcctgcatctaaatttctcaactagttcagcctagctgaattttctagtgtgtaatacactttgcttccttcttattggtgaaaaccagggggatgagtggcttccatggagagatttcctgatttctcagggaggaaaaaagtgatgacatttaccactacttttatgtttttcccctttttccaaattgataaggatttctggttcctagtgatccgggattgggcaacagtgcagaactgccagtcatgccgtaggccgtgaagaaagaatgtgagtaactgttgttttgcaaggatttgtagggttatgggcagttgttgtttgaagcattgctatgacctaattcccaaggtatctttcctctcttggtgttctaggtaagccaatgagctttaatctctacttgctataaccgtgtgcttagaaaaagaggtgagagtagtggttttccttcaaactgtccacattcatgaagattatgaattgttaggacagccagggcaagatagaccctgtctctacaaaaatttttttctaaattaaccgggcatggtggtgcctgcctgtagtcccacctgtgtgggagaatcacttgagcctgggaggtcaaggctgcagtgagccatgattgcacccctgcactccagcctgggtgacagagtgagaccctggctcaataagagggggaaaaaaaattgttaggagctgggtgcggatgcagcctgcaatcccagctacttgagaggctgaggccggaggattgcttaaacccaagaatttgagcgtagcctgggcaacacagcaagaccccatctaagaaaaaaatgttttttaaatcagcttagcccaaaggggttgtgaatggggaggtataaaaagcaaagattattttttggctactaagccaagaacttacagggattttttttttcagtcccagaacctacagataccctgctacttgcttcacgtggatgctcagtgcccagcagccatcttaatacattaaaccagtttaaaaaataccttccatgtggagaaaaacatgtctttttctcgcctcaactttatccacatgaaatgtgtgcccatggctgggcgcagtggctcatgcctgtaatcccaacactttgggaggctgaagcaggcagattgcttgaggccaggagttcgagaacagtctggccaacatggcgaaacctcatctctactaaaattacaaaaattagccgggcatggtggcacatgcctgtaatcccagctacgtcaggaggctgaggcacaggaattgcttgaacccaagaggcagaggatgcaatgagccaagatcacaccactgcactccagccttggcgacagagggagactctgtctcaaaaaaaaaaaaaaaaggtgtgcccaggcccctagccattgccatgtgcccagccagagagccaaattagagggctggcttccctatcacacagaataaatgctagtgctagccaatgatccctttgcttttaatgtatagaaaatactgttgttccttttgtcatttccagtgacatctgttttctaagcagctcttttctagggaggaaaccaaaggggctaggttaagaccctaatagaaatgttttttctaatctctggtgagtctggaagtgtcacattcacagtccacccttgggagtggcttggtggagctggggacaaggttttgtttactacatagtgcacatgataaatggccttaaactgtgattctttctggtaggataagttataataaactgaccctaaagaatgcaatggcttttaaactgcagttactgtgttcttaatgaagcaatacccaaagctctgttcttttggagcacttgaggggagcttgaatgaaaggtgcagataagagcagtaccttgatcttatgctttctgagtgtcctgccttgttgccatctgcatggatgagtgaatgcttctatgcacgaggagactcaagccaactcagagtctgctttttccaacgctcttcccaggtttcttttgcaaagcttggtcatttggcccaggtcttcctggaaagtggagtacatgtcactgactagggtggcgtggtgtctttacccttaacattaagtcttgttacctcagtgatgtgaagccaatggttggaattataaaaagcatccttgctggttcttcacaggacactggaacccaccctgtcaattcagctagcatgtccacacagtcttgatgatccctctctgtaacaggcagctaacattaagagaagggggaaagagaagaagagagcaatagcttatgggagagctgagatcttacttcgttgacccatatttttcccctgaccaagttacctgtaaactggaatttgcaaggggatgctgtgatgataacccctttctattgctgtaatgttcatataacctgggaaactgagagaaggggatgtgtaaataaaagcttaaacattttagtaatgtgttaaaatgtcactctctcttaccctgtttcccttttttgccagatgatgatttttttatttttattttgtactttactggatgactgtgaagcgatgagtattgggttggggtaggtgtgttgattttgagagtgcatgttaagaactgaaggggaactacttgagatgacttaagaagcatcccatgcaaatatcttgttttgccctaataaaatattcagaaagata

SEQ ID NO: 447756 - DNA, 1892 bp, Homo sapiens
cgagaccggtcctctgcggagagggccccgccctctgtgaaggcccgcccgggaattggcggcggcgctgcagccatttccggtttcggggaggtgggtggggtgcggagcgggacttggagcagccgccgccgctgccaccgcctacagagcctgccttgcgcctggtgctgccaggaagatgcggccggagcccggaggctgctgctgccgccgcacggtgcgggcgaatggctgcgtggcgaacggggaagtacggaacgggtacgtgaggagcagcgctgcagccgcagccgcagccgccgccggccagatccatcatgttacacaaaatggaggactatataaaagaccgtttaatgaagcttttgaagaaacaccaatgctggttgctgtgctcacgtatgtggggtatggcgtactcaccctctttggatatcttcgagatttcttgaggtattggagaattgaaaagtgtcaccatgcaacagaaagagaagaacaaaaggactttgtgtcattgtatcaagattttgaaaacttttatacaaggaatctgtacatgaggataagagacaactggaatcggccaatctgtagtgtgcctggagccagggtggacatcatggagagacagtctcatgattataactggtccttcaagtatacagggaatataataaagggtgttataaacatgggttcctacaactatcttggatttgcacggaatactggatcatgtcaagaagcagccgccaaagtccttgaggagtatggagctggagtgtgcagtactcggcaggaaattggaaacctggacaagcatgaagaactagaggagcttgtagcaaggttcttaggagtagaagctgctatggcgtatggcatgggatttgcaacgaattcaatgaacattcctgctcttgttggcaaaggttgcctgattctgagtgatgaactgaaccatgcatcactggttctgggagccagactgtcaggagcaaccattagaatcttcaaacacaacaatatgcaaagcctagagaagctattgaaagatgccattgtttatggtcagcctcggacacgaaggccctggaagaaaattctcatccttgtggaaggaatatatagcatggagggatctattgttcgtcttcctgaagtgattgccctcaagaagaaatacaaggcatacttgtatctggatgaggctcacagcattggcgccctgggccccacaggccggggtgtggtggagtactttggcctggatcccgaggatgtggatgttatgatgggaacgttcacaaagagttttggtgcttctggaggatatattggaggcaagaaggagctgatagactacctgcgaacacattctcatagtgcagtgtatgccacgtcattgtcacctcctgtagtggagcagatcatcacctccatgaagtgcatcatggggcaggatggcaccagccttggtaatggcatcactattcatgaagttgtccaaacaagaaatacctatcatcgtttctctcctttatcccctgtatttagtcaccagtgcctatggatcatgcttccttaatatctttgaacctgtctacttctccatatctcattgttatttacttgacttagatttctgtccactttcacctggttttaatagccagccagtcataatagtagaggaatcagtcaagcaaaaatgctttggaagaattaaataagcaatgctgaacatcaggaattgtagatatccgtacagagagttccagtaaaattttatgagtccacgaccccttttctaagcagtctggtccatgttggtctcatacctcatatgcaggattcattcattcattaaatatttgtttcatacc

SEQ ID NO: 447757 - DNA, 1096 bp, Homo sapiens
cgagaccggtcctctgcggagagggccccgccctctgtgaaggcccgcccgggaattggcggcggcgctgcagccatttccggtttcggggaggtgggtggggtgcggagcgggacttggagcagccgccgccgctgccaccgcctacagagcctgccttgcgcctggtgctgccaggaagatgcggccggagcccggaggctgctgctgccgccgcacggtgcgggcgaatggctgcgtggcgaacggggaagtacggaacgggtacgtgaggagcagcgctgcagccgcagccgcagccgccgccggccagatccatcatgttacacaaaatggaggactatataaaagaccgtttaatgaagcttttgaagaaacaccaatgctggttgctgtgctcacgtatgtggggtatggcgtactcaccctctttggatatcttcgagatttcttgaggtattggagaattgaaaagtgtcaccatgcaacagaaagagaagaacaaaaggactttgtgtcattgtatcaagattttgaaaacttttatacaaggaatctgtacatgaggataagagacaactggaatcggccaatctgtagtgtgcctggagccagggtggacatcatggagagacagtctcatgattataactggtccttcaagtatacagggaatataataaagggtgttataaacatgggttcctacaactatcttggatttgcacggaatactggatcatgtcaagaagcagccgccaaagtccttgaggagtatggagctggagtgtgcagtactcggcaggaaattggaaacctggacaagcatgaagaactagaggagcttgtagcaaggttcttaggagtagaagctgctatggcgtatggcatgggatttgcaacgaattcaatgaacattcctgctcttgttggcaaaggttgcctgattctgagtgatgaactgaaccatgcatcactggttctgggagccagactgtcaggagcaaccattagaatcttcaaacacaacaatacgcgaagcctagagaagctattgtaagatgccaccccaattatggagtccagagccatgtct

SEQ ID NO: 447758 - DNA, 494 bp, Homo sapiens
gcttcgaccatgttggttgaccttgtatctcagattagtgtccctattccagtgccgttgaagtgagggtcctctagaacttagaaggaaaggactgacattgccagtgaatgcaagaattgtctctacttatctgcctctgtgaactccccaggagctgatagactacctgcgaacacattctcatagtgcagtgtatgccacgtcattgtcacctcctgtagtggagcagatcatcacctccatgaagtgcatcatggggcaggatggcaccagccttggtaagtctttcttttcttgaaacattgcataagtccacctagcagccaaacgtgctgtttttcttgagcttttttcctaaaataaatagtcaggtttactaataggcagagctggctggtgtgtggtttccatggacacttttttagtgtgtttgatacatatgccatgagaacgaccctggctcactttctgtggaattttcttgtttatag

SEQ ID NO: 447759 - DNA, 382 bp, Homo sapiens
tggacaagcatgaagaactagaggagcttgtagcaaggttcttaggagtagaagctgctatggcgtatggcatgggatttgcaacgaattcaatgaacattcctgctcttgttggcaaagtaagatactctgtcatttatgaaaactccctcatgtatatcttcttttgttttgaaaagcagtcagagtgagctaaaagctgttataaactttaggctaaacatagtttagccaaagatatttctaccacaaattgtttttcttttttttttttttttttgagatggagtcttgttctttcgcccaggctggagtgcagtggcaccatctcagctcactgcagcctctgtctcttggattcaagcgattctcctgcctcagc

SEQ ID NO: 447760 - DNA, 8161 bp, Homo sapiens
cgagaccggtcctctgcggagagggccccgccctctgtgaaggcccgcccgggaattggcggcggcgctgcagccatttccggtttcggggaggtgggtggggtgcggagcgggacttggagcagccgccgccgctgccaccgcctacagagcctgccttgcgcctggtgctgccaggaagatgcggccggagcccggaggctgctgctgccgccgcacggtgcgggcgaatggctgcgtggcgaacggggaagtacggaacgggtacgtgaggagcagcgctgcagccgcagccgcagccgccgccggccagatccatcatgttacacaaaatggaggactatataaaagaccgtttaatgaagcttttgaagaaacaccaatgctggttgctgtgctcacgtatgtggggtatggcgtactcaccctctttggatatcttcgagatttcttgaggtattggagaattgaaaagtgtcaccatgcaacagaaagagaagaacaaaaggactttgtgtcattgtatcaagattttgaaaacttttatacaaggaatctgtacatgaggataagagacaactggaatcggccaatctgtagtgtgcctggagccagggtggacatcatggagagacagtctcatgattataactggtccttcaagtatacagggaatataataaagggtgttataaacatgggttcctacaactatcttggatttgcacggaatactggatcatgtcaagaagcagccgccaaagtccttgaggagtatggagctggagtgtgcagtactcggcaggaaattggaaacctggacaagcatgaagaactagaggagcttgtagcaaggttcttaggagtagaagctgctatggcgtatggcatgggatttgcaacgaattcaatgaacattcctgctcttgttggcaaaggttgcctgattctgagtgatgaactgaaccatgcatcactggttctgggagccagactgtcaggagcaaccattagaatcttcaaacacaacaatatgcaaagcctagagaagctattgaaagatgccattgtttatggtcagcctcggacacgaaggccctggaagaaaattctcatccttgtggaaggaatatatagcatggagggatctattgttcgtcttcctgaagtgattgccctcaagaagaaatacaaggcatacttgtatctggatgaggctcacagcattggcgccctgggccccacaggccggggtgtggtggagtactttggcctggatcccgaggatgtggatgttatgatgggaacgttcacaaagagttttggtgcttctggaggatatattggaggcaagaaggagctgatagactacctgcgaacacattctcatagtgcagtgtatgccacgtcattgtcacctcctgtagtggagcagatcatcacctccatgaagtgcatcatggggcaggatggcaccagccttggtaaagagtgtgtacaacagttagctgaaaacaccaggtatttcaggagacgcctgaaagagatgggcttcatcatctatggaaatgaagactctccagtagtgcctttgatgctctacatgcctgccaaaattggcgcctttggacgggagatgctgaagcggaacatcggtgtcgttgtggttggatttcctgccaccccaattattgagtccagagccaggttttgcctgtcagcagctcataccaaagaaatacttgatactgctttaaaggagatagatgaagttggggacctattgcagctgaagtattcccgtcatcggttggtacctctactggacaggccctttgacgagacgacgtatgaagaaacagaagactgagcctttttggtgctccctcagaggaactctccctcacccaggacagcctgtggcctttgtgagccagttccaggaaccacacttctgtggccatctcacgtgaaagacattgcctcagctactgaaggtggccacctccactctaaatgacattttgtaaatagtaaaaaactgcttctaatccttcctttgctaaatctcacctttaaaaacgaaggtgactcactttgctttttcagtccattaaaaaaacattttattttgcaaccattctacttgtgaaatcacgctgaccctagcctgtctctggctaaccacacaggccattcccctctcccagcaccttgcagacttgggcccatcaagagctactgctggccctggctccgcagcctggatacttacctggccctcctccctagggagcaagtgccttccacttacttcccatccaggtctcagaggtctcaaggccaaccttggaatccttatttaaccattcaagtaatcaacggaagttttcaccctttaatcttaagtttagccttttaagaaaaacagtaagcgatgactgctgaaaggctcattgtgtaatctcccaagggtttggtcttattccattttcttctggtcaccagatgatttcttcctttaccatcaaatacttcttcataatggtcacagtctgaggatgtgcgcaaattctggttcttcccaagctctaaccgtaacacgtcccaccccctttttaaagcacttactgttttcagagcacccatatcccaccctggtgagaaggccactctcacatctgagtgttgggtacaaagctgctccgtagagtgatgtgcactcctggtgggtgaggggcaggggcagtggcagtgtgcaaagaattgattactccttgcagagcctgtggcttgcatttcctactgctttctacgtttgaaaattatgacagtctctggctaggtctgggtccagattaggatttaaactgataaaggaaactgttggtaaatcctctgctcagaaagcatttatcatgttcctatttaaggattaggtttattaatttaggcctcttagaagctaacccacttaaatattactcttctgaatgctagttctcttttattcttgatgtcctaagtcaattgaatctggcatctggggctagggtctgcctgtctacatattttttatttttttctgagaaattctgaacacatagatctctttcctaaactgacattttctattttgactgttttcatactataaccaggtaaagggacttctttcagagagctttatactgcctgaccaaagaacaaatctgaaaatcaccattttaaagttattttttcagttgaaccaaagtttaagtgaagaggacttttggcatattatacccaggatcagtttgtctttttgtatccatcaagtattacaggagaaggattgggaacagaatggaaaaacagtgtatgaaagtcatgttacaggccgagtgcggtggctcacacctgtaatcctagcactttgggaggctgaggcaggtggctcacttgaggtcaggaattcaagaccagcctggccaacatggtgaaaccccgtctctactaaaaagacaaaaaattagctgggcgtggtggcgggcacctataatcccacctacttggtaggctgaggcaggagaatcgcttgaacccaggaggcggaggttgcagtgagacgagattgtgccactgcactctagcctgggtgacagagcaaaactgtgtctcaaaaaaaaaaaagtcatgttacacatttaagtttttgaaattgctccttttatcggtaaagattctcaatccaaattctcctgggtgtgttgtcatcagctgtgatatgtttgtgcacattacgtatagcagaggatgtaagcaatattattgtttgtgaagttttgtttttaatgtcttgagtatgagttatgtttagtcactgtcagcatctgagaactttaataagcccttgagatattccaaagttttattttacttttttaaagaacagaaaaagatgaatgaaagaaccaaggagagatgcagagactatatttagcatgtataggttaaagtaagaaggaggttgtggtaactaaataggagtcctataaaatcaaatacattgtcaaccttttctgcacatctagtttcctaccatagaatcccactggaataccacatagcttttgcactgcagttactatttactaatgtaaacgtagggtttgtaaaagtcacaaacttgtaagcaatgaacttacctgctagtctttttattttggcttgcatgaagtcactgcaaattcaaatgtcagtaccggcatttaaaatatatctatatcactttgttggtacaaagttatttcaagataagtgtaattttgttacaagtttattttgaagagacaaatctcctgtgatctatgcaggacctctgtactttctaaagaacaaaatgttatgtagacattatacatggttggttgtctcttcttgaaactgtaatgtaaatctagggtccagtcatatcctaggtatcatcatttatccaagtacttggaggaatacaagtatatataaatacagtcattgagaataagtcgatttgaggcatacaagagtagtttcttacacagtttaacacggcctgattcaagactctgataggattcaaacagataccggttaaccatgactaccaaaactgatcatctgagtcgattgatagaggtgtgactagtccttagcactttttctcattcctctttttattcagcattgctgttacctatttcaggtttataagacctctttcagcagatcacatcagaagccaggaaatgcatagctaggagatgtcaaaagcccatatgaggagtggaccaagcagcagtggcggtttctcctcgcatctttttttttttaagctttaacttagcaggggcatggactttatagcactttttcaactttttgctttgctttggataagaaatccttacctttaaaaaaagcttctagtctccataacccccaaagtactgcttatttgtttgaagaatccagccatcgtagtgctttagtcactatcgtaaacattcatgatagggcaaggattttaaaacaggattcttgcttctgtagtcatcaaggtgaacagaagcatcctacacaaccactaagggctctatgtttgtgtcatgcctcttcaaacaccaaggagttgaacatgcttccagtgatttgtctccgtaatgccttcttcctttatttggcctttctttctttctgtaccttcaagttcttgatttttaaaattccaactctagagaaaaccaatatatggtggtgctgggctttgaagatagcatatcagacgccttggttctgtttgtacacttagccttacatttcaggaggaggcttttcattaggggcttaagctagctcctttggcttttaaaaaaaattttttttcaaatttcttcattacctaagggagcctgcatctaaatttctcaactagttcagcctagctgaattttctagtgtgtaatacactttgcttccttcttattggtgaaaaccagggggatgagtggcttccatggagagatttcctgatttctcagggaggaaaaaagtgatgacatttaccactacttttatgtttttcccctttttccaaattgataaggatttctggttcctagtgatccgggattgggcaacagtgcagaactgccagtcatgccgtaggccgtgaagaaagaatgtgagtaactgttgttttgcaaggatttgtagggttatgggcagttgttgtttgaagcattgctatgacctaattcccaaggtatctttcctctcttggtgttctaggtaagccaatgagctttaatctctacttgctataaccgtgtgcttagaaaaagaggtgagagtagtggttttccttcaaactgtccacattcatgaagattatgaattgttaggacagccagggcaagatagaccctgtctctacaaaaatttttttctaaattaaccgggcatggtggtgcctgcctgtagtcccacctgtgtgggagaatcacttgagcctgggaggtcaaggctgcagtgagccatgattgcacccctgcactccagcctgggtgacagagtgagaccctggctcaataagagggggaaaaaaaattgttaggagctgggtgcggatgcagcctgcaatcccagctacttgagaggctgaggccggaggattgcttaaacccaagaatttgagcgtagcctgggcaacacagcaagaccccatctaagaaaaaaatgttttttaaatcagcttagcccaaaggggttgtgaatggggaggtataaaaagcaaagattattttttggctactaagccaagaacttacagggattttttttttcagtcccagaacctacagataccctgctacttgcttcacgtggatgctcagtgcccagcagccatcttaatacattaaaccagtttaaaaaataccttccatgtggagaaaaacatgtctttttctcgcctcaactttatccacatgaaatgtgtgcccatggctgggcgcagtggctcatgcctgtaatcccaacactttgggaggctgaagcaggcagattgcttgaggccaggagttcgagaacagtctggccaacatggcgaaacctcatctctactaaaattacaaaaattagccgggcatggtggcacatgcctgtaatcccagctacgtcaggaggctgaggcacaggaattgcttgaacccaagaggcagaggatgcaatgagccaagatcacaccactgcactccagccttggcgacagagggagactctgtctcaaaaaaaaaaaaaaaaggtgtgcccaggcccctagccattgccatgtgcccagccagagagccaaattagagggctggcttccctatcacacagaataaatgctagtgctagccaatgatccctttgcttttaatgtatagaaaatactgttgttccttttgtcatttccagtgacatctgttttctaagcagctcttttctagggaggaaaccaaaggggctaggttaagaccctaatagaaatgttttttctaatctctggtgagtctggaagtgtcacattcacagtccacccttgggagtggcttggtggagctggggacaaggttttgtttactacatagtgcacatgataaatggccttaaactgtgattctttctggtaggataagttataataaactgaccctaaagaatgcaatggcttttaaactgcagttactgtgttcttaatgaagcaatacccaaagctctgttcttttggagcacttgaggggagcttgaatgaaaggtgcagataagagcagtaccttgatcttatgctttctgagtgtcctgccttgttgccatctgcatggatgagtgaatgcttctatgcacgaggagactcaagccaactcagagtctgctttttccaacgctcttcccaggtttcttttgcaaagcttggtcatttggcccaggtcttcctggaaagtggagtacatgtcactgactagggtggcgtggtgtctttacccttaacattaagtcttgttacctcagtgatgtgaagccaatggttggaattataaaaagcatccttgctggttcttcacaggacactggaacccaccctgtcaattcagctagcatgtccacacagtcttgatgatccctctctgtaacaggcagctaacattaagagaagggggaaagagaagaagagagcaatagcttatgggagagctgagatcttacttcgttgacccatatttttcccctgaccaagttacctgtaaactggaatttgcaaggggatgctgtgatgataacccctttctattgctgtaatgttcatataacctgggaaactgagagaaggggatgtgtaaataaaagcttaaacattttagtaatgtgttaaaatgtcactctctcttaccctgtttcccttttttgccagatgatgatttttttatttttattttgtactttactggatgactgtgaagcgatgagtattgggttggggtaggtgtgttgattttgagagtgcatgttaagaactgaaggggaactacttgagatgacttaagaagcatcccatgcaaatatcttgttttgccctaataaaatattcagaaagata

SEQ ID NO: 447761 - DNA, 2319 bp, Homo sapiens
cgagaccggtcctctgcggagagggccccgccctctgtgaaggcccgcccgggaattggcggcggcgctgcagccatttccggtttcggggaggtgggtggggtgcggagcgggacttggagcagccgccgccgctgccaccgcctacagagcctgccttgcgcctggtgctgccaggaagatgcggccggagcccggaggctgctgctgccgccgcacggtgcgggcgaatggctgcgtggcgaacggggaagtacggaacgggtacgtgaggagcagcgctgcagccgcagccgcagccgccgccggccagatccatcatgttacacaaaatggaggactatataaaagaccgtttaatgaagcttttgaagaaacaccaatgctggttgctgtgctcacgtatgtggggtatggcgtactcaccctctttggatatcttcgagatttcttgaggtattggagaattgaaaagtgtcaccatgcaacagaaagagaagaacaaaaggactttgtgtcattgtatcaagattttgaaaacttttatacaaggaatctgtacatgaggataagagacaactggaatcggccaatctgtagtgtgcctggagccagggtggacatcatggagagacagtctcatgattataactggtccttcaagtatacagggaatataataaagggtgttataaacatgggttcctacaactatcttggatttgcacggaatactggatcatgtcaagaagcagccgccaaagtccttgaggagtatggagctggagtgtgcagtactcggcaggaaattggaaacctggacaagcatgaagaactagaggagcttgtagcaaggttcttaggagtagaagctgctatggcgtatggcatgggatttgcaacgaattcaatgaacattcctgctcttgttggcaaaggttgcctgattctgagtgatgaactgaaccatgcatcactggttctgggagccagactgtcaggagcaaccattagaatcttcaaacacaacaatatgcaaagcctagagaagctattgaaagatgccattgtttatggtcagcctcggacacgaaggccctggaagaaaattctcatccttgtggaaggaatatatagcatggagggatctattgttcgtcttcctgaagtgattgccctcaagaagaaatacaaggcatacttgtatctggatgaggctcacagcattggcgccctgggccccacaggccggggtgtggtggagtactttggcctggatcccgaggatgtggatgttatgatgggaacgttcacaaagagttttggtgcttctggaggatatattggaggcaagaaggagctgatagactacctgcgaacacattctcatagtgcagtgtatgccacgtcattgtcacctcctgtagtggagcagatcatcacctccatgaagtgcatcatggggcaggatggcaccagccttggtaaagagtgtgtacaacagttagctgaaaacaccaggtatttcaggagacgcctgaaagagatgggcttcatcatctatggaaatgaagactctccagtagtgcctttgatgctctacatgcctgccaaaattggcgcctttggacgggagatgctgaagcggaacatcggtgtcgttgtggttggatttcctgccaccccaattattgagtccagagccaggttttgcctgtcagcagctcataccaaagaaatacttgatactgctttaaaggagatagatgaagttggggacctattgcagctgaagtattcccgtcatcggttggtacctctactggacaggccctttgacgagacgacgtatgaagaaacagaagactgagcctttttggtgctccctcagaggaactctccctcacccaggacagcctgtggcctttgtgagccagttccaggaaccacacttctgtggccatctcacgtgaaagacattgcctcagctactgaaggtggccacctccactctaaatgacattttgtaaatagtaaaaaactgcttctcaaaaaaaaaaaaaaaaaaaaaaaaaaaaaatttttggggggccctgggccctggaagaaagttttctaaacacaatcgttggggggcgcgggggccccataaagggctcagtggaaccgggtgccatagcgtgtccccgagggaaactccgcgcccacggaccacggcctgggatctcctaccaataaaaacgccgcgcgggcaacgcgcgtgttcggacaaccgaggggtccgaggcacacgggccccaacgggagtcagcagcgata

SEQ ID NO: 447762 - DNA, 1868 bp, Homo sapiens
cgagaccggtcctctgcggagagggccccgccctctgtgaaggcccgcccgggaattggcggcggcgctgcagccatttccggtttcggggaggtgggtggggtgcggagcgggacttggagcagccgccgccgctgccaccgcctacagagcctgccttgcgcctggtgctgccaggaagatgcggccggagcccggaggctgctgctgccgccgcacggtgcgggcgaatggctgcgtggcgaacggggaagtacggaacgggtacgtgaggagcagcgctgcagccgcagccgcagccgccgccggccagatccatcatgttacacaaaatggaggactatataaaagaccgtttaatgaagcttttgaagaaacaccaatgctggttgctgtgctcacgtatgtggggtatggcgtactcaccctctttggatatcttcgagatttcttgaggtattggagaattgaaaagtgtcaccatgcaacagaaagagaagaacaaaaggactttgtgtcattgtatcaagattttgaaaacttttatacaaggaatctgtacatgaggataagagacaactggaatcggccaatctgtagtgtgcctggagccagggtggacatcatggagagacagtctcatgattataactggtccttcaagtatacagggaatataataaagggtgttataaacatgggttcctacaactatcttggatttgcacggaatactggatcatgtcaagaagcagccgccaaagtccttgaggagtatggagctggagtgtgcagtactcggcaggaaattggaaacctggacaagcatgaagaactagaggagcttgtagcaaggttcttaggagtagaagctgctatggcgtatggcatgggatttgcaacgaattcaatgaacattcctgctcttgttggcaaaggttgcctgattctgagtgatgaactgaaccatgcatcactggttctgggagccagactgtcaggagcaaccattagaatcttcaaacacaacaatatgcaaagcctagagaagctattgaaagatgccattgtttatggtcagcctcggacacgaaggccctggaagaaaattctcatccttgtggaaggaatatatagcatggagggatctattgttcgtcttcctgaagtgattgccctcaagaagaaatacaaggcatacttgtatctggatgaggctcacagcattggcgccctgggccccacaggccggggtgtggtggagtactttggcctggatcccgaggatgtggatgttatgatgggaacgttcacaaagagttttggtgcttctggaggatatattggaggcaagaaggagctgatagactacctgcgaacacattctcatagtgcagtgtatgccacgtcattgtcacctcctgtagtggagcagatcatcacctccatgaagtgcatcatggggcaggatggcaccagccttggtaaagagtgtgtacaacagttagctgaaaacaccaggtatttcaggagacgcctgaaagagatgggcttcatcatctatggaaatgaagactctccagtagtgcctttgatgctctacatgcctgccaaaattggcgcctttggacgggagatgctgaagcggaacatcggtgtcgttgtggttggatttcctgccaccccaattattgagtccagagccaggttttgcctgtcagcagctcataccaaagaaatacttgatactgctttaaaggagatagatgaagttggggacctattgcagctgaagtattcccgtcgtctcgtcaaagggcctgtccagtagaggtaccaaccgatgacgggaatacttcagctgcaat

SEQ ID NO: 447763 - DNA, 1060 bp, Homo sapiens
cgagaccggtcctctgcggagagggccccgccctctgtgaaggcccgcccgggaattggcggcggcgctgcagccatttccggtttcggggaggtgggtggggtgcggagcgggacttggagcagccgccgccgctgccaccgcctacagagcctgccttgcgcctggtgctgccaggaagatgcggccggagcccggaggctgctgctgccgccgcacggtgcgggcgaatggctgcgtggcgaacggggaagtacggaacgggtacgtgaggagcagcgctgcagccgcagccgcagccgccgccggccagatccatcatgttacacaaaatggaggactatataaaagaccgtttaatgaagcttttgaagaaacaccaatgctggttgctgtgctcacgtatgtggggtatggcgtactcaccctctttggatatcttcgagatttcttgaggtattggagaattgaaaagtgtcaccatgcaacagaaagagaagaacaaaaggactttgtgtcattgtatcaagattttgaaaacttttatacaaggaatctgtacatgaggataagagacaactggaatcggccaatctgtagtgtgcctggagccagggtggacatcatggagagacagtctcatgattataactggtccttcaagtgagtcttggttgggaaattatttgacaacaattacaaaagggtttcttcatttgagaaaatatgttattataaattgagtattctctcaaaataggagtagcagctgaggatacaatatgattggtttccttacatattcttcaattgttgagcttttttttttttttttttttaaattaatttattttttttttaatggaccattctggggtgtctcccgcaaagggggattgggagggccacataggaccaatagggggggaaaggtcagcagaataaccaggtgaccaaggttctcgtgttttcccaaggcagaggacccgggggcctggacctcccgaggggttggtgccccggggtacctaagatcggggagggggagataactctaaag

SEQ ID NO: 447764 - DNA, 2031 bp, Homo sapiens
ctggaaagaaggagtaggacaaaagaacattttatttctatccatgggccaaagtccactcagaaaaaaagtataaattggatctaggtgattgtttacttgacatgtcaaagagacacacactaaattagcagggagtgttataaaaactttggagtgcaagctcacagctgtcttaataagaagagaaggcttcaatggaaccttttgtggtcctggtgctgtgtctctcttttatgcttctcttttcactctggagacagagctgtaggagaaggaagctccctcctggccccactcctcttcctattattggaaatatgctacagatagatgttaaggacatctgcaaatctttcaccaatttctcaaaagtctatggtcctgtgttcaccgtgtattttggcatgaatcccatagtggtgtttcatggatatgaggcagtgaaggaagccctgattgataatggagaggagttttctggaagaggcaattccccaatatctcaaagaattactaaaggacttggaatcatttccagcaatggaaagagatggaaggagatccggcgtttctccctcacaaccttgcggaattttgggatggggaagaggagcattgaggaccgtgttcaagaggaagctcactgccttgtggaggagttgagaaaaaccaaggcttcaccctgtgatcccactttcatcctgggctgtgctccctgcaatgtgatctgctccgttgttttccagaaacgatttgattataaagatcagaattttctcaccctgatgaaaagattcaatgaaaacttcaggattctgaactccccatggatccaggtctgcaataatttccctctactcattgattgtttcccaggaactcacaacaaagtgcttaaaaatgttgctcttacacgaagttacattagggagaaagtaaaagaacaccaagcatcactggatgttaacaatcctcgggactttatcgattgcttcctgatcaaaatggagcaggaaaaggacaaccaaaagtcagaattcaatattgaaaacttggttggcactgtagctgatctatttgttgctggaacagagacaacaagcaccactctgagatatggactcctgctcctgctgaagcacccagaggtcacagctaaagtccaggaagagattgatcatgtaattggcagacacaggagcccctgcatgcaggataggagccacatgccttacactgatgctgtagtgcacgagatccagagatacagtgaccttgtccccaccggtgtgccccatgcagtgaccactgatactaagttcagaaactacctcatccccaagggcacaaccataatggcattactgacttccgtgctacatgatgacaaagaatttcctaatccaaatatctttgaccctggccactttctagataagaatggcaactttaagaaaagtgactacttcatgcctttctcagcaggaaaacgaatttgtgcaggagaaggacttgcccgcatggagctatttttatttctaaccacaattttacagaactttaacctgaaatctgttgatgatttaaagaacctcaatactactgcagttaccaaagggattgtttctctgccaccctcataccagatctgcttcatccctgtctgaagaatgctagcccatctggctgctgatctgctatcacctgcaactctttttttatcaaggacattcccactattatgtcttctctgacctctcatcaaatcttcccattcactcaatatcccataagcatccaaactccattaaggagagttgttcaggtcactgcacaaatatatctgcaattattcatactctgtaacacttgtattaattgctgcatatgctaatacttttctaatgctgactttttaatatgttatcactgtaaaacacagaaaagtgattaatgaatgataatttagatccatttcttttgtgaatgtgctaaataaaaagtgttattaattgctggttcaagttc

SEQ ID NO: 447765 - DNA, 2070 bp, Homo sapiens
ctggaaagaaggagtaggacaaaagaacattttatttctatccatgggccaaagtccactcagaaaaaaagtataaattggatctaggtgattgtttacttgacatgtcaaagagacacacactaaattagcagggagtgttataaaaactttggagtgcaagctcacagctgtcttaataagaagagaaggcttcaatggaaccttttgtggtcctggtgctgtgtctctcttttatgcttctcttttcactctggagacagagctgtaggagaaggaagctccctcctggccccactcctcttcctattattggaaatatgctacagatagatgttaaggacatctgcaaatctttcaccaatttctcaaaagtctatggtcctgtgttcaccgtgtattttggcatgaatcccatagtggtgtttcatggatatgaggcagtgaaggaagccctgattgataatggagaggagttttctggaagaggcaattccccaatatctcaaagaattactaaaggacttggaatcatttccagcaatggaaagagatggaaggagatccggcgtttctccctcacaaccttgcggaattttgggatggggaagaggagcattgaggaccgtgttcaagaggaagctcactgccttgtggaggagttgagaaaaaccaaggcttcaccctgtgatcccactttcatcctgggctgtgctccctgcaatgtgatctgctccgttgttttccagaaacgatttgattataaagatcagaattttctcaccctgatgaaaagattcaatgaaaacttcaggattctgaactccccatggatccaggtctgcaataatttccctctactcattgattgtttcccaggaactcacaacaaagtgcttaaaaatgttgctcttacacgaagttacattagggagaaagtaaaagaacaccaagcatcactggatgttaacaatcctcgggactttatcgattgcttcctgatcaaaatggagcaggaaaaggacaaccaaaagtcagaattcaatattgaaaacttggttggcactgtagctgatctatttgttgctggaacagagacaacaagcaccactctgagatatggactcctgctcctgctgaagcacccagaggtcacagctaaagtccaggaagagattgatcatgtaattggcagacacaggagcccctgcatgcaggataggagccacatgccttacactgatgctgtagtgcacgagatccagagatacagtgaccttgtccccaccggtgtgccccatgcagtgaccactgatactaagttcagaaactacctcatccccaagagctttgataacaagataatgctggctgcataaaactagggcacaaccataatggcattactgacttccgtgctacatgatgacaaagaatttcctaatccaaatatctttgaccctggccactttctagataagaatggcaactttaagaaaagtgactacttcatgcctttctcagcaggaaaacgaatttgtgcaggagaaggacttgcccgcatggagctatttttatttctaaccacaattttacagaactttaacctgaaatctgttgatgatttaaagaacctcaatactactgcagttaccaaagggattgtttctctgccaccctcataccagatctgcttcatccctgtctgaagaatgctagcccatctggctgctgatctgctatcacctgcaactctttttttatcaaggacattcccactattatgtcttctctgacctctcatcaaatcttcccattcactcaatatcccataagcatccaaactccattaaggagagttgttcaggtcactgcacaaatatatctgcaattattcatactctgtaacacttgtattaattgctgcatatgctaatacttttctaatgctgactttttaatatgttatcactgtaaaacacagaaaagtgattaatgaatgataatttagatccatttcttttgtgaatgtgctaaataaaaagtgttattaattgctggttcaagttc

SEQ ID NO: 447766 - DNA, 742 bp, Homo sapiens
ctggaaagaaggagtaggacaaaagaacattttatttctatccatgggccaaagtccactcagaaaaaaagtataaattggatctaggtgattgtttacttgacatgtcaaagagacacacactaaattagcagggagtgttataaaaactttggagtgcaagctcacagctgtcttaataagaagagaaggcttcaatggaaccttttgtggtcctggtgctgtgtctctcttttatgcttctcttttcactctggagacagagctgtaggagaaggaagctccctcctggccccactcctcttcctattattggaaatatgctacagatagatgttaaggacatctgcaaatctttcaccaatttctcaaaagtctatggtcctgtgttcaccgtgtattttggcatgaatcccatagtggtgtttcatggatatgaggcagtgaaggaagccctgattgataatggagaggagttttctggaagaggcaattccccaatatctcaaagaattactaaaggacttggaatcatttccagcaatggaaagagatggaaggagatccggcgtttctccctcacaaccttgcggaattttgggatggggaagaggagcattgaggaccgtgttcaagaggaagctcactgccttgtggaggagttgagaaaaaccaaggaatgggaacctgttcgctggttttcagaaacgatcgatttttaagaccagaattttttcccctc

SEQ ID NO: 447767 - DNA, 1923 bp, Homo sapiens
ctggaaagaaggagtaggacaaaagaacattttatttctatccatgggccaaagtccactcagaaaaaaagtataaattggatctaggtgattgtttacttgacatgtcaaagagacacacactaaattagcagggagtgttataaaaactttggagtgcaagctcacagctgtcttaataagaagagaaggcttcaatggaaccttttgtggtcctggtgctgtgtctctcttttatgcttctcttttcactctggagacagagctgtaggagaaggaagctccctcctggccccactcctcttcctattattggaaatatgctacagatagatgttaaggacatctgcaaatctttcaccaatttctcaaaagtctatggtcctgtgttcaccgtgtattttggcatgaatcccatagtggtgtttcatggatatgaggcagtgaaggaagccctgattgataatggagaggagttttctggaagaggcaattccccaatatctcaaagaattactaaaggacttggaatcatttccagcaatggaaagagatggaaggagatccggcgtttctccctcacaaccttgcggaattttgggatggggaagaggagcattgaggaccgtgttcaagaggaagctcactgccttgtggaggagttgagaaaaaccaaggcttcaccctgtgatcccactttcatcctgggctgtgctccctgcaatgtgatctgctccgttgttttccagaaacgatttgattataaagatcagaattttctcaccctgatgaaaagattcaatgaaaacttcaggattctgaactccccatggatccaggtctgcaataatttccctctactcattgattgtttcccaggaactcacaacaaagtgcttaaaaatgttgctcttacacgaagttacattagggagaaagtaaaagaacaccaagcatcactggatgttaacaatcctcgggactttatcgattgcttcctgatcaaaatggagcaggaaaaggacaaccaaaagtcagaattcaatattgacaccactctgagatatggactcctgctcctgctgaagcacccagaggtcacagctaaagtccaggaagagattgatcatgtaattggcagacacaggagcccctgcatgcaggataggagccacatgccttacactgatgctgtagtgcacgagatccagagatacagtgaccttgtccccaccggtgtgccccatgcagtgaccactgatactaagttcagaaactacctcatccccaagggcacaaccataatggcattactgacttccgtgctacatgatgacaaagaatttcctaatccaaatatctttgaccctggccactttctagataagaatggcaactttaagaaaagtgactacttcatgcctttctcagcagtaaccacaattttacagaactttaacctgaaatctgttgatgatttaaagaacctcaatactactgcagttaccaaagggattgtttctctgccaccctcataccagatctgcttcatccctgtctgaagaatgctagcccatctggctgctgatctgctatcacctgcaactctttttttatcaaggacattcccactattatgtcttctctgacctctcatcaaatcttcccattcactcaatatcccataagcatccaaactccattaaggagagttgttcaggtcactgcacaaatatatctgcaattattcatactctgtaacacttgtattaattgctgcatatgctaatacttttctaatgctgactttttaatatgttatcactgtaaaacacagaaaagtgattaatgaatgataatttagatccatttcttttgtgaatgtgctaaataaaaagtgttattaattgctggttcaagttc

SEQ ID NO: 447768 - DNA, 1839 bp, Homo sapiens
cccccgggctgcaggattcggcacgagcaccaatgtaagtctgccttatgttcctccagccaattgcaaaggttctcaaaagtctatggtcctgtgttcaccgtgtattttggcatgaatcccatagtggtgtttcatggatatgaggcagtgaaggaagccctgattgataatggagaggagttttctggaagaggcaattccccaatatctcaaagaattactaaaggacttggtaggtgcacatatttctgtgtcagctttggtaactggggtgagggggatggaaaacagagccctaaaaagcttctcagcagagcttagcctatctgcatggctgccgagtgttgcagcactttcttccttggctgtgaattctcccagtttctgccccttttttttattaggaatcatttccagcaatggaaagagatggaaggagatccggcgtttctccctcacaaccttgcggaattttgggatggggaagaggagcattgaggaccgtgttcaagaggaagctcactgccttgtggaggagttgagaaaaaccaaggaaacgatttgattataaagatcagaattttctcaccctgatgaaaagattcaatgaaaacttcaggattctgaactccccatggatccaggtctgcaataatttccctctactcattgattgtttcccaggaactcacaacaaagtgcttaaaaatgttgctcttacacgaagttacattagggagaaagtaaaagaacaccaagcatcactggatgttaacaatcctcgggactttatcgattgcttcctgatcaaaatggagcaggaaaaggacaaccaaaagtcagaattcaatattgaaaacttggttggcactgtagctgatctatttgttgctggaacagagacaacaagcaccactctgagatatggactcctgctcctgctgaagcacccagaggtcacagctaaagtccaggaagagattgatcatgtaattggcagacacaggagcccctgcatgcaggataggagccacatgccttacactgatgctgtagtgcacgagatccagagatacagtgaccttgtccccaccggtgtgccccatgcagtgaccactgatactaagttcagaaactacctcatccccaagggcacaaccataatggcattactgacttccgtgctacatgatgacaaagaatttcctaatccaaatatctttgaccctggccactttctagataagaatggcaactttaagaaaagtgactacttcatgcctttctcagcaggaaaacgaatttgtgcaggagaaggacttgcccgcatggagctatttttatttctaaccacaattttacagaactttaacctgaaatctgttgatgatttaaagaacctcaatactactgcagttaccaaagggattgtttctctgccaccctcataccagatctgcttcatccctgtctgaagaatgctagcccatctggctgctgatctgctatcacctgcaactctttttttatcaaggacattcccactattatgtcttctctgacctctcatcaaatcttcccattcactcaatatcccataagcatccaaactccattaaggagagttgttcaggtcactgcacaaatatatctgcaattattcatactctgtaacacttgtattaattgctgcatatgctaatacttttctaatgctgactttttaatatgttatcactgtaaaacacagaaaagtgattaatgaatgataatttagatccatttcttttgtgaatgtgctaaataaaaagtgttattaattgctggttcaagttc

SEQ ID NO: 447769 - DNA, 2151 bp, Homo sapiens
ctgtatcagaatcctcatgttaagagctttacaagtgaccctgaagtctttagctgggtagtggcctcaaggtggacatgggggattgattaattgctcaagcatcagtttaaattagcagagattccagtttggagcttctacatattacctgtgggactctgagaatgaatctgcaattctctggcctcagtttcttcatttttaaaacaggtcaaatgaatgtgctgaatgtgttgaagtgaggatgaactgtgtgatttgtgtaccaattgcctgggtcattgcgtggcacatcacaggccatctataagtggcagctataacaatcaccatcacatttatgtacaaaattcagaaatatcgaatctatgtgtggcaaatatgaacattaaaaaatacaatgaaaatgtcagtctgaatcatacatagtatttggagcaaatagcgacttattttgctgctatttgcatttcctttcccagttctcaaaagtctatggtcctgtgttcaccgtgtattttggcatgaatcccatagtggtgtttcatggatatgaggcagtgaaggaagccctgattgataatggagaggagttttctggaagaggcaattccccaatatctcaaagaattactaaaggacttggaatcatttccagcaatggaaagagatggaaggagatccggcgtttctccctcacaaccttgcggaattttgggatggggaagaggagcattgaggaccgtgttcaagaggaagctcactgccttgtggaggagttgagaaaaaccaaggcttcaccctgtgatcccactttcatcctgggctgtgctccctgcaatgtgatctgctccgttgttttccagaaacgatttgattataaagatcagaattttctcaccctgatgaaaagattcaatgaaaacttcaggattctgaactccccatggatccaggtctgcaataatttccctctactcattgattgtttcccaggaactcacaacaaagtgcttaaaaatgttgctcttacacgaagttacattagggagaaagtaaaagaacaccaagcatcactggatgttaacaatcctcgggactttatcgattgcttcctgatcaaaatggagcaggaaaaggacaaccaaaagtcagaattcaatattgaaaacttggttggcactgtagctgatctatttgttgctggaacagagacaacaagcaccactctgagatatggactcctgctcctgctgaagcacccagaggtcacagctaaagtccaggaagagattgatcatgtaattggcagacacaggagcccctgcatgcaggataggagccacatgccttacactgatgctgtagtgcacgagatccagagatacagtgaccttgtccccaccggtgtgccccatgcagtgaccactgatactaagttcagaaactacctcatccccaagggcacaaccataatggcattactgacttccgtgctacatgatgacaaagaatttcctaatccaaatatctttgaccctggccactttctagataagaatggcaactttaagaaaagtgactacttcatgcctttctcagcaggaaaacgaatttgtgcaggagaaggacttgcccgcatggagctatttttatttctaaccacaattttacagaactttaacctgaaatctgttgatgatttaaagaacctcaatactactgcagttaccaaagggattgtttctctgccaccctcataccagatctgcttcatccctgtctgaagaatgctagcccatctggctgctgatctgctatcacctgcaactctttttttatcaaggacattcccactattatgtcttctctgacctctcatcaaatcttcccattcactcaatatcccataagcatccaaactccattaaggagagttgttcaggtcactgcacaaatatatctgcaattattcatactctgtaacacttgtattaattgctgcatatgctaatacttttctaatgctgactttttaatatgttatcactgtaaaacacagaaaagtgattaatgaatgataatttagatccatttcttttgtgaatgtgctaaataaaaagtgttattaattgctggttcaagttc

SEQ ID NO: 447770 - DNA, 1785 bp, Homo sapiens
cccccgggctgcaggattcggcacgagcaccaatgtaagtctgccttatgttcctccagccaattgcaaaggttctcaaaagtctatggtcctgtgttcaccgtgtattttggcatgaatcccatagtggtgtttcatggatatgaggcagtgaaggaagccctgattgataatggagaggagttttctggaagaggcaattccccaatatctcaaagaattactaaaggacttggtaggtgcacatatttctgtgtcagctttggtaactggggtgagggggatggaaaacagagccctaaaaagcttctcagcagagcttagcctatctgcatggctgccgagtgttgcagcactttcttccttggctgtgaattctcccagtttctgccccttttttttattaggaatcatttccagcaatggaaagagatggaaggagatccggcgtttctccctcacaaccttgcggaattttgggatggggaagaggagcattgaggaccgtgttcaagaggaagctcactgccttgtggaggagttgagaaaaaccaaggaaacgatttgattataaagatcagaattttctcaccctgatgaaaagattcaatgtactcattgattgtttcccaggaactcacaacaaagtgcttaaaaatgttgctcttacacgaagttacattagggagaaagtaaaagaacaccaagcatcactggatgttaacaatcctcgggactttatcgattgcttcctgatcaaaatggagcaggaaaaggacaaccaaaagtcagaattcaatattgaaaacttggttggcactgtagctgatctatttgttgctggaacagagacaacaagcaccactctgagatatggactcctgctcctgctgaagcacccagaggtcacagctaaagtccaggaagagattgatcatgtaattggcagacacaggagcccctgcatgcaggataggagccacatgccttacactgatgctgtagtgcacgagatccagagatacagtgaccttgtccccaccggtgtgccccatgcagtgaccactgatactaagttcagaaactacctcatccccaagggcacaaccataatggcattactgacttccgtgctacatgatgacaaagaatttcctaatccaaatatctttgaccctggccactttctagataagaatggcaactttaagaaaagtgactacttcatgcctttctcagcaggaaaacgaatttgtgcaggagaaggacttgcccgcatggagctatttttatttctaaccacaattttacagaactttaacctgaaatctgttgatgatttaaagaacctcaatactactgcagttaccaaagggattgtttctctgccaccctcataccagatctgcttcatccctgtctgaagaatgctagcccatctggctgctgatctgctatcacctgcaactctttttttatcaaggacattcccactattatgtcttctctgacctctcatcaaatcttcccattcactcaatatcccataagcatccaaactccattaaggagagttgttcaggtcactgcacaaatatatctgcaattattcatactctgtaacacttgtattaattgctgcatatgctaatacttttctaatgctgactttttaatatgttatcactgtaaaacacagaaaagtgattaatgaatgataatttagatccatttcttttgtgaatgtgctaaataaaaagtgttattaattgctggttcaagttc

SEQ ID NO: 447771 - DNA, 1976 bp, Homo sapiens
ctggaaagaaggagtaggacaaaagaacattttatttctatccatgggccaaagtccactcagaaaaaaagtataaattggatctaggtgattgtttacttgacatgtcaaagagacacacactaaattagcagggagtgttataaaaactttggagtgcaagctcacagctgtcttaataagaagagaaggcttcaatggaaccttttgtggtcctggtgctgtgtctctcttttatgcttctcttttcactctggagacagagctgtaggagaaggaagctccctcctggccccactcctcttcctattattggaaatatgctacagatagatgttaaggacatctgcaaatctttcaccaatttctcaaaagtctatggtcctgtgttcaccgtgtattttggcatgaatcccatagtggtgtttcatggatatgaggcagtgaaggaagccctgattgataatggagaggagttttctggaagaggcaattccccaatatctcaaagaattactaaaggacttggaatcatttccagcaatggaaagagatggaaggagatccggcgtttctccctcacaaccttgcggaattttgggatggggaagaggagcattgaggaccgtgttcaagaggaagctcactgccttgtggaggagttgagaaaaaccaaggcttcaccctgtgatcccactttcatcctgggctgtgctccctgcaatgtgatctgctccgttgttttccagaaacgatttgattataaagatcagaattttctcaccctgatgaaaagattcaatgaaaacttcaggattctgaactccccatggatccaggtctgcaataatttccctctactcattgattgtttcccaggaactcacaacaaagtgcttaaaaatgttgctcttacacgaagttacattagggagaaagtaaaagaacaccaagcatcactggatgttaacaatcctcgggactttatcgattgcttcctgatcaaaatggagcaggaaaaggacaaccaaaagtcagaattcaatattgaaaacttggttggcactgtagctgatctatttgttgctggaacagagacaacaagcaccactctgagatatggactcctgctcctgctgaagcacccagaggtcacagctaaagtccaggaagagattgatcatgtaattggcagacacaggagcccctgcatgcaggataggagccacatgccttacactgatgctgtagtgcacgagatccagagatacagtgaccttgtccccaccggtgtgccccatgcagtgaccactgatactaagttcagaaactacctcatccccaagggcacaaccataatggcattactgacttccgtgctacatgatgacaaagaatttcctaatccaaatatctttgaccctggccactttctagataagaatggcaactttaagaaaagtgactacttcatgcctttctcagcaggaaaacgaatttgtgcaggagaaggacttgcccgcatggagctatttttatttctaaccacaattttacagaactttaacctgaaatctgttgatgatttaaagaacctcaatactactgcagttaccaaagggattgtttctctgccaccctcataccagatctgcttcatccctgtctgaagaatgctagcccatctggctgctgatctgctatcacctgcaactctttttttatcaaggacattcccactattatgtcttctctgacctctcatcaaatcttcccattcactcaatatcccataagcatcccatactctgtaacacttgtattaattgctgcatatgctaatacttttctaatgctgactttttaatatgttatcactgtaaaacacagaaaagtgattaatgaatgataatttagatccatttcttttgtgaatgtgctaaataaaaagtgttattaattgctggttcaagttc

SEQ ID NO: 447772 - DNA, 1987 bp, Homo sapiens
ctggaaagaaggagtaggacaaaagaacattttatttctatccatgggccaaagtccactcagaaaaaaagtataaattggatctaggtgattgtttacttgacatgtcaaagagacacacactaaattagcagggagtgttataaaaactttggagtgcaagctcacagctgtcttaataagaagagaaggcttcaatggaaccttttgtggtcctggtgctgtgtctctcttttatgcttctcttttcactctggagacagagctgtaggagaaggaagctccctcctggccccactcctcttcctattattggaaatatgctacagatagatgttaaggacatctgcaaatctttcaccaatttctcaaaagtctatggtcctgtgttcaccgtgtattttggcatgaatcccatagtggtgtttcatggatatgaggcagtgaaggaagccctgattgataatggagaggagttttctggaagaggcaattccccaatatctcaaagaattactaaaggacttggaatcatttccagcaatggaaagagatggaaggagatccggcgtttctccctcacaaccttgcggaattttgggatggggaagaggagcattgaggaccgtgttcaagaggaagctcactgccttgtggaggagttgagaaaaaccaaggaatgtgatctgctccgttgttttccagaaacgatttgattataaagatcagaattttctcaccctgatgaaaagattcaatgaaaacttcaggattctgaactccccatggatccaggtctgcaataatttccctctactcattgattgtttcccaggaactcacaacaaagtgcttaaaaatgttgctcttacacgaagttacattagggagaaagtaaaagaacaccaagcatcactggatgttaacaatcctcgggactttatcgattgcttcctgatcaaaatggagcaggaaaaggacaaccaaaagtcagaattcaatattgaaaacttggttggcactgtagctgatctatttgttgctggaacagagacaacaagcaccactctgagatatggactcctgctcctgctgaagcacccagaggtcacagctaaagtccaggaagagattgatcatgtaattggcagacacaggagcccctgcatgcaggataggagccacatgccttacactgatgctgtagtgcacgagatccagagatacagtgaccttgtccccaccggtgtgccccatgcagtgaccactgatactaagttcagaaactacctcatccccaagggcacaaccataatggcattactgacttccgtgctacatgatgacaaagaatttcctaatccaaatatctttgaccctggccactttctagataagaatggcaactttaagaaaagtgactacttcatgcctttctcagcaggaaaacgaatttgtgcaggagaaggacttgcccgcatggagctatttttatttctaaccacaattttacagaactttaacctgaaatctgttgatgatttaaagaacctcaatactactgcagttaccaaagggattgtttctctgccaccctcataccagatctgcttcatccctgtctgaagaatgctagcccatctggctgctgatctgctatcacctgcaactctttttttatcaaggacattcccactattatgtcttctctgacctctcatcaaatcttcccattcactcaatatcccataagcatccaaactccattaaggagagttgttcaggtcactgcacaaatatatctgcaattattcatactctgtaacacttgtattaattgctgcatatgctaatacttttctaatgctgactttttaatatgttatcactgtaaaacacagaaaagtgattaatgaatgataatttagatccatttcttttgtgaatgtgctaaataaaaagtgttattaattgctggttcaagttc

SEQ ID NO: 447773 - DNA, 2029 bp, Homo sapiens
ctggaaagaaggagtaggacaaaagaacattttatttctatccatgggccaaagtccactcagaaaaaaagtataaattggatctaggtgattgtttacttgacatgtcaaagagacacacactaaattagcagggagtgttataaaaactttggagtgcaagctcacagctgtcttaataagaagagaaggcttcaatggaaccttttgtggtcctggtgctgtgtctctcttttatgcttctcttttcactctggagacagagctgtaggagaaggaagctccctcctggccccactcctcttcctattattggaaatatgctacagatagatgttaaggacatctgcaaatctttcaccaatcaatgtaagtctgccttatgttcctccagccaattgcaaaggttctcaaaagtctatggtcctgtgttcaccgtgtattttggcatgaatcccatagtggtgtttcatggatatgaggcagtgaaggaagccctgattgataatggagaggagttttctggaagaggcaattccccaatatctcaaagaattactaaaggacttggaatcatttccagcaatggaaagagatggaaggagatccggcgtttctccctcacaaccttgcggaattttgggatggggaagaggagcattgaggaccgtgttcaagaggaagctcactgccttgtggaggagttgagaaaaaccaaggaatgtgatctgctccgttgttttccagaaacgatttgattataaagatcagaattttctcaccctgatgaaaagattcaatgaaaacttcaggattctgaactccccatggatccaggtctgcaataatttccctctactcattgattgtttcccaggaactcacaacaaagtgcttaaaaatgttgctcttacacgaagttacattagggagaaagtaaaagaacaccaagcatcactggatgttaacaatcctcgggactttatcgattgcttcctgatcaaaatggagcaggaaaaggacaaccaaaagtcagaattcaatattgaaaacttggttggcactgtagctgatctatttgttgctggaacagagacaacaagcaccactctgagatatggactcctgctcctgctgaagcacccagaggtcacagctaaagtccaggaagagattgatcatgtaattggcagacacaggagcccctgcatgcaggataggagccacatgccttacactgatgctgtagtgcacgagatccagagatacagtgaccttgtccccaccggtgtgccccatgcagtgaccactgatactaagttcagaaactacctcatccccaagggcacaaccataatggcattactgacttccgtgctacatgatgacaaagaatttcctaatccaaatatctttgaccctggccactttctagataagaatggcaactttaagaaaagtgactacttcatgcctttctcagcaggaaaacgaatttgtgcaggagaaggacttgcccgcatggagctatttttatttctaaccacaattttacagaactttaacctgaaatctgttgatgatttaaagaacctcaatactactgcagttaccaaagggattgtttctctgccaccctcataccagatctgcttcatccctgtctgaagaatgctagcccatctggctgctgatctgctatcacctgcaactctttttttatcaaggacattcccactattatgtcttctctgacctctcatcaaatcttcccattcactcaatatcccataagcatccaaactccattaaggagagttgttcaggtcactgcacaaatatatctgcaattattcatactctgtaacacttgtattaattgctgcatatgctaatacttttctaatgctgactttttaatatgttatcactgtaaaacacagaaaagtgattaatgaatgataatttagatccatttcttttgtgaatgtgctaaataaaaagtgttattaattgctggttcaagttc

SEQ ID NO: 447774 - DNA, 1599 bp, Homo sapiens
ctggaaagaaggagtaggacaaaagaacattttatttctatccatgggccaaagtccactcagaaaaaaagtataaattggatctaggtgattgtttacttgacatgtcaaagagacacacactaaattagcagggagtgttataaaaactttggagtgcaagctcacagctgtcttaataagaagagaaggcttcaatggaaccttttgtggtcctggtgctgtgtctctcttttatgcttctcttttcactctggagacagagctgtaggagaaggaagctccctcctggccccactcctcttcctattattggaaatatgctacagatagatgttaaggacatctgcaaatctttcaccaatttctcaaaagtctatggtcctgtgttcaccgtgtattttggcatgaatcccatagtggtgtttcatggatatgaggcagtgaaggaagccctgattgataatggagaggagttttctggaagaggcaattccccaatatctcaaagaattactaaaggacttggaatcatttccagcaatggaaagagatggaaggagatccggcgtttctccctcacaaccttgcggaattttgggatggggaagaggagcattgaggaccgtgttcaagaggaagctcactgccttgtggaggagttgagaaaaaccaaggcttcaccctgtgatcccactttcatcctgggctgtgctccctgcaatgtgatctgctccgttgttttccagaaacgatttgattataaagatcagaattttctcaccctgatgaaaagattcaatgaaaacttcaggattctgaactccccatggatccaggtctgcaataatttccctctactcattgattgtttcccaggaactcacaacaaagtgcttaaaaatgttgctcttacacgaagttacattagggagaaagtaaaagaacaccaagcatcactggatgttaacaatcctcgggactttatcgattgcttcctgatcaaaatggagcaggaaaaggacaaccaaaagtcagaattcaatattgaaaacttggttggcactgtagctgatctatttgttgctggaacagagacaacaagcaccactctgagatatggactcctgctcctgctgaagcacccagaggtcacagctaaagtccaggaagagattgatcatgtaattggcagacacaggagcccctgcatgcaggataggagccacatgccttacactgatgctgtagtgcacgagatccagagatacagtgaccttgtccccaccggtgtgccccatgcagtgaccactgatactaagttcagaaactacctcatccccaagagctttgataacaagataatgctggctgcataaaactaggtgagaaacgttccctaatgtgggtctgtttttattgctttcccttccttccacttttcttcgtgtgactgcttagttgtatccttgaaatgcctaaaaacctatggctcagtaccagatattatatatgaaaaaaatgcagaatttcagagaacatttatctttttccagaatgtattcattcccctctcataggcaatattgtctgacaaca

SEQ ID NO: 447775 - DNA, 837 bp, Homo sapiens
  misc_feature (807)..(808): n is a, c, g, or t
  misc_feature (810)..(810): n is a, c, g, or t
  misc_feature (835)..(835): n is a, c, g, or t
  misc_feature (837)..(837): n is a, c, g, or t
ctggaaagaaggagtaggacaaaagaacattttatttctatccatgggccaaagtccactcagaaaaaaagtataaattggatctaggtgattgtttacttgacatgtcaaagagacacacactaaattagcagggagtgttataaaaactttggagtgcaagctcacagctgtcttaataagaagagaaggcttcaatggaaccttttgtggtcctggtgctgtgtctctcttttatgcttctcttttcactctggagacagagctgtaggagaaggaagctccctcctggccccactcctcttcctattattggaaatatgctacagatagatgttaaggacatctgcaaatctttcaccaatttctcaaaagtctatggtcctgtgttcaccgtgtattttggcatgaatcccatagtggtgtttcatggatatgaggcagtgaaggaagccctgattgataatggagaggagttttctggaagaggcaattccccaatatctcaaagaattactaaaggacttggaatcatttccagcaatggaaagagatggaaggagatccggcgtttctccctcacaaccttgcggaattttgggatggggaagaggagcattgaggaccgtgttcaagaggaagctcactgccttgtggaggagttgagaaaaaccaaggcttcaccctgtgatcccactttcatcctgggctgtgctccctgcaatgtgatctgctccgttgttttccagaaacgatttgattataaagatcagaattttctcaccctgatgaaaagattcaatgacnnantgattgttccaggaaactcacacanan

SEQ ID NO: 447776 - DNA, 1977 bp, Homo sapiens
ctggaaagaaggagtaggacaaaagaacattttatttctatccatgggccaaagtccactcagaaaaaaagtataaattggatctaggtgattgtttacttgacatgtcaaagagacacacactaaattagcagggagtgttataaaaactttggagtgcaagctcacagctgtcttaataagaagagaaggcttcaatggaaccttttgtggtcctggtgctgtgtctctcttttatgcttctcttttcactctggagacagagctgtaggagaaggaagctccctcctggccccactcctcttcctattattggaaatatgctacagatagatgttaaggacatctgcaaatctttcaccaatttctcaaaagtctatggtcctgtgttcaccgtgtattttggcatgaatcccatagtggtgtttcatggatatgaggcagtgaaggaagccctgattgataatggagaggagttttctggaagaggcaattccccaatatctcaaagaattactaaaggacttggaatcatttccagcaatggaaagagatggaaggagatccggcgtttctccctcacaaccttgcggaattttgggatggggaagaggagcattgaggaccgtgttcaagaggaagctcactgccttgtggaggagttgagaaaaaccaaggcttcaccctgtgatcccactttcatcctgggctgtgctccctgcaatgtgatctgctccgttgttttccagaaacgatttgattataaagatcagaattttctcaccctgatgaaaagattcaatgaaaacttcaggattctgaactccccatggatccaggtctgcaataatttccctctactcattgattgtttcccaggaactcacaacaaagtgcttaaaaatgttgctcttacacgaagttacattagggagaaagtaaaagaacaccaagcatcactggatgttaacaatcctcgggactttatcgattgcttcctgatcaaaatggagcaggaaaaggacaaccaaaagtcagaattcaatattgacaccactctgagatatggactcctgctcctgctgaagcacccagaggtcacagctaaagtccaggaagagattgatcatgtaattggcagacacaggagcccctgcatgcaggataggagccacatgccttacactgatgctgtagtgcacgagatccagagatacagtgaccttgtccccaccggtgtgccccatgcagtgaccactgatactaagttcagaaactacctcatccccaagggcacaaccataatggcattactgacttccgtgctacatgatgacaaagaatttcctaatccaaatatctttgaccctggccactttctagataagaatggcaactttaagaaaagtgactacttcatgcctttctcagcaggaaaacgaatttgtgcaggagaaggacttgcccgcatggagctatttttatttctaaccacaattttacagaactttaacctgaaatctgttgatgatttaaagaacctcaatactactgcagttaccaaagggattgtttctctgccaccctcataccagatctgcttcatccctgtctgaagaatgctagcccatctggctgctgatctgctatcacctgcaactctttttttatcaaggacattcccactattatgtcttctctgacctctcatcaaatcttcccattcactcaatatcccataagcatccaaactccattaaggagagttgttcaggtcactgcacaaatatatctgcaattattcatactctgtaacacttgtattaattgctgcatatgctaatacttttctaatgctgactttttaatatgttatcactgtaaaacacagaaaagtgattaatgaatgataatttagatccatttcttttgtgaatgtgctaaataaaaagtgttattaattgctggttcaagttc

SEQ ID NO: 447777 - DNA, 1974 bp, Homo sapiens
ctggaaagaaggagtaggacaaaagaacattttatttctatccatgggccaaagtccactcagaaaaaaagtataaattggatctaggtgattgtttacttgacatgtcaaagagacacacactaaattagcagggagtgttataaaaactttggagtgcaagctcacagctgtcttaataagaagagaaggcttcaatggaaccttttgtggtcctggtgctgtgtctctcttttatgcttctcttttcactctggagacagagctgtaggagaaggaagctccctcctggccccactcctcttcctattattggaaatatgctacagatagatgttaaggacatctgcaaatctttcaccaatgtgtttcatggatatgaggcagtgaaggaagccctgattgataatggagaggagttttctggaagaggcaattccccaatatctcaaagaattactaaaggacttggaatcatttccagcaatggaaagagatggaaggagatccggcgtttctccctcacaaccttgcggaattttgggatggggaagaggagcattgaggaccgtgttcaagaggaagctcactgccttgtggaggagttgagaaaaaccaaggcttcaccctgtgatcccactttcatcctgggctgtgctccctgcaatgtgatctgctccgttgttttccagaaacgatttgattataaagatcagaattttctcaccctgatgaaaagattcaatgaaaacttcaggattctgaactccccatggatccaggtctgcaataatttccctctactcattgattgtttcccaggaactcacaacaaagtgcttaaaaatgttgctcttacacgaagttacattagggagaaagtaaaagaacaccaagcatcactggatgttaacaatcctcgggactttatcgattgcttcctgatcaaaatggagcaggaaaaggacaaccaaaagtcagaattcaatattgaaaacttggttggcactgtagctgatctatttgttgctggaacagagacaacaagcaccactctgagatatggactcctgctcctgctgaagcacccagaggtcacagctaaagtccaggaagagattgatcatgtaattggcagacacaggagcccctgcatgcaggataggagccacatgccttacactgatgctgtagtgcacgagatccagagatacagtgaccttgtccccaccggtgtgccccatgcagtgaccactgatactaagttcagaaactacctcatccccaagggcacaaccataatggcattactgacttccgtgctacatgatgacaaagaatttcctaatccaaatatctttgaccctggccactttctagataagaatggcaactttaagaaaagtgactacttcatgcctttctcagcaggaaaacgaatttgtgcaggagaaggacttgcccgcatggagctatttttatttctaaccacaattttacagaactttaacctgaaatctgttgatgatttaaagaacctcaatactactgcagttaccaaagggattgtttctctgccaccctcataccagatctgcttcatccctgtctgaagaatgctagcccatctggctgctgatctgctatcacctgcaactctttttttatcaaggacattcccactattatgtcttctctgacctctcatcaaatcttcccattcactcaatatcccataagcatccaaactccattaaggagagttgttcaggtcactgcacaaatatatctgcaattattcatactctgtaacacttgtattaattgctgcatatgctaatacttttctaatgctgactttttaatatgttatcactgtaaaacacagaaaagtgattaatgaatgataatttagatccatttcttttgtgaatgtgctaaataaaaagtgttattaattgctggttcaagttc

SEQ ID NO: 447778 - DNA, 2073 bp, Homo sapiens
ctggaaagaaggagtaggacaaaagaacattttatttctatccatgggccaaagtccactcagaaaaaaagtataaattggatctaggtgattgtttacttgacatgtcaaagagacacacactaaattagcagggagtgttataaaaactttggagtgcaagctcacagctgtcttaataagaagagaaggcttcaatggaaccttttgtggtcctggtgctgtgtctctcttttatgcttctcttttcactctggagacagagctgtaggagaaggaagctccctcctggccccactcctcttcctattattggaaatatgctacagatagatgttaaggacatctgcaaatctttcaccaatcaatgtaagtctgccttatgttcctccagccaattgcaaaggttctcaaaagtctatggtcctgtgttcaccgtgtattttggcatgaatcccatagtggtgtttcatggatatgaggcagtgaaggaagccctgattgataatggagaggagttttctggaagaggcaattccccaatatctcaaagaattactaaaggacttggaatcatttccagcaatggaaagagatggaaggagatccggcgtttctccctcacaaccttgcggaattttgggatggggaagaggagcattgaggaccgtgttcaagaggaagctcactgccttgtggaggagttgagaaaaaccaaggcttcaccctgtgatcccactttcatcctgggctgtgctccctgcaatgtgatctgctccgttgttttccagaaacgatttgattataaagatcagaattttctcaccctgatgaaaagattcaatgaaaacttcaggattctgaactccccatggatccaggtctgcaataatttccctctactcattgattgtttcccaggaactcacaacaaagtgcttaaaaatgttgctcttacacgaagttacattagggagaaagtaaaagaacaccaagcatcactggatgttaacaatcctcgggactttatcgattgcttcctgatcaaaatggagcaggaaaaggacaaccaaaagtcagaattcaatattgaaaacttggttggcactgtagctgatctatttgttgctggaacagagacaacaagcaccactctgagatatggactcctgctcctgctgaagcacccagaggtcacagctaaagtccaggaagagattgatcatgtaattggcagacacaggagcccctgcatgcaggataggagccacatgccttacactgatgctgtagtgcacgagatccagagatacagtgaccttgtccccaccggtgtgccccatgcagtgaccactgatactaagttcagaaactacctcatccccaagggcacaaccataatggcattactgacttccgtgctacatgatgacaaagaatttcctaatccaaatatctttgaccctggccactttctagataagaatggcaactttaagaaaagtgactacttcatgcctttctcagcaggaaaacgaatttgtgcaggagaaggacttgcccgcatggagctatttttatttctaaccacaattttacagaactttaacctgaaatctgttgatgatttaaagaacctcaatactactgcagttaccaaagggattgtttctctgccaccctcataccagatctgcttcatccctgtctgaagaatgctagcccatctggctgctgatctgctatcacctgcaactctttttttatcaaggacattcccactattatgtcttctctgacctctcatcaaatcttcccattcactcaatatcccataagcatccaaactccattaaggagagttgttcaggtcactgcacaaatatatctgcaattattcatactctgtaacacttgtattaattgctgcatatgctaatacttttctaatgctgactttttaatatgttatcactgtaaaacacagaaaagtgattaatgaatgataatttagatccatttcttttgtgaatgtgctaaataaaaagtgttattaattgctggttcaagttc

SEQ ID NO: 447779 - DNA, 1856 bp, Homo sapiens
cccccgggctgcaggattcggcacgagcaccaatgtaagtctgccttatgttcctccagccaattgcaaaggttctcaaaagtctatggtcctgtgttcaccgtgtattttggcatgaatcccatagtggtgtttcatggatatgaggcagtgaaggaagccctgattgataatggagaggagttttctggaagaggcaattccccaatatctcaaagaattactaaaggacttggtaggtgcacatatttctgtgtcagctttggtaactggggtgagggggatggaaaacagagccccactttcttccttggctgtgaattctcccagtttctgccccttttttttattaggaatcatttccagcaatggaaagagatggaaggagatccggcgtttctccctcacaaccttgcggaattttgggatggggaagaggagcattgaggaccgtgttcaagaggaagctcactgccttgtggaggagttgagaaaaaccaaggcttcaccctgtgatcccactttcatcctgggctgtgctccctgcaatgtgatctgctccgttgttttccagaaacgatttgattataaagatcagaattttctcaccctgatgaaaagattcaatgaaaacttcaggattctgaactccccatggatccaggtctgcaataatttccctctactcattgattgtttcccaggaactcacaacaaagtgcttaaaaatgttgctcttacacgaagttacattagggagaaagtaaaagaacaccaagcatcactggatgttaacaatcctcgggactttatcgattgcttcctgatcaaaatggagcaggaaaaggacaaccaaaagtcagaattcaatattgaaaacttggttggcactgtagctgatctatttgttgctggaacagagacaacaagcaccactctgagatatggactcctgctcctgctgaagcacccagaggtcacagctaaagtccaggaagagattgatcatgtaattggcagacacaggagcccctgcatgcaggataggagccacatgccttacactgatgctgtagtgcacgagatccagagatacagtgaccttgtccccaccggtgtgccccatgcagtgaccactgatactaagttcagaaactacctcatccccaagggcacaaccataatggcattactgacttccgtgctacatgatgacaaagaatttcctaatccaaatatctttgaccctggccactttctagataagaatggcaactttaagaaaagtgactacttcatgcctttctcagcaggaaaacgaatttgtgcaggagaaggacttgcccgcatggagctatttttatttctaaccacaattttacagaactttaacctgaaatctgttgatgatttaaagaacctcaatactactgcagttaccaaagggattgtttctctgccaccctcataccagatctgcttcatccctgtctgaagaatgctagcccatctggctgctgatctgctatcacctgcaactctttttttatcaaggacattcccactattatgtcttctctgacctctcatcaaatcttcccattcactcaatatcccataagcatccaaactccattaaggagagttgttcaggtcactgcacaaatatatctgcaattattcatactctgtaacacttgtattaattgctgcatatgctaatacttttctaatgctgactttttaatatgttatcactgtaaaacacagaaaagtgattaatgaatgataatttagatccatttcttttgtgaatgtgctaaataaaaagtgttattaattgctggttcaagttc

SEQ ID NO: 447780 - DNA, 2266 bp, Homo sapiens
ctgtatcagaatcctcatgttaagagctttacaagtgaccctgaagtctttagctgggtagtggcctcaaggtggacatgggggattgattaattgctcaagcatcagtttaaattagcagagattccagtttggagcttctacatattacctgtgggactctgagaatgaatctgcaattctctggcctcagtttcttcatttttaaaacaggtcaaatgaatgtgctgaatgtgttgaagtgaggatgaactgtgtgatttgtgtaccaattgcctgggtcattgcgtggcacatcacaggccatctataagtggcagctataacaatcaccatcacatttatgtacaaaattcagaaatatcgaatctatgtgtggcaaatatgaacattaaaaaatacaatgaaaatgtcagtctgaatcatacatagtatttggagcaaatagcgacttattttgctgctatttgcatttcctttcccaggtgtttcatggatatgaggcagtgaaggaagccctgattgataatggagaggagttttctggaagaggcaattccccaatatctcaaagaattactaaaggacttggtaggtgcacatatttctgtgtcagctttggtaactggggtgagggggatggaaaacagagccctaaaaagcttctcagcagagcttagcctatctgcatggctgccgagtgttgcagcactttcttccttggctgtgaattctcccagtttctgccccttttttttattaggaatcatttccagcaatggaaagagatggaaggagatccggcgtttctccctcacaaccttgcggaattttgggatggggaagaggagcattgaggaccgtgttcaagaggaagctcactgccttgtggaggagttgagaaaaaccaaggcttcaccctgtgatcccactttcatcctgggctgtgctccctgcaatgtgatctgctccgttgttttccagaaacgatttgattataaagatcagaattttctcaccctgatgaaaagattcaatgaaaacttcaggattctgaactccccatggatccaggtctgcaataatttccctctactcattgattgtttcccaggaactcacaacaaagtgcttaaaaatgttgctcttacacgaagttacattagggagaaagtaaaagaacaccaagcatcactggatgttaacaatcctcgggactttatcgattgcttcctgatcaaaatggagcaggaaaaggacaaccaaaagtcagaattcaatattgaaaacttggttggcactgtagctgatctatttgttgctggaacagagacaacaagcaccactctgagatatggactcctgctcctgctgaagcacccagaggtcacagctaaagtccaggaagagattgatcatgtaattggcagacacaggagcccctgcatgcaggataggagccacatgccttacactgatgctgtagtgcacgagatccagagatacagtgaccttgtccccaccggtgtgccccatgcagtgaccactgatactaagttcagaaactacctcatccccaagggcacaaccataatggcattactgacttccgtgctacatgatgacaaagaatttcctaatccaaatatctttgaccctggccactttctagataagaatggcaactttaagaaaagtgactacttcatgcctttctcagcaggaaaacgaatttgtgcaggagaaggacttgcccgcatggagctatttttatttctaaccacaattttacagaactttaacctgaaatctgttgatgatttaaagaacctcaatactactgcagttaccaaagggattgtttctctgccaccctcataccagatctgcttcatccctgtctgaagaatgctagcccatctggctgctgatctgctatcacctgcaactctttttttatcaaggacattcccactattatgtcttctctgacctctcatcaaatcttcccattcactcaatatcccataagcatccaaactccattaaggagagttgttcaggtcactgcacaaatatatctgcaattattcatactctgtaacacttgtattaattgctgcatatgctaatacttttctaatgctgactttttaatatgttatcactgtaaaacacagaaaagtgattaatgaatgataatttagatccatttcttttgtgaatgtgctaaataaaaagtgttattaattgctggttcaagttc

SEQ ID NO: 447781 - DNA, 1714 bp, Homo sapiens
ctggaaagaaggagtaggacaaaagaacattttatttctatccatgggccaaagtccactcagaaaaaaagtataaattggatctaggtgattgtttacttgacatgtcaaagagacacacactaaattagcagggagtgttataaaaactttggagtgcaagctcacagctgtcttaataagaagagaaggcttcaatggaaccttttgtggtcctggtgctgtgtctctcttttatgcttctcttttcactctggagacagagctgtaggagaaggaagctccctcctggccccactcctcttcctattattggaaatatgctacagatagatgttaaggacatctgcaaatctttcaccaataggagcattgaggaccgtgttcaagaggaagctcactgccttgtggaggagttgagaaaaaccaaggaaacgatttgattataaagatcagaattttctcaccctgatgaaaagattcaatgaaaacttcaggattctgaactccccatggatccaggtctgcaataatttccctctactcattgattgtttcccaggaactcacaacaaagtgcttaaaaatgttgctcttacacgaagttacattagggagaaagtaaaagaacaccaagcatcactggatgttaacaatcctcgggactttatcgattgcttcctgatcaaaatggagcaggaaaaggacaaccaaaagtcagaattcaatattgaaaacttggttggcactgtagctgatctatttgttgctggaacagagacaacaagcaccactctgagatatggactcctgctcctgctgaagcacccagaggtcacagctaaagtccaggaagagattgatcatgtaattggcagacacaggagcccctgcatgcaggataggagccacatgccttacactgatgctgtagtgcacgagatccagagatacagtgaccttgtccccaccggtgtgccccatgcagtgaccactgatactaagttcagaaactacctcatccccaagggcacaaccataatggcattactgacttccgtgctacatgatgacaaagaatttcctaatccaaatatctttgaccctggccactttctagataagaatggcaactttaagaaaagtgactacttcatgcctttctcagcaggaaaacgaatttgtgcaggagaaggacttgcccgcatggagctatttttatttctaaccacaattttacagaactttaacctgaaatctgttgatgatttaaagaacctcaatactactgcagttaccaaagggattgtttctctgccaccctcataccagatctgcttcatccctgtctgaagaatgctagcccatctggctgctgatctgctatcacctgcaactctttttttatcaaggacattcccactattatgtcttctctgacctctcatcaaatcttcccattcactcaatatcccataagcatccaaactccattaaggagagttgttcaggtcactgcacaaatatatctgcaattattcatactctgtaacacttgtattaattgctgcatatgctaatacttttctaatgctgactttttaatatgttatcactgtaaaacacagaaaagtgattaatgaatgataatttagatccatttcttttgtgaatgtgctaaataaaaagtgttattaattgctggttcaagttc

SEQ ID NO: 447782 - DNA, 1957 bp, Homo sapiens
ggtctggcgggagcgcgggggtttttctgctgccgcttcctttctgcccttttaatttccccgaaatcagactgctgccttggaccgggacagctcgcggcccccgagagctctagccgtcgaggagctgcctggggacgtttgccctggggccccagcctggcccgggtcaccctggcatgaggagatgggcctgttgctcctggtcccgttgctcctgctgcccggctcctacggactgcccttctacaacggcttctactactccaacagcgccaacgaccagaacctaggcaacggtcatggcaaagacctccttaatggagtgaagctggtggtggagacacccgaggagaccctgttcacctaccaaggggccagtgtgatcctgccctgccgctaccgctacgagccggccctggtctccccgcggcgtgtgcgtgtcaaatggtggaagctgtcggagaacggggccccagagaaggacgtgctggtggccatcgggctgaggcaccgctcctttggggactaccaaggccgcgtgcacctgcggcaggacaaagagcatgacgtctcgctggagatccaggatctgcggctggaggactatgggcgttaccgctgtgaggtcattgacgggctggaggatgaaagcggtctggtggagctggagctgcggggtgtggtctttccttaccagtcccccaacgggcgctaccagttcaacttccacgagggccagcaggtctgtgcagagcaggctgcggtggtggcctcctttgagcagctcttccgggcctgggaggagggcctggactggtgcaacgcgggctggctgcaggatgccacggtgcagtaccccatcatgttgccccggcagccctgcggtggcccgggcctggcacctggcgtgcgaagctacggcccccgccaccgccgcctgcaccgctatgatgtattctgcttcgctactgccctcaaggggcgggtgtactacctggagcaccctgagaagctgacgctgacagaggcaagggaggcctgccaggaagatgatgccacgatcgccaaggtgggacagctctttgccgcctggaagttccatggcctggaccgctgcgacgctggctggctggcagatggtagcgtccgctaccctgtggttcacccgcatcctaactgtgggcccccagagcctggggtccgaagctttggcttccccgacccgcagagccgcttgtacggtgtttactgctaccgccagcactaggacctggggccctcccctgccgcattccctcactggctgtgtatttattgagtggttcgttttcccttgtgggttggagccattttaactgtttttatacttctcaatttaaattttctttaaacatttttttactattttttgtaaagcaaacagaacccaatgcctccctttgctcctggatgccccactccaggaatcatgcttgctcccctgggccatttgcggttttgtgggcttctggagggttccccgccatccaggctggtctccctcccttaaggaggttggtgcccagagtgggcggtggcctgtctagaatgccgccgggagtccgggcatggtgggcacagttctccctgcccctcagcctgggggaagaagagggcctcgggggcctccggagctgggctttgggcctctcctgcccacctctacttctctgtgaagccgctgaccccagtctgcccactgaggggctagggctggaagccagttctaggcttccaggcgaaagctgagggaaggaagaaactcccctccccgttccccttcccctctcggttccaaagaatctgttttgttgtcatttgtttctcctgtttccctgtgtggggaggggccctcaggtgtgtgtactttggacaataaatggtgctatgactgccttccgccaaaaaaaaaaat

SEQ ID NO: 447783 - DNA, 1929 bp, Homo sapiens
ggtctggcgggagcgcgggggtttttctgctgccgcttcctttctgcccttttaatttccccgaaatcagactgctgccttggaccgggacagctcgcggcccccgagagctctagccgtcgaggagctgcctggggacgtttgccctggggccccagcctggcccgggtcaccctggcatgaggagatgggcctgttgctcctggtcccgttgctcctgctgcccggctcctacggactgcccttctacaacggcttctactactccaacagcgccaacgaccagaacctaggcaacggtcatggcaaagacctccttaatggagtgaagctggtggtggagacacccgaggagaccctgttcacctaccaaggggccagtgtgatcctgccctgccgctaccgctacgagccggccctggtctccccgcggcgtgtgcgtgtcaaatggtggaagctgtcggagaacggggccccagagaaggacgtgctggtggccatcgggctgaggcaccgctcctttggggactaccaaggccgcgtgcacctgcggcaggacaaagagcatgacgtctcgctggagatccaggatctgcggctggaggactatgggcgttaccgctgtgaggtcattgacgggctggaggatgaaagcggtctggtggagctggagctgcggggtgtggtctttccttaccagtcccccaacgggcgctaccagttcaacttccacgagggccagcaggtctgtgcagagcaggctgcggtggtggcctcctttgagcagctcttccgggcctgggaggagggcctggactggtgcaacgcgggctggctgcaggatgccacggtgcagtaccccatcatgttgccccggcagccctgcggtggcccgggcctggcacctggcgtgcgaagctacggcccccgccaccgccgcctgcaccgctatgatgtattctgcttcgctactgccctcaaggggcgggtgtactacctggagcaccctgagaagctgacgctgacagaggcaagggaggcctgccaggaagatgatgccacgatcgccaaggtgggacagctctttgccgcctggaagttccatggcctggaccgctgcgacgctggctggctggcagatggtagcgtccgctaccctgtggttcacccgcatcctaactgtgggcccccagagcctggggtccgaagctttggcttccccgacccgcagagccgcttgtacggtgtttactgctaccgccagcactaggacctggggccctcccctgccgcattccctcactggctgtgtatttattgagtggttcgttttcccttgtgggttggagccattttaactgtttttatacttctcaatttaaattttctttaaacatttttttactattttttgtaaagcaaacagaacccaatgcctccctttgctcctggatgccccactccaggaatcatgcttgctcccctgggccatttgcggttttgtgggcttctggagggttccccgccatccaggctggtctccctcccttaaggaggttggtgcccagagtgggcggtggcctgtctagaatgccgccgggagtccgggcatggtgggcacagttctccctgcccctcagcctgggggaagaagagggcctcgggggcctccggagctgggctttgggcctctcctgcccacctctacttctctgtgaagccgctgactggaagccagttctaggcttccaggcgaaagctgagggaaggaagaaactcccctccccgttccccttcccctctcggttccaaagaatctgttttgttgtcatttgtttctcctgtttccctgtgtggggaggggccctcaggtgtgtgtactttggacaataaatggtgctatgactgccttccgccaaaaaaaaaaat

SEQ ID NO: 447784 - DNA, 2096 bp, Homo sapiens
ggtctggcgggagcgcgggggtttttctgctgccgcttcctttctgcccttttaatttccccgaaatcagactgctgccttggaccgggacagctcgcggcccccgagagctctagccgtcgaggagctgcctggggacgatgaggaaatggaggcacagagaggtgaacttgcccgaagtcactcagcaggatgcagtgtgtccagctccaataccgagcccaggtctgagtgcccagacaggactccagaagatttggggaactatccactgccaagtttgccctggggccccagcctggcccgggtcaccctggcatgaggagatgggcctgttgctcctggtcccgttgctcctgctgcccggctcctacggactgcccttctacaacggcttctactactccaacagcgccaacgaccagaacctaggcaacggtcatggcaaagacctccttaatggagtgaagctggtggtggagacacccgaggagaccctgttcacctaccaaggggccagtgtgatcctgccctgccgctaccgctacgagccggccctggtctccccgcggcgtgtgcgtgtcaaatggtggaagctgtcggagaacggggccccagagaaggacgtgctggtggccatcgggctgaggcaccgctcctttggggactaccaaggccgcgtgcacctgcggcaggacaaagagcatgacgtctcgctggagatccaggatctgcggctggaggactatgggcgttaccgctgtgaggtcattgacgggctggaggatgaaagcggtctggtggagctggagctgcggggtgtggtctttccttaccagtcccccaacgggcgctaccagttcaacttccacgagggccagcaggtctgtgcagagcaggctgcggtggtggcctcctttgagcagctcttccgggcctgggaggagggcctggactggtgcaacgcgggctggctgcaggatgccacggtgcagtaccccatcatgttgccccggcagccctgcggtggcccgggcctggcacctggcgtgcgaagctacggcccccgccaccgccgcctgcaccgctatgatgtattctgcttcgctactgccctcaaggggcgggtgtactacctggagcaccctgagaagctgacgctgacagaggcaagggaggcctgccaggaagatgatgccacgatcgccaaggtgggacagctctttgccgcctggaagttccatggcctggaccgctgcgacgctggctggctggcagatggtagcgtccgctaccctgtggttcacccgcatcctaactgtgggcccccagagcctggggtccgaagctttggcttccccgacccgcagagccgcttgtacggtgtttactgctaccgccagcactaggacctggggccctcccctgccgcattccctcactggctgtgtatttattgagtggttcgttttcccttgtgggttggagccattttaactgtttttatacttctcaatttaaattttctttaaacatttttttactattttttgtaaagcaaacagaacccaatgcctccctttgctcctggatgccccactccaggaatcatgcttgctcccctgggccatttgcggttttgtgggcttctggagggttccccgccatccaggctggtctccctcccttaaggaggttggtgcccagagtgggcggtggcctgtctagaatgccgccgggagtccgggcatggtgggcacagttctccctgcccctcagcctgggggaagaagagggcctcgggggcctccggagctgggctttgggcctctcctgcccacctctacttctctgtgaagccgctgaccccagtctgcccactgaggggctagggctggaagccagttctaggcttccaggcgaaagctgagggaaggaagaaactcccctccccgttccccttcccctctcggttccaaagaatctgttttgttgtcatttgtttctcctgtttccctgtgtggggaggggccctcaggtgtgtgtactttggacaataaatggtgctatgactgccttccgccaaaaaaaaaaat

SEQ ID NO: 447785 - DNA, 1845 bp, Homo sapiens
  misc_feature (30)..(30): n is a, c, g, or t
  misc_feature (44)..(44): n is a, c, g, or t
tgggggaccgttattgccccctgggggccncccaggaaccatgngacccccggagtttcatcctggcatgaggagatgggcctgttgctcctggtcccgttgctcctgctgcccggctcctacggactgcccttctacaacggcttctactactccaacagcgccaacgaccagaacctaggcaacggtcatggcaaagacctccttaatggagtgaagctggtggtggagacacccgaggagaccctgttcacctaccaaggggccagtgtgatcctgccctgccgctaccgctacgagccggccctggtctccccgcggcgtgtgcgtgtcaaatggtggaagctgtcggagaacggggccccagagaaggacgtgctggtggccatcgggctgaggcaccgctcctttggggactaccaaggccgcgtgcacctgcggcaggacaaagagcatgacgtctcgctggagatccaggatctgcggctggaggactatgggcgttaccgctgtgaggtcattgacgggctggaggatgaaagcggtctggtggagctggagctgcggggtgtggtctttccttaccagtcccccaacgggcgctaccagttcaacttccacgagggccagcaggtctgtgcagagcaggctgcggtggtggcctcctttgagcagctcttccgggcctgggaggagggcctggactggtgcaacgcgggctggctgcaggatgccacggtgcagtaccccatcatgttgccccggcagccctgcggtggcccgggcctggcacctggcgtgcgaagctacggcccccgccaccgccgcctgcaccgctatgatgtattctgcttcgctactgccctcaaggggcgggtgtactacctggagcaccctgagaagctgacgctgacagaggcaagggaggcctgccaggaagatgatgccacgatcgccaaggtgggacagctctttgccgcctggaagttccatggcctggaccgctgcgacgctggctggctggcagatggtagcgtccgctaccctgtggttcacccgcatcctaactgtgggcccccagagcctggggtccgaagctttggcttccccgacccgcagagccgcttgtacggtgtttactgctaccgccagcactaggacctggggccctcccctgccgcattccctcactggctgtgtatttattgagtggttcgttttcccttgtgggttggagccattttaactgtttttatacttctcaatttaaattttctttaaacatttttttactattttttgtaaagcaaacagaacccaatgcctccctttgctcctggatgccccactccaggaatcatgcttgctcccctgggccatttgcggttttgtgggcttctggagggttccccgccatccaggctggtctccctcccttaaggaggttggtgcccagagtgggcggtggcctgtctagaatgccgccgggagtccgggcatggtgggcacagttctccctgcccctcagcctgggggaagaagagggcctcgggggcctccggagctgggctttgggcctctcctgcccacctctacttctctgtgaagccgctgaccccagtctgcccactgaggggctagggctggaagccagttctaggcttccaggcgaaagctgagggaaggaagaaactcccctccccgttccccttcccctctcggttccaaagaatctgttttgttgtcatttgtttctcctgtttccctgtgtggggaggggccctcaggtgtgtgtactttggacaataaatggtgctatgactgccttccgccaaaaaaaaaaat

SEQ ID NO: 447786 - DNA, 1689 bp, Homo sapiens
aaccgcctgccccagacctccctgcccttgagcctcctttatggaaggcccttccccaaccctctccccacggcctctagggcctctccttctcctgaaaatcatctgccacacgtggaaagttccttgcattttcctaggaaatttccacattcataataacgtagacgatcgggtcccagctaacgagtggggagctgggagtcaaacctggcccctagagcccaaagcccgggcctgtctggagaagatggcacagcctcactgggggtctggcgacagccttgcggattaggttggggacattgttggggacattaatggactaattaattaccttaactcatggatgttttctgagtactgctgtgaaccagctgagtcccaggagagaggcggcaacggacaggaggtgtggtctttccttaccagtcccccaacgggcgctaccagttcaacttccacgagggccagcaggtctgtgcagagcaggctgcggtggtggcctcctttgagcagctcttccgggcctgggaggagggcctggactggtgcaacgcgggctggctgcaggatgccacggtgcagtaccccatcatgttgccccggcagccctgcggtggcccgggcctggcacctggcgtgcgaagctacggcccccgccaccgccgcctgcaccgctatgatgtattctgcttcgctactgccctcaaggggcgggtgtactacctggagcaccctgagaagctgacgctgacagaggcaagggaggcctgccaggaagatgatgccacgatcgccaaggtgggacagctctttgccgcctggaagttccatggcctggaccgctgcgacgctggctggctggcagatggtagcgtccgctaccctgtggttcacccgcatcctaactgtgggcccccagagcctggggtccgaagctttggcttccccgacccgcagagccgcttgtacggtgtttactgctaccgccagcactaggacctggggccctcccctgccgcattccctcactggctgtgtatttattgagtggttcgttttcccttgtgggttggagccattttaactgtttttatacttctcaatttaaattttctttaaacatttttttactattttttgtaaagcaaacagaacccaatgcctccctttgctcctggatgccccactccaggaatcatgcttgctcccctgggccatttgcggttttgtgggcttctggagggttccccgccatccaggctggtctccctcccttaaggaggttggtgcccagagtgggcggtggcctgtctagaatgccgccgggagtccgggcatggtgggcacagttctccctgcccctcagcctgggggaagaagagggcctcgggggcctccggagctgggctttgggcctctcctgcccacctctacttctctgtgaagccgctgaccccagtctgcccactgaggggctagggctggaagccagttctaggcttccaggcgaaagctgagggaaggaagaaactcccctccccgttccccttcccctctcggttccaaagaatctgttttgttgtcatttgtttctcctgtttccctgtgtggggaggggccctcaggtgtgtgtactttggacaataaatggtgctatgactgccttccgccaaaaaaaaaaat

SEQ ID NO: 447787 - DNA, 797 bp, Homo sapiens
ggtctggcgggagcgcgggggtttttctgctgccgcttcctttctgcccttttaatttccccgaaatcagactgctgccttggaccgggacagctcgcggcccccgagagctctagccgtcgaggagctgcctggggacgtttgccctggggccccagcctggcccgggtcaccctggcatgaggagatgggcctgttgctcctggtcccgttgctcctgctgcccggctcctacggactgcccttctacaacggcttctactactccaacagcgccaacgaccagaacctaggcaacggtcatggcaaagacctccttaatggagtgaagctggtggtggagacacccgaggagaccctgttcacctaccaaggggccagtgtgatcctgccctgccgctaccgctacgagccggccctggtctccccgcggcgtgtgcgtgtcaaatggtggaagctgtcggagaacggggccccagagaaggacgtgctggtgggcctcgggggcctccggagctgggctttgggcctctcctgcccacctctacttctctgtgaagccgctgaccccagtctgcccactgaggggctagggctggaagccagttctaggcttccaggcgaaagctgagggaaggaagaaactcccctccccgttccccttcccctctcggttccaaagaatctgttttgttgtcatttgtttctcctgtttccctgtgtggggaggggccctcaggtgtgtgtactttggacaataaatggtgctatgactgccttccgccaaaaaaaaaaat

SEQ ID NO: 447788 - DNA, 387 bp, Homo sapiens
gggtcccagctaacgagtggggagctgggagtcaaacctggcccctagagcccaaagcccgggcctgtctggagaagatggcacagcctcactgggggtctggcgacagccttgcggattaggttggggacattgttggggacattaatggactaattaattaccttaactcatggatgttttctgagtactgctgtgaaccagctgagtcccaggagagaggcggcaacggacaggaggtcagaggtttgctgagtttttctgagggatggtgtatgtgtgtgtgttgcaggcagcacatgtcccagtgaaggtgggaggagagcggggtgtccagccagctgggcccctggccaccccctaagctcctctttccttcccctgcag

SEQ ID NO: 447789 - DNA, 1868 bp, Homo sapiens
ggtctggcgggagcgcgggggtttttctgctgccgcttcctttctgcccttttaatttccccgaaatcagactgctgccttggaccgggacagctcgcggcccccgagagctctagccgtcgaggagctgcctggggacgtttgccctggggccccagcctggcccgggtcaccctggcatgaggagatgggcctgttgctcctggtcccgttgctcctgctgcccggctcctacggactgcccttctacaacggcttctactactccaacagcgccaacgaccagaacctaggcaacggtcatggcaaagacctccttaatggagtgaagctggtggtggagacacccgaggagaccctgttcacctaccaaggggccagtgtgatcctgccctgccgctaccgctacgagccggccctggtctccccgcggcgtgtgcgtgtcaaatggtggaagctgtcggagaacggggccccagagaaggacgtgctggtggccatcgggctgaggcaccgctcctttggggactaccaaggccgcgtgcacctgcggcaggacaaagagcatgacgtctcgctggagatccaggatctgcggctggaggactatgggcgttaccgctgtgaggtcattgacgggctggaggatgaaagcggtctggtggagctggagctgcggggtgtggtctttccttaccagtcccccaacgggcgctaccagttcaacttccacgagggccagcaggtctgtgcagagcaggctgcggtggtggcctcctttgagcagctcttccgggcctgggaggagggcctggactggtgcaacgcgggctggctgcaggatgccacggtgcagtaccccatcatgttgccccggcagccctgcggtggcccgggcctggcacctggcgtgcgaagctacggcccccgccaccgccgcctgcaccgctatgatgtattctgcttcgctactgccctcaaggggcgggtgtactacctggagcaccctgagaagctgacgctgacagaggcaagggaggcctgccaggaagatgatgccacgatcgccaaggtgggacagctctttgccgcctggaagttccatggcctggaccgctgcgacgctggctggctggcagatggtagcgtccgctaccctgtggttcacccgcatcctaactgtgggcccccagagcctggggtccgaagctttggcttccccgacccgcagagccgcttgtacggtgtttactgctaccgccagcactaggacctggggccctcccctgccgcattccctcactggctgtgtatttattgagtggttcgttttcccttgtgggttggagccattttaactgtttttatacttctcaatttaaattttctttaaacatttttttactattttttgtgggcttctggagggttccccgccatccaggctggtctccctcccttaaggaggttggtgcccagagtgggcggtggcctgtctagaatgccgccgggagtccgggcatggtgggcacagttctccctgcccctcagcctgggggaagaagagggcctcgggggcctccggagctgggctttgggcctctcctgcccacctctacttctctgtgaagccgctgaccccagtctgcccactgaggggctagggctggaagccagttctaggcttccaggcgaaagctgagggaaggaagaaactcccctccccgttccccttcccctctcggttccaaagaatctgttttgttgtcatttgtttctcctgtttccctgtgtggggaggggccctcaggtgtgtgtactttggacaataaatggtgctatgactgccttccgccaaaaaaaaaaat

SEQ ID NO: 447790 - DNA, 1992 bp, Homo sapiens
ggtctggcgggagcgcgggggtttttctgctgccgcttcctttctgcccttttaatttccccgaaatcagactgctgccttggaccgggacagctcgcggcccccgagagctctagccgtcgaggagctgcctggggacgtttgccctggggccccagcctggcccgggtcaccctggcatgaggagatgggcctgttgctcctggtcccgttgctcctgctgcccggctcctacggactgcccttctacaacggcttctactactccaacagcgccaacgaccagaacctaggcaacggtcatggcaaagacctccttaatggagtgaagctggtggtggagacacccgaggagaccctgttcacctaccaaggggccagtgtgatcctgccctgccgctaccgctacgagccggccctggtctccccgcggcgtgtgcgtgtcaaatggtggaagctgtcggagaacggggccccagagaaggacgtgctggtggccatcgggctgaggcaccgctcctttggggactaccaaggccgcgtgcacctgcggcaggacaaagagcatgacgtctcgctggagatccaggatctgcggctggaggactatgggcgttaccgctgtgaggtcattgacgggctggaggatgaaagcggtctggtggagctggagctgcgggctgagtcccaggagagaggcggcaacggacaggaggtgtggtctttccttaccagtcccccaacgggcgctaccagttcaacttccacgagggccagcaggtctgtgcagagcaggctgcggtggtggcctcctttgagcagctcttccgggcctgggaggagggcctggactggtgcaacgcgggctggctgcaggatgccacggtgcagtaccccatcatgttgccccggcagccctgcggtggcccgggcctggcacctggcgtgcgaagctacggcccccgccaccgccgcctgcaccgctatgatgtattctgcttcgctactgccctcaaggggcgggtgtactacctggagcaccctgagaagctgacgctgacagaggcaagggaggcctgccaggaagatgatgccacgatcgccaaggtgggacagctctttgccgcctggaagttccatggcctggaccgctgcgacgctggctggctggcagatggtagcgtccgctaccctgtggttcacccgcatcctaactgtgggcccccagagcctggggtccgaagctttggcttccccgacccgcagagccgcttgtacggtgtttactgctaccgccagcactaggacctggggccctcccctgccgcattccctcactggctgtgtatttattgagtggttcgttttcccttgtgggttggagccattttaactgtttttatacttctcaatttaaattttctttaaacatttttttactattttttgtaaagcaaacagaacccaatgcctccctttgctcctggatgccccactccaggaatcatgcttgctcccctgggccatttgcggttttgtgggcttctggagggttccccgccatccaggctggtctccctcccttaaggaggttggtgcccagagtgggcggtggcctgtctagaatgccgccgggagtccgggcatggtgggcacagttctccctgcccctcagcctgggggaagaagagggcctcgggggcctccggagctgggctttgggcctctcctgcccacctctacttctctgtgaagccgctgaccccagtctgcccactgaggggctagggctggaagccagttctaggcttccaggcgaaagctgagggaaggaagaaactcccctccccgttccccttcccctctcggttccaaagaatctgttttgttgtcatttgtttctcctgtttccctgtgtggggaggggccctcaggtgtgtgtactttggacaataaatggtgctatgactgccttccgccaaaaaaaaaaat

SEQ ID NO: 447791 - DNA, 1843 bp, Homo sapiens
tgttgagagcacgcagtaaatggcagtttgccctggggccccagcctggcccgggtcaccctggcatgaggagatgggcctgttgctcctggtcccgttgctcctgctgcccggctcctacggactgcccttctacaacggcttctactactccaacagcgccaacgaccagaacctaggcaacggtcatggcaaagacctccttaatggagtgaagctggtggtggagacacccgaggagaccctgttcacctaccaaggggccagtgtgatcctgccctgccgctaccgctacgagccggccctggtctccccgcggcgtgtgcgtgtcaaatggtggaagctgtcggagaacggggccccagagaaggacgtgctggtggccatcgggctgaggcaccgctcctttggggactaccaaggccgcgtgcacctgcggcaggacaaagagcatgacgtctcgctggagatccaggatctgcggctggaggactatgggcgttaccgctgtgaggtcattgacgggctggaggatgaaagcggtctggtggagctggagctgcggggtgtggtctttccttaccagtcccccaacgggcgctaccagttcaacttccacgagggccagcaggtctgtgcagagcaggctgcggtggtggcctcctttgagcagctcttccgggcctgggaggagggcctggactggtgcaacgcgggctggctgcaggatgccacggtgcagtaccccatcatgttgccccggcagccctgcggtggcccgggcctggcacctggcgtgcgaagctacggcccccgccaccgccgcctgcaccgctatgatgtattctgcttcgctactgccctcaaggggcgggtgtactacctggagcaccctgagaagctgacgctgacagaggcaagggaggcctgccaggaagatgatgccacgatcgccaaggtgggacagctctttgccgcctggaagttccatggcctggaccgctgcgacgctggctggctggcagatggtagcgtccgctaccctgtggttcacccgcatcctaactgtgggcccccagagcctggggtccgaagctttggcttccccgacccgcagagccgcttgtacggtgtttactgctaccgccagcactaggacctggggccctcccctgccgcattccctcactggctgtgtatttattgagtggttcgttttcccttgtgggttggagccattttaactgtttttatacttctcaatttaaattttctttaaacatttttttactattttttgtaaagcaaacagaacccaatgcctccctttgctcctggatgccccactccaggaatcatgcttgctcccctgggccatttgcggttttgtgggcttctggagggttccccgccatccaggctggtctccctcccttaaggaggttggtgcccagagtgggcggtggcctgtctagaatgccgccgggagtccgggcatggtgggcacagttctccctgcccctcagcctgggggaagaagagggcctcgggggcctccggagctgggctttgggcctctcctgcccacctctacttctctgtgaagccgctgaccccagtctgcccactgaggggctagggctggaagccagttctaggcttccaggcgaaagctgagggaaggaagaaactcccctccccgttccccttcccctctcggttccaaagaatctgttttgttgtcatttgtttctcctgtttccctgtgtggggaggggccctcaggtgtgtgtactttggacaataaatggtgctatgactgccttccgccaaaaaaaaaaat

SEQ ID NO: 447792 - DNA, 904 bp, Homo sapiens
agaaaagtccagaaaccagcacactgttctttccatttgtagttgaaatcagtattcatttggcatggctgagcctccacaggaatgcgttgtggcatctcttccatagttgagtgaagaagaaaaggcaagggaagaaagcatacccaccagtaattaattttgtagaatttagtacacctctttaggtttaaaattccaggagaagggttctcatctaggacaccagggatgtacagaaaggcaccgttctttatcagctgcctaagcagtgtcatccccaggctcatggagtggggttgtagagggagaacaggccagaaggcatcttgcacggtggggtctccaaaggtgtccctaatccacagctggggagctaggacccacaggggctcccaagtcaagattctgagccagttgttatgagatgactcctaggtgttagaattgccttagtgcttccaggtgattgtcatttccagccaggcagagaaacactatcctaaatgaaagcccagtgagttttcaggatcagctatcaggtaaaaggcactgagctgtagacagaagattctgctacttagtaactgtgagaccttgggccagtcctctgccctctctgtgcctgtttctttgtctataaaacagggataatggtgccccatgaggtgtagggagaatcaaattccataatctaggggctcaatcaagttctgtaaatgtgaaataccatggcagcatccagtgcagtgctcgcacagagtcaagtactggtcagccagcattgaagccttgcattgtttagtctgggagatgggctggagcaagcagtaactgcctttctctctggccttgatggggtcgaggctattagtagtgccaaggagatgaagtctttatatct

SEQ ID NO: 447793 - DNA, 2562 bp, Homo sapiens
  misc_feature (1453)..(1453): n is a, c, g, or t
ccaggcgagaggcacctgcgggatgcctgtggggtagctggttcattctgccatggctgcaaactgggactggcagacaattcggggaagggaggagcatgctgaccgcctttgatgttggagccagggtctctgagaaactgcattctctctgctttgctcttcgatctttttttggaaattttaaaatatttattggaacagaaatagaaacataagctccaaagaaacaacatgacaaactttataagtaaatgtaattttcccctaattaatatatttactttgtgtttgtggtttacaaaatgatggctctttcccttctatccctttgtacctatgtgtatctggcaggaaagttcttagctctggctatgggcacacagaagcttcctatacatgattatgttcaaatgttgatttactttccccagaataaattggggaactggcactgtctggattggtgactgtctggatgatctccctgtccctgggcccctgtgtgcacccttgctgttaaatttgcaagagccgggctttggggcgccggcccctcagggtctcagaagctgtccctcttgagcagatggcagtccctgtggggttgtcgggtctcccattctctgtccagtcatggtctgcatcatctccagtgtccagcctggagtcagggttgggcagccgatggtcctgatgggagggtcccctgagcctcctttcagatggcatttagacgtagcttccgcagctgtcaatggctcgctgcccacggtggcatgtggggaagtttttaccttcccccgggacagctgctttgcgagctctgggctgagaaaggcatttgcccccttctttgtcttttgaaaccagcccttccctcttttttgcatccagctctgagactggatgcaattccgtacccatccgccttctccttaacgctcgctttcctttctttattagaaacaatccactttcccttcacctctccctctcgagcaggatgtgctcctggtctctgtctattgtccagccgtcagaacagccgacagcctgtcttcccactcagagagaagccagctgtcttcaccatcacctgcctgccccgcccttagctaagaggctctgcctggggtgcactgcccacagcccccggctctcggcccctcctgcacccagggctgctccctcagccccaggtcctgccagtcctgtcgaaggcagccacagtgaggacacagctgaagtactctccagcctgagggcagacacggcccactgttgggactcctggtggagcattccctttgtccctaaagaacagatttcctcataggtcagcaaagccccacatgagggcccaggacagcctgaacagagatagtgctggggccaagaagatgggagtggggtgggcgagggagcagagatgggcagggctgtattggancctggctttcagaaaacgtgaaagaagagatggtagattataaaggaagtcaagctgagctcagggcgggagcaagtctctcctccctgtgctgaggggaggtgcctctggcgggcagggacctccgggcaccggttccagggcccgggccccagagtgggaagtcgaggccgaccctctctcttggccctgctgttgcacccaggacaggccagccccgggtcatgctcctccatcctcagcctggatgcccttcacacctccgggcctttcctaccactgttcactcgcctggggatgtcagcgccaccctctgcgttctcctgtgtctgggcacagggcaggctcccctctgctgtgcacgccacctccatgcgccatacgtggacacctgggtgcctccactggccctgccccaggttcagatggggctcgcctgctctgtggtgttgggtgggtgagaacagtttctgcccgagggtccctgctgaccccctcctgggtggggtgttctctttctcagaaagaagacggcaccgtgaaccgggacttcaagaagaccaaaacgagggagcaggtcaccgaggccttcagagagttcactaaaggaaaccataacatcctggtgagtctggcacctccagagagggtctctccagccagccagggagggacaactgtgtctactctggaggtgcccatggggaggacaaggcacccccagggacagcacaccccagcccgagttcgtagggctctgtagagaggccactggcagagacttttgtggctctctcactctgccctttcaaaagtcaaaggcacgccgggcacagtggctcacgcctgtaatcccagcactttgggaagctggggcaggtggatcacctgaggtcagaagtttgagaccagcctggccaacatggtgaaactccatctttactaaaaacacaaaaattagccggacatggtggcgcatgcctgtaattccagctacttgggatgctgagacaggagagtcacttgaacctgggaggcggaggttgcagtgagctgagattttgccattgcacttcagcctgggcaacaagaatgaaactctgtctggg

SEQ ID NO: 447794 - DNA, 6162 bp, Homo sapiens
tcctcttttttgtcttccatagcttgtgagaaaataatttctgagcatttttacttttaaagccatctcgtccctacgaggtttgcgcctctgggcatgtagtctacacaggacctgagaatctgagaaactgcagccgcacggttgtttatggagctttgggcgggggctgagcccgcggtcgtgcccccagcccgctgcccaggccatgccgccccatctgcgcgcggagccgcggctgccgggcctccggggctgagccgggagcgccgggaggaggaggcgccggcggcggagcaggagcgggagccgcggcggcgggcagcgcgggacccagtactatggctgtgtactgctatgcgctcaatagcctggtgatcatgaatagcgccaacgagatgaagagcggcggcggcccggggcccagtggcagcgagacgcccccgcccccgaggagggcagtgctgagccccggcagcgttttcagccccgggagaggcgcctctttcctcttccccccagccgagtcgctgtcccccgaggagccccggagccccgggggctggcggagcggccggcgcaggctgaatagtagcagcggcagtggcagcggcagcagcggcagtagcgtgagcagcccaagttgggctggtcgcctgcgaggggaccggcagcaggtggtggcagccggtaccctctccccgccagggccggaggaggccaagaggaagctgcggatcttgcagcgcgagttgcagaacgtgcaggtgaaccagaaagtgggcatgtttgaggcgcacatccaggcacagagctccgccattcaagcgccccgcagcccgcgtttgggcagggctcgctcgccctccccgtgccccttccgcagcagcagtcagccccctggaagggtcctggttcagggcgcccggagcgaggaacggaggacaaagtcctggggggagcaatgtccagagacttcaggaaccgactccgggaggaaaggagggcccagcctatgctcctcgcaggtgaagaaaggaatgccacctcttcccggccgggctgcccctacaggatcagaggctcagggtccatccgcttttgtaaggatggagaagggtatccctgccagtccccgctgtggctcacccacagctatggaaattgacaaaaggggctctcctaccccgggaactcggagctgcctagctccctcattggggctgttcggagctagcttaacgatggccacggaagtggcagcgagagttacatccactgggccacaccgtccacaggatcttgccctcactgagccgtctgggagagcccgtgagcttgaggacctgcagcccccagaggccctggtggagaggcaggggcagtttctgggcagtgagacaagcccagccccagaaaggggcgggccccgcgatggagaaccccctgggaagatggggaaaggatatctgccctgtggcatgccgggctctggggagcctgaagtgggcaaaaggccagaggagacgactgtgagcgtgcaaagcgcagagtcctctgattccctgagctggtccaggctgcccagggccctggcctccgtaggccctgaggaggcccgaagtggggcccccgtgggcggggggcgttggcagctctccgacagagtggagggagggtccccaacgctgggcttgcttgggggcagcccctcagcacagccggggaccgggaatgtggaggcgggaattccttctggcagaatgctggagcctttgccctgttgggacgctgcgaaagatctgaaagaacctcagtgccctcctggggacagggtgggtgtgcagcctgggaactccagggtttggcagggcaccatggagaaagccggtttggcttggacgcgtggcacaggggtgcaatcagaggggacttgggaaagccagcggcaggacagtgatgccctcccaagtccggagctgctaccccaagatcaggacaagcctttcctgaggaaggcctgcagccccagcaacatacctgctgtcatcattacagacatgggcacccaggaggatggggccttggaggagacgcagggaagccctcggggcaacctgcccctgaggaaactgtcctcttcctcggcctcctccacgggcttctcctcatcctacgaagactcagaggaggacatctccagtgaccctgagcgcaccctggaccccaactcagctttcctgcataccctggaccagcagaaacctagagtgagcaaatcatggaggaagataaaaaacatggtgcactggtctcccttcgtcatgtccttcaagaagaagtacccctggatccagctggcaggacacgcagggagtttcaaggcagctgccaatggcaggatcctgaagaagcactgtgagtcagagcagcgctgcctggaccggctgatggtggatgtgctgaggcccttcgtacctgcctaccatggggatgtggtgaaggacggggagcgctacaaccagatggacgacctgctggccgacttcgactcgccctgtgtgatggactgcaagatgggaatcaggacctacctggaggaggagctcacgaaggcccggaagaagcccagcctgcggaaggacatgtaccagaagatgatcgaggtggaccccgaggcccccaccgaggaggaaaaagcacagcgggctgtgaccaagccacggtacatgcagtggcgggagaccatcagctccacggccaccctggggttcaggatcgagggaatcaagaaagaagacggcaccgtgaaccgggacttcaagaagaccaaaacgagggagcaggtcaccgaggccttcagagagttcactaaaggaaaccataacatcctgatcgcctatcgggaccggctgaaggccattcgaaccactctagaagtttctcccttcttcaagtgccacgaggtcattggcagctccctcctcttcatccacgacaagaaggaacaggccaaagtgtggatgatcgactttgggaaaaccacgcccctgcctgagggccagaccctgcagcatgacgtcccctggcaggaggggaaccgggaggatggctacctctcggggctcaataacctcgtcgacatcctgaccgagatgtcccaggatgccccactcgcctgagctgcccacgccctccctggcccccgcctgggcctcctttcctcctcctgtgcttcctttctcgttcctaacttttccttcacttacacctgactgaccctcctgaactgcactacaagacactttgtagaagaggagatgagagtttctagtcattttcctaacttcagggcttggaggtggtgtttgcactgctttttgtagagagggtcacctactagaagagaaatgcccagtcttagaggtgggtcaggtgtagagctggagggggtccctggctgctgaggggaccctaccagatgagccctgcctctgggagccccctaggaagcaccagcctggacctaccacctgcggaggcctgctgccccctggcggccagtgctgttagagtgctgccaagcacagccttatttctgccggggcctccccaccggagagcccagggggccggccgggttcctggtccctggctgggagcagggctttctggtagttggggcacaaaaccatcggggaaccacatgttgactgtgagcaaagtgtcttccgattagcagcctcagggatgccctggtggcctctccagggctgctcaggcaaggccccccacccatctggtatggaaacctgccggctccaggccagacccaggagccaagagaaggctgaagccagcttggctgtgttctctgatctaggccttcccagaggaggcgagcagaagctgtgccacttggaattgcaacccatgagttcagaaggcacactctgccatgctgagctccaagggtgctaccaggggaagatgggatctatagagtctctgggccctggccccagggaggagcacatttttcttgaccctcacctacctggtgctagttggtcaaccctgcctgcatacatgggctcctgtcatggggcccagagtcccttgcagatatagaaataggggaggagctcaggtctgcgccaggcaggaagaaggcaggcttctggcttccagaggtgccgcggtggcctcctggcatcatttgttattgcctctgaaacaagccttactgcctggagggcttagattcctgcttctccaatgtagtgtgggtatcttgtagggtatgtggtggatgccagggcgtgctccaggcacctcttcctgaagtctctgcatttggagattcgtggagaacctatttaagcccaattttaactgaaagccagtgagtctgatatggaagggaatgtaaaatttgcctgacttcttaagaacaaaacccccagctctgtgccccatgctccttggggcttgccacccactcctttgctgtcagaggtacaggagctgggagagtccaggagctagggacacagagggagactatggaccaaggtgtgtgtgtctggaggaaccactgcccaccccaccaccccggggtctctggggaactgtcaacctgcccacgggacatgtacatttccccttttgtgctggaagtgtgagtgacacttgctgggggtggagggtgggacacatgaggatgtataagtacagattttaaaaaaggaaatcaacttacacttcctggctcttgtttaaaacagtggtgagctcctgtgtgggccgacttgctaaaggtcacacacgcgcccggtggagcacgagagacctcgtggcagcatgtgatctggaaggcaggcaggacgggggcgttggggagccaaagtcaactctgggcctctggagctatagtgacttttgggctagaagggaccctggtggtctgtgcttcagccatttgcagggcaggggcatcattaattcagacgtaaagattctatgaatatggactggccaaaagttatccttactccatctgtgaaagaagtttgctaaagcaaatcatgatatgaacaaaaattacaggggacctgtttaagagaacaaaatgttccaagcactttaggcagacaccagctgtttgcaaacaatgtgctaatatgcaaatgatgtgcttattaaaggaggcccatggggcctcttattggcaatacttggctgtgggttacattaaatatgtgaacatagtatgaagtagcatcattttagggttattctgttacttagggtttttgttttctgttttttttttctctttttttgtatttaccgtgctagttctcttctacacctactctgtctctcaagccattttgccactcgcttccctgccatctggcccttccctttgtctcagtgggatagatggattgtgaaatggaatctcccagaacccctgccctggcagcctggaagaccgtgcctgcccagccctcgtcaccacagggactccttgggtcctggcagtgcatgtgccagcaggcaggacaaactctgtgtacctgtgcccaggtgaatgggcgcagggtcctcttgccctgtcctgcggggggccccacgagttcctggcattcagcactgcttagcattctcggaaggtttcttcaactgcttgcttttcccaggcttgcctttagtgtcatgtaagacatttttaagttatatttattttgttgggttttaaaattgcacagaacactaagaccgaaaggctggactcttgtttctccttgaaagctttgcctttgttttgaacttcctttcccacttggtagaaagagcccagaagcagccctggccctgtaagatggactctttcatccttcagttgtatttagctttgagtttctctgcatctgtccaccccatgtgtatataacccagcccctggctctggggtggtcacctcgtcagtgccttttgttctggaggagaggacccccccgcctgccgagaggctctcttcctgttctgcacccctctccccatgggaccttggagaaaactgaactgttacaaacccctgcacagtgcctgtcaaacagatgcaaaccttcctgaataaagccttggagacca

SEQ ID NO: 447795 - DNA, 3601 bp, Homo sapiens
ctcatgtcgccttccctcccacgtaggacctacctggaggaggagctcacgaaggcccggaagaagcccagcctgcggaaggacatgtaccagaagatgatcgaggtggaccccgaggcccccaccgaggaggaaaaagcacagcgggctgtgaccaagccacggtacatgcagtggcgggagaccatcagctccacggccaccctggggttcaggatcgagggaatcaagaaagaagacggcaccgtgaaccgggacttcaagaagaccaaaacgagggagcaggtcaccgaggccttcagagagttcactaaaggaaaccataacatcctgatcgcctatcgggaccggctgaaggccattcgaaccactctagaagtttctcccttcttcaagtgccacgaggtcattggcagctccctcctcttcatccacgacaagaaggaacaggccaaagtgtggatgatcgactttgggaaaaccacgcccctgcctgagggccagaccctgcagcatgacgtcccctggcaggaggggaaccgggaggatggctacctctcggggctcaataacctcgtcgacatcctgaccgagatgtcccaggatgccccactcgcctgagctgcccacgccctccctggcccccgcctgggcctcctttcctcctcctgtgcttcctttctcgttcctaacttttccttcacttacacctgactgaccctcctgaactgcactacaagacactttgtagaagaggagatgagagtttctagtcattttcctaacttcagggcttggaggtggtgtttgcactgctttttgtagagagggtcacctactagaagagaaatgcccagtcttagaggtgggtcaggtgtagagctggagggggtccctggctgctgaggggaccctaccagatgagccctgcctctgggagccccctaggaagcaccagcctggacctaccacctgcggaggcctgctgccccctggcggccagtgctgttagagtgctgccaagcacagccttatttctgccggggcctccccaccggagagcccagggggccggccgggttcctggtccctggctgggagcagggctttctggtagttggggcacaaaaccatcggggaaccacatgttgactgtgagcaaagtgtcttccgattagcagcctcagggatgccctggtggcctctccagggctgctcaggcaaggccccccacccatctggtatggaaacctgccggctccaggccagacccaggagccaagagaaggctgaagccagcttggctgtgttctctgatctaggccttcccagaggaggcgagcagaagctgtgccacttggaattgcaacccatgagttcagaaggcacactctgccatgctgagctccaagggtgctaccaggggaagatgggatctatagagtctctgggccctggccccagggaggagcacatttttcttgaccctcacctacctggtgctagttggtcaaccctgcctgcatacatgggctcctgtcatggggcccagagtcccttgcagatatagaaataggggaggagctcaggtctgcgccaggcaggaagaaggcaggcttctggcttccagaggtgccgcggtggcctcctggcatcatttgttattgcctctgaaacaagccttactgcctggagggcttagattcctgcttctccaatgtagtgtgggtatcttgtagggtatgtggtggatgccagggcgtgctccaggcacctcttcctgaagtctctgcatttggagattcgtggagaacctatttaagcccaattttaactgaaagccagtgagtctgatatggaagggaatgtaaaatttgcctgacttcttaagaacaaaacccccagctctgtgccccatgctccttggggcttgccacccactcctttgctgtcagaggtacaggagctgggagagtccaggagctagggacacagagggagactatggaccaaggtgtgtgtgtctggaggaaccactgcccaccccaccaccccggggtctctggggaactgtcaacctgcccacgggacatgtacatttccccttttgtgctggaagtgtgagtgacacttgctgggggtggagggtgggacacatgaggatgtataagtacagattttaaaaaaggaaatcaacttacacttcctggctcttgtttaaaacagtggtgagctcctgtgtgggccgacttgctaaaggtcacacacgcgcccggtggagcacgagagacctcgtggcagcatgtgatctggaaggcaggcaggacgggggcgttggggagccaaagtcaactctgggcctctggagctatagtgacttttgggctagaagggaccctggtggtctgtgcttcagccatttgcagggcaggggcatcattaattcagacgtaaagattctatgaatatggactggccaaaagttatccttactccatctgtgaaagaagtttgctaaagcaaatcatgatatgaacaaaaattacaggggacctgtttaagagaacaaaatgttccaagcactttaggcagacaccagctgtttgcaaacaatgtgctaatatgcaaatgatgtgcttattaaaggaggcccatggggcctcttattggcaatacttggctgtgggttacattaaatatgtgaacatagtatgaagtagcatcattttagggttattctgttacttagggtttttgttttctgttttttttttctctttttttgtatttaccgtgctagttctcttctacacctactctgtctctcaagccattttgccactcgcttccctgccatctggcccttccctttgtctcagtgggatagatggattgtgaaatggaatctcccagaacccctgccctggcagcctggaagaccgtgcctgcccagccctcgtcaccacagggactccttgggtcctggcagtgcatgtgccagcaggcaggacaaactctgtgtacctgtgcccaggtgaatgggcgcagggtcctcttgccctgtcctgcggggggccccacgagttcctggcattcagcactgcttagcattctcggaaggtttcttcaactgcttgcttttcccaggcttgcctttagtgtcatgtaagacatttttaagttatatttattttgttgggttttaaaattgcacagaacactaagaccgaaaggctggactcttgtttctccttgaaagctttgcctttgttttgaacttcctttcccacttggtagaaagagcccagaagcagccctggccctgtaagatggactctttcatccttcagttgtatttagctttgagtttctctgcatctgtccaccccatgtgtatataacccagcccctggctctggggtggtcacctcgtcagtgccttttgttctggaggagaggacccccccgcctgccgagaggctctcttcctgttctgcacccctctccccatgggaccttggagaaaactgaactgttacaaacccctgcacagtgcctgtcaaacagatgcaaaccttcctgaataaagccttggagacca

SEQ ID NO: 447796 - DNA, 3110 bp, Homo sapiens
tcctcttttttgtcttccatagcttgtgagaaaataatttctgagcatttttacttttaaagccatctcgtccctacgaggtttgcgcctctgggcatgtagtctacacaggacctgagaatctgagaaactgcagccgcacggttgtttatggagctttgggcgggggctgagcccgcggtcgtgcccccagcccgctgcccaggccatgccgccccatctgcgcgcggagccgcggctgccgggcctccggggctgagccgggagcgccgggaggaggaggcgccggcggcggagcaggagcgggagccgcggcggcgggcagcgcgggacccagtactatggctgtgtactgctatgcgctcaatagcctggtgatcatgaatagcgccaacgagatgaagagcggcggcggcccggggcccagtggcagcgagacgcccccgcccccgaggagggcagtgctgagccccggcagcgttttcagccccgggagaggcgcctctttcctcttccccccagccgagtcgctgtcccccgaggagccccggagccccgggggctggcggagcggccggcgcaggctgaatagtagcagcggcagtggcagcggcagcagcggcagtagcgtgagcagcccaagttgggctggtcgcctgcgaggggaccggcagcaggtggtggcagccggtaccctctccccgccagggccggaggaggccaagaggaagctgcggatcttgcagcgcgagttgcagaacgtgcaggtgaaccagaaagtgggcatgtttgaggcgcacatccaggcacagagctccgccattcaagcgccccgcagcccgcgtttgggcagggctcgctcgccctccccgtgccccttccgcagcagcagtcagccccctggaagggtcctggttcagggcgcccggagcgaggaacggaggacaaagtcctggggggagcaatgtccagagacttcaggaaccgactccgggaggaaaggagggcccagcctatgctcctcgcaggtgaagaaaggaatgccacctcttcccggccgggctgcccctacaggatcagaggctcagggtccatccgcttttgtaaggatggagaagggtatccctgccagtccccgctgtggctcacccacagctatggaaattgacaaaaggggctctcctaccccgggaactcggagctgcctagctccctcattggggctgttcggagctagcttaacgatggccacggaagtggcagcgagagttacatccactgggccacaccgtccacaggatcttgccctcactgagccgtctgggagagcccgtgagcttgaggacctgcagcccccagaggccctggtggagaggcaggggcagtttctgggcagtgagacaagcccagccccagaaaggggcgggccccgcgatggagaaccccctgggaagatggggaaaggatatctgccctgtggcatgccgggctctggggagcctgaagtgggcaaaaggccagaggagacgactgtgagcgtgcaaagcgcagagtcctctgattccctgagctggtccaggctgcccagggccctggcctccgtaggccctgaggaggcccgaagtggggcccccgtgggcggggggcgttggcagctctccgacagagtggagggagggtccccaacgctgggcttgcttgggggcagcccctcagcacagccggggaccgggaatgtggaggcgggaattccttctggcagaatgctggagcctttgccctgttgggacgctgcgaaagatctgaaagaacctcagtgccctcctggggacagggtgggtgtgcagcctgggaactccagggtttggcagggcaccatggagaaagccggtttggcttggacgcgtggcacaggggtgcaatcagaggggacttgggaaagccagcggcaggacagtgatgccctcccaagtccggagctgctaccccaagatcaggacaagcctttcctgaggaaggcctgcagccccagcaacatacctgctgtcatcattacagacatgggcacccaggaggatggggccttggaggagacgcagggaagccctcggggcaacctgcccctgaggaaactgtcctcttcctcggcctcctccacgggcttctcctcatcctacgaagactcagaggaggacatctccagtgaccctgagcgcaccctggaccccaactcagctttcctgcataccctggaccagcagaaacctagagtgagcaaatcatggaggaagataaaaaacatggtgcactggtctcccttcgtcatgtccttcaagaagaagtacccctggatccagctggcaggacacgcagggagtttcaaggcagctgccaatggcaggatcctgaagaagcactgtgagtcagagcagcgctgcctggaccggctgatggtggatgtgctgaggcccttcgtacctgcctaccatggggatgtggtgaaggacggggagcgctacaaccagatggacgacctgctggccgacttcgactcgccctgtgtgatggactgcaagatgggaatcaggacctacctggaggaggagctcacgaaggcccggaagaagcccagcctgcggaaggacatgtaccagaagatgatcgaggtggaccccgaggcccccaccgaggaggaaaaagcacagcgggctgtgaccaagccacggtacatgcagtggcgggagaccatcagctccacggccaccctggggttcaggatcgagggaatcaagaaagaagacggcaccgtgaaccgggacttcaagaagaccaaaacgagggagcaggtcaccgaggccttcagagagttcactaaaggaaaccataacatcctgatcgcctatcgggaccggctgaaggccattcgaaccactctagaagtttctcccttcttcaagtgccacgaggccatcaaactctgaacagtcatgcaaccggagcttctgatgatggcctcttctgctggggacccttagacaggcatctgagggacctctgactgccatttcccaaaaacagtgccccctgtcagcaggaagcagttaagatca

SEQ ID NO: 447797 - DNA, 2545 bp, Homo sapiens
tcctcttttttgtcttccatagcttgtgagaaaataatttctgagcatttttacttttaaagccatctcgtccctacgaggtttgcgcctctgggcatgtagtctacacaggacctgagaatctgagaaactgcagccgcacggttgtttatggagctttgggcgggggctgagcccgcggtcgtgcccccagcccgctgcccaggccatgccgccccatctgcgcgcggagccgcggctgccgggcctccggggctgagccgggagcgccgggaggaggaggcgccggcggcggagcaggagcgggagccgcggcggcgggcagcgcgggacccagtactatggctgtgtactgctatgcgctcaatagcctggtgatcatgaatagcgccaacgagatgaagagcggcggcggcccggggcccagtggcagcgagacgcccccgcccccgaggagggcagtgctgagccccggcagcgttttcagccccgggagaggcgcctctttcctcttccccccagccgagtcgctgtcccccgaggagccccggagccccgggggctggcggagcggccggcgcaggctgaatagtagcagcggcagtggcagcggcagcagcggcagtagcgtgagcagcccaagttgggctggtcgcctgcgaggggaccggcagcaggtggtggcagccggtaccctctccccgccagggccggaggaggccaagaggaagctgcggatcttgcagcgcgagttgcagaacgtgcaggtgaaccagaaagtgggcatgtttgaggcgcacatccaggcacagagctccgccattcaagcgccccgcagcccgcgtttgggcagggctcgctcgccctccccgtgccccttccgcagcagcagtcagccccctggaagggtcctggttcagggcgcccggagcgaggaacggaggacaaagtcctggggggagcaatgtccagagacttcaggaaccgactccgggaggaaaggagggcccagcctatgctcctcgcaggtgaagaaaggaatgccacctcttcccggccgggctgcccctacaggatcagaggctcagggtccatccgcttttgtaaggatggagaagggtatccctgccagtccccgctgtggctcacccacagctatggaaattgacaaaaggggctctcctaccccgggaactcggagctgcctagctccctcattggggctgttcggagctagcttaacgatggccacggaagtggcagcgagagttacatccactgggccacaccgtccacaggatcttgccctcactgagccgtctgggagagcccgtgagcttgaggacctgcagcccccagaggccctggtggagaggcaggggcagtttctgggcagtgagacaagcccagccccagaaaggggcgggccccgcgatggagaaccccctgggaagatggggaaaggatatctgccctgtggcatgccgggctctggggagcctgaagtgggcaaaaggccagaggagacgactgtgagcgtgcaaagcgcagagtcctctgattccctgagctggtccaggctgcccagggccctggcctccgtaggccctgaggaggcccgaagtggggcccccgtgggcggggggcgttggcagctctccgacagagtggagggagggtccccaacgctgggcttgcttgggggcagcccctcagcacagccggggaccgggaatgtggaggcgggaattccttctggcagaatgctggagcctttgccctgttgggacgctgcgaaagatctgaaagaacctcagtgccctcctggggacagggtgggtgtgcagcctgggaactccagggtttggcagggcaccatggagaaagccggtttggcttggacgcgtggcacaggggtgcaatcagaggggacttgggaaagccagcggcaggacagtgatgccctcccaagtccggagctgctaccccaagatcaggacaagcctttcctgaggaaggcctgcagccccagcaacatacctgctgtcatcattacagacatgggcacccaggaggatggggccttggaggagacgcagggaagccctcggggcaacctgcccctgaggaaactgtcctcttcctcggcctcctccacgggcttctcctcatcctacgaagactcagaggaggacatctccagtgaccctgagcgcaccctggaccccaactcagctttcctgcataccctggaccagcagaaacctagagtgagcaaatcatggaggaagataaaaaacatggtgcactggtctcccttcgtcatgtccttcaagaagaagtacccctggatccagctggcaggacacgcaggggagtttatcaagggcaagcttgccaatagggcaagggatcccttgaacgaaaggcacctggtgaagtcaaggagacaggaggcgttgcccttggaacccggtccttagattgggtagcgaattgatagcatggaggggaccccttttcgggtagccattgccataacgca

SEQ ID NO: 447798 - DNA, 361 bp, Homo sapiens
ttaatcgtgcattgaacaaacactgaagtagcccggagcagacactgacaggggcagtatctccacggtcgaaaagggcgtgcagggccggcttggcgtcgccactgccgggatcgccgggcccctgaaccgaagagctttcccccctctttcgcactcctcttttttgtcttccatagcttgtgagaaaataatttctgagcatttttacttttaaagccatctcgtccctacgaggtttgcgcctctgggcatgtagtctacacaggacctgagaatctgagaaactgcaggtaagtttggcggccttttaatggctctcgcctctgaacaaccctcttttccctcactttctgctctg

SEQ ID NO: 447799 - DNA, 3018 bp, Homo sapiens
tcctcttttttgtcttccatagcttgtgagaaaataatttctgagcatttttacttttaaagccatctcgtccctacgaggtttgcgcctctgggcatgtagtctacacaggacctgagaatctgagaaactgcagccgcacggttgtttatggagctttgggcgggggctgagcccgcggtcgtgcccccagcccgctgcccaggccatgccgccccatctgcgcgcggagccgcggctgccgggcctccggggctgagccgggagcgccgggaggaggaggcgccggcggcggagcaggagcgggagccgcggcggcgggcagcgcgggacccagtactatggctgtgtactgctatgcgctcaatagcctggtgatcatgaatagcgccaacgagatgaagagcggcggcggcccggggcccagtggcagcgagacgcccccgcccccgaggagggcagtgctgagccccggcagcgttttcagccccgggagaggcgcctctttcctcttccccccagccgagtcgctgtcccccgaggagccccggagccccgggggctggcggagcggccggcgcaggctgaatagtagcagcggcagtggcagcggcagcagcggcagtagcgtgagcagcccaagttgggctggtcgcctgcgaggggaccggcagcaggtggtggcagccggtaccctctccccgccagggccggaggaggccaagaggaagctgcggatcttgcagcgcgagttgcagaacgtgcaggtgaaccagaaagtgggcatgtttgaggcgcacatccaggcacagagctccgccattcaagcgccccgcagcccgcgtttgggcagggctcgctcgccctccccgtgccccttccgcagcagcagtcagccccctggaagggtcctggttcagggcgcccggagcgaggaacggaggacaaagtcctggggggagcaatgtccagagacttcaggaaccgactccgggaggaaaggagggcccagcctatgctcctcgcaggtgaagaaaggaatgccacctcttcccggccgggctgcccctacaggatcagaggctcagggtccatccgcttttgtaaggatggagaagggtatccctgccagtccccgctgtggctcacccacagctatggaaattgacaaaaggggctctcctaccccgggaactcggagctgcctagctccctcattggggctgttcggagctagcttaacgatggccacggaagtggcagcgagagttacatccactgggccacaccgtccacaggatcttgccctcactgagccgtctgggagagcccgtgagcttgaggacctgcagcccccagaggccctggtggagaggcaggggcagtttctgggcagtgagacaagcccagccccagaaaggggcgggccccgcgatggagaaccccctgggaagatggggaaaggatatctgccctgtggcatgccgggctctggggagcctgaagtgggcaaaaggccagaggagacgactgtgagcgtgcaaagcgcagagtcctctgattccctgagctggtccaggctgcccagggccctggcctccgtaggccctgaggaggcccgaagtggggcccccgtgggcggggggcgttggcagctctccgacagagtggagggagggtccccaacgctgggcttgcttgggggcagcccctcagcacagccggggaccgggaatgtggaggcgggaattccttctggcagaatgctggagcctttgccctgttgggacgctgcgaaagatctgaaagaacctcagtgccctcctggggacagggtgggtgtgcagcctgggaactccagggtttggcagggcaccatggagaaagccggtttggcttggacgcgtggcacaggggtgcaatcagaggggacttgggaaagccagcggcaggacagtgatgccctcccaagtccggagctgctaccccaagatcaggacaagcctttcctgaggaaggcctgcagccccagcaacatacctgctgtcatcattacagacatgggcacccaggaggatggggccttggaggagacgcagggaagccctcggggcaacctgcccctgaggaaactgtcctcttcctcggcctcctccacgggcttctcctcatcctacgaagactcagaggaggacatctccagtgaccctgagcgcaccctggaccccaactcagctttcctgcataccctggaccagcagaaacctagagtgtgacttcttgggaagtgttcccctcagtggtactgctggggcaacgtccaataccaagaatgatgtatagcatatttcatcttcctacactactctctggaaagactgagccaattacggggtcatctgtaaagtctaagtgctgcagtttccctacgaccattggattttgtttgtagtttgatattgtcttactgtcccttgaagttgtaatttgtaattctttagttttcaagagggactctacatgtttccttgtgatgatggccttgagttactcatgtgtacactgcctatttatccccattgagcccccactgcccgaacatgttgatggcattttatatagtaagctgtcagttacttaatgtacaaatattcttccattccatgtttttctcttaaaattttactttattggccaggcgcagtggctcacatctgtaatcccagcactttaggaggccaaggcgggcggatcacctgaggtcaagagattgagaccagcctggccaacatggtgaaaccccgtctctactaaaaaatacaaaaattagccaggtgtagtggtgggcacctgtaatcccagctacttgggaggctgaggcaggagaattgcttgaacctgagaggcggaggttgcggtgagccgagatagcaccactgcactccagcctgggcgaaagagctaaactccatctcaaaaataaataaataaataaaaaataaaaaaagattgtacttt

SEQ ID NO: 447800 - DNA, 6567 bp, Homo sapiens
tcctcttttttgtcttccatagcttgtgagaaaataatttctgagcatttttacttttaaagccatctcgtccctacgaggtttgcgcctctgggcatgtagtctacacaggacctgagaatctgagaaactgcagccgcacggttgtttatggagctttgggcgggggctgagcccgcggtcgtgcccccagcccgctgcccaggccatgccgccccatctgcgcgcggagccgcggctgccgggcctccggggctgagccgggagcgccgggaggaggaggcgccggcggcggagcaggagcgggagccgcggcggcgggcagcgcgggacccagtactatggctgtgtactgctatgcgctcaatagcctggtgatcatgaatagcgccaacgagatgaagagcggcggcggcccggggcccagtggcagcgagacgcccccgcccccgaggagggcagtgctgagccccggcagcgttttcagccccgggagaggcgcctctttcctcttccccccagccgagtcgctgtcccccgaggagccccggagccccgggggctggcggagcggccggcgcaggctgaatagtagcagcggcagtggcagcggcagcagcggcagtagcgtgagcagcccaagttgggctggtcgcctgcgaggggaccggcagcaggtggtggcagccggtaccctctccccgccagggccggaggaggccaagaggaagctgcggatcttgcagcgcgagttgcagaacgtgcaggtgaaccagaaagtgggcatgtttgaggcgcacatccaggcacagagctccgccattcaagcgccccgcagcccgcgtttgggcagggctcgctcgccctccccgtgccccttccgcagcagcagtcagccccctggaagggtcctggttcagggcgcccggagcgaggaacggaggacaaagtcctggggggagcaatgtccagagacttcaggaaccgactccgggaggaaaggagggcccagcctatgctcctcgcaggtgaagaaaggaatgccacctcttcccggccgggctgcccctacaggatcagaggctcagggtccatccgcttttgtaaggatggagaagggtatccctgccagtccccgctgtggctcacccacagctatggaaattgacaaaaggggctctcctaccccgggaactcggagctgcctagctccctcattggggctgttcggagctagcttaacgatggccacggaagtggcagcgagagttacatccactgggccacaccgtccacaggatcttgccctcactgagccgtctgggagagcccgtgagcttgaggacctgcagcccccagaggccctggtggagaggcaggggcagtttctgggcagtgagacaagcccagccccagaaaggggcgggccccgcgatggagaaccccctgggaagatggggaaaggatatctgccctgtggcatgccgggctctggggagcctgaagtgggcaaaaggccagaggagacgactgtgagcgtgcaaagcgcagagtcctctgattccctgagctggtccaggctgcccagggccctggcctccgtaggccctgaggaggcccgaagtggggcccccgtgggcggggggcgttggcagctctccgacagagtggagggagggtccccaacgctgggcttgcttgggggcagcccctcagcacagccggggaccgggaatgtggaggcgggaattccttctggcagaatgctggagcctttgccctgttgggacgctgcgaaagatctgaaagaacctcagtgccctcctggggacagggtgggtgtgcagcctgggaactccagggtttggcagggcaccatggagaaagccggtttggcttggacgcgtggcacaggggtgcaatcagaggggacttgggaaagccagcggcaggacagtgatgccctcccaagtccggagctgctaccccaagatcaggacaagcctttcctgaggaaggcctgcagccccagcaacatacctgctgtcatcattacagacatgggcacccaggaggatggggccttggaggagacgcagggaagccctcggggcaacctgcccctgaggaaactgtcctcttcctcggcctcctccacgggcttctcctcatcctacgaagactcagaggaggacatctccagtgaccctgagcgcaccctggaccccaactcagctttcctgcataccctggaccagcagaaacctagagtgagcaaatcatggaggaagataaaaaacatggtgcactggtctcccttcgtcatgtccttcaagaagaagtacccctggatccagctggcaggacacgcagggagtttcaaggcagctgccaatggcaggatcctgaagaagcactgtgagtcagagcagcgctgcctggaccggctgatggtggatgtgctgaggcccttcgtacctgcctaccatggggatgtggtgaaggacggggagcgctacaaccagatggacgacctgctggccgacttcgactcgccctgtgtgatggactgcaagatgggaatcaggacctacctggaggaggagctcacgaaggcccggaagaagcccagcctgcggaaggacatgtaccagaagatgatcgaggtggaccccgaggcccccaccgaggaggaaaaagcacagcgggctgtgaccaagccacggtacatgcagtggcgggagaccatcagctccacggccaccctggggttcaggatcgagggaatcaagaaagaagacggcaccgtgaaccgggacttcaagaagaccaaaacgagggagcaggtcaccgaggccttcagagagttcactaaaggaaaccataacatcctgatcgcctatcgggaccggctgaaggccattcgaaccactctagaagtttctcccttcttcaagtgccacgaggtcattggcagctccctcctcttcatccacgacaagaaggaacaggccaaagtgtggatgatcgactttgggaaaaccacgcccctgcctgagggccagaccctgcagcatgacgtcccctggcaggaggggaaccgggaggatggctacctctcggggctcaataacctcgtcgacatcctgaccgagatgtcccaggatgccccactcgcctgagctgcccacgccctccctggcccccgcctgggcctcctttcctcctcctgtgcttcctttctcgttcctaacttttccttcacttacacctgactgaccctcctgaactgcactacaagacactttgtagaagaggagatgagagtttctagtcattttcctaacttcagggcttggaggtggtgtttgcactgctttttgtagagagggtcacctactagaagagaaatgcccagtcttagaggtgggtcaggtgtagagctggagggggtccctggctgctgaggggaccctaccagatgagccctgcctctgggagccccctaggaagcaccagcctggacctaccacctgcggaggcctgctgccccctggcggccagtgctgttagagtgctgccaagcacagccttatttctgccggggcctccccaccggagagcccagggggccggccgggttcctggtccctggctgggagcagggctttctggtagttggggcacaaaaccatcggggaaccacatgttgactgtgagcaaagtgtcttccgattagcagcctcagggatgccctggtggcctctccagggctgctcaggcaaggccccccacccatctggtatggaaacctgccggctccaggccagacccaggagccaagagaaggctgaagccagcttggctgtgttctctgatctaggccttcccagaggaggcgagcagaagctgtgccacttggaattgcaacccatgagttcagaaggcacactctgccatgctgagctccaagggtgctaccaggggaagatgggatctatagagtctctgggccctggccccagggaggagcacatttttcttgaccctcacctacctggtgctagttggtcaaccctgcctgcatacatgggctcctgtcatggggcccagagtcccttgcagatatagaaataggggaggagctcaggtctgcgccaggcaggaagaaggcaggcttctggcttccagaggtgccgcggtggcctcctggcatcatttgttattgcctctgaaacaagccttactgcctggagggcttagattcctgcttctccaatgtagtgtgggtatcttgtagggtatgtggtggatgccagggcgtgctccaggcacctcttcctgaagtctctgcatttggagattcgtggagaacctatttaagcccaattttaactgaaagccagtgagtctgatatggaagggaatgtaaaatttgcctgacttcttaagaacaaaacccccagctctgtgccccatgctccttggggcttgccacccactcctttgctgtcagaggtacaggagctgggagagtccaggagctagggacacagagggagactatggaccaaggtgtgtgtgtctggaggaaccactgcccaccccaccaccccggggtctctggggaactgtcaacctgcccacgggacatgtacatttccccttttgtgctggaagtgtgagtgacacttgctgggggtggagggtgggacacatgaggatgtataagtacagattttaaaaaaggaaatcaacttacacttcctggctcttgtttaaaacagtggtgagctcctgtgtgggccgacttgctaaaggtcacacacgcgcccggtggagcacgagagacctcgtggcagcatgtgatctggaaggcaggcaggacgggggcgttggggagccaaagtcaactctgggcctctggagctatagtgacttttgggctagaagggaccctggtggtctgtgcttcagccatttgcagggcaggggcatcattaattcagacgtaaagattctatgaatatggactggccaaaagttatccttactccatctgtgaaagaagtttgctaaagcaaatcatgatatgaacaaaaattacaggggacctgtttaagagaacaaaatgttccaagcactttaggcagacaccagctgtttgcaaacaatgtgctaatatgcaaatgatgtgcttattaaaggaggcccatggggcctcttattggcaatacttggctgtgggttacattaaatatgtgaacatagtatgaagtagcatcattttagggttattctgttacttagggtttttgttttctgttttttttttctctttttttgtatttaccgtgctagttctcttctacacctactctgtctctcaagccattttgccactcgcttccctgccatctggcccttccctttgtctcagtgggatagatggattgtgaaatggaatctcccagaacccctgccctggcagcctggaagaccgtgcctgcccagccctcgtcaccacagggactccttgggtcctggcagtgcatgtgccagcaggcaggacaaactctgtgtacctgtgcccaggtgaatgggcgcagggtcctcttgccctgtcctgcggggggccccacgagttcctggcattcagcactgcttagcattctcggaaggtttcttcaactgcttgcttttcccaggcttgcctttagtgtcatgtaagacatttttaagttatatttattttgttgggttttaaaattgcacagaacactaagaccgaaaggctggactcttgtttctccttgaaagctttgcctttgttttgaacttcctttcccacttggtagaaagagcccagaagcagccctggccctgtaagatggactctttcatccttcagttgtatttagctttgagtttctctgcatctgtccaccccatgtgtatataacccagcccctggctctggggtggtcacctcgtcagtgccttttgttctggaggagaggacccccccgcctgccgagaggctctcttcctgttctgcacccctctccccatgggaccttggagaaaactgaactgttacaaacccctgcacagtgcctgtcaaacagatgcaaaccttcctgaataaagccttggagaccaagcgctgtctgtggtgtgatccttctggcccccagccctgagacctggctgaggggcaggctggggagtcttaggaagctagagggcccacatgggggctgttaggggagtgggtgtcagactgggtaacattttaatttgtaaagaatataaaccactctccaaaatgagtcttttcaaccctcatgaaactttgaaatagtagctcagagactagaacatcaaccaagaagcactgtccccaagtaggggggtctccggtgcagcgatcgcttctggggccttactctaagctagactggggctgaacacgcccattggagttcccgttttacccagatcaattccctgaacaaagatttatagtctgttttacagatgaggaaactgaggtttaaatgaagc

SEQ ID NO: 447801 - DNA, 5346 bp, Homo sapiens
  misc_feature (1453)..(1453): n is a, c, g, or t
ccaggcgagaggcacctgcgggatgcctgtggggtagctggttcattctgccatggctgcaaactgggactggcagacaattcggggaagggaggagcatgctgaccgcctttgatgttggagccagggtctctgagaaactgcattctctctgctttgctcttcgatctttttttggaaattttaaaatatttattggaacagaaatagaaacataagctccaaagaaacaacatgacaaactttataagtaaatgtaattttcccctaattaatatatttactttgtgtttgtggtttacaaaatgatggctctttcccttctatccctttgtacctatgtgtatctggcaggaaagttcttagctctggctatgggcacacagaagcttcctatacatgattatgttcaaatgttgatttactttccccagaataaattggggaactggcactgtctggattggtgactgtctggatgatctccctgtccctgggcccctgtgtgcacccttgctgttaaatttgcaagagccgggctttggggcgccggcccctcagggtctcagaagctgtccctcttgagcagatggcagtccctgtggggttgtcgggtctcccattctctgtccagtcatggtctgcatcatctccagtgtccagcctggagtcagggttgggcagccgatggtcctgatgggagggtcccctgagcctcctttcagatggcatttagacgtagcttccgcagctgtcaatggctcgctgcccacggtggcatgtggggaagtttttaccttcccccgggacagctgctttgcgagctctgggctgagaaaggcatttgcccccttctttgtcttttgaaaccagcccttccctcttttttgcatccagctctgagactggatgcaattccgtacccatccgccttctccttaacgctcgctttcctttctttattagaaacaatccactttcccttcacctctccctctcgagcaggatgtgctcctggtctctgtctattgtccagccgtcagaacagccgacagcctgtcttcccactcagagagaagccagctgtcttcaccatcacctgcctgccccgcccttagctaagaggctctgcctggggtgcactgcccacagcccccggctctcggcccctcctgcacccagggctgctccctcagccccaggtcctgccagtcctgtcgaaggcagccacagtgaggacacagctgaagtactctccagcctgagggcagacacggcccactgttgggactcctggtggagcattccctttgtccctaaagaacagatttcctcataggtcagcaaagccccacatgagggcccaggacagcctgaacagagatagtgctggggccaagaagatgggagtggggtgggcgagggagcagagatgggcagggctgtattggancctggctttcagaaaacgtgaaagaagagatggtagattataaaggaagtcaagctgagctcagggcgggagcaagtctctcctccctgtgctgaggggaggtgcctctggcgggcagggacctccgggcaccggttccagggcccgggccccagagtgggaagtcgaggccgaccctctctcttggccctgctgttgcacccaggacaggccagccccgggtcatgctcctccatcctcagcctggatgcccttcacacctccgggcctttcctaccactgttcactcgcctggggatgtcagcgccaccctctgcgttctcctgtgtctgggcacagggcaggctcccctctgctgtgcacgccacctccatgcgccatacgtggacacctgggtgcctccactggccctgccccaggttcagatggggctcgcctgctctgtggtgttgggtgggtgagaacagtttctgcccgagggtccctgctgaccccctcctgggtggggtgttctctttctcagaaagaagacggcaccgtgaaccgggacttcaagaagaccaaaacgagggagcaggtcaccgaggccttcagagagttcactaaaggaaaccataacatcctgatcgcctatcgggaccggctgaaggccattcgaaccactctagaagtttctcccttcttcaagtgccacgaggtcattggcagctccctcctcttcatccacgacaagaaggaacaggccaaagtgtggatgatcgactttgggaaaaccacgcccctgcctgagggccagaccctgcagcatgacgtcccctggcaggaggggaaccgggaggatggctacctctcggggctcaataacctcgtcgacatcctgaccgagatgtcccaggatgccccactcgcctgagctgcccacgccctccctggcccccgcctgggcctcctttcctcctcctgtgcttcctttctcgttcctaacttttccttcacttacacctgactgaccctcctgaactgcactacaagacactttgtagaagaggagatgagagtttctagtcattttcctaacttcagggcttggaggtggtgtttgcactgctttttgtagagagggtcacctactagaagagaaatgcccagtcttagaggtgggtcaggtgtagagctggagggggtccctggctgctgaggggaccctaccagatgagccctgcctctgggagccccctaggaagcaccagcctggacctaccacctgcggaggcctgctgccccctggcggccagtgctgttagagtgctgccaagcacagccttatttctgccggggcctccccaccggagagcccagggggccggccgggttcctggtccctggctgggagcagggctttctggtagttggggcacaaaaccatcggggaaccacatgttgactgtgagcaaagtgtcttccgattagcagcctcagggatgccctggtggcctctccagggctgctcaggcaaggccccccacccatctggtatggaaacctgccggctccaggccagacccaggagccaagagaaggctgaagccagcttggctgtgttctctgatctaggccttcccagaggaggcgagcagaagctgtgccacttggaattgcaacccatgagttcagaaggcacactctgccatgctgagctccaagggtgctaccaggggaagatgggatctatagagtctctgggccctggccccagggaggagcacatttttcttgaccctcacctacctggtgctagttggtcaaccctgcctgcatacatgggctcctgtcatggggcccagagtcccttgcagatatagaaataggggaggagctcaggtctgcgccaggcaggaagaaggcaggcttctggcttccagaggtgccgcggtggcctcctggcatcatttgttattgcctctgaaacaagccttactgcctggagggcttagattcctgcttctccaatgtagtgtgggtatcttgtagggtatgtggtggatgccagggcgtgctccaggcacctcttcctgaagtctctgcatttggagattcgtggagaacctatttaagcccaattttaactgaaagccagtgagtctgatatggaagggaatgtaaaatttgcctgacttcttaagaacaaaacccccagctctgtgccccatgctccttggggcttgccacccactcctttgctgtcagaggtacaggagctgggagagtccaggagctagggacacagagggagactatggaccaaggtgtgtgtgtctggaggaaccactgcccaccccaccaccccggggtctctggggaactgtcaacctgcccacgggacatgtacatttccccttttgtgctggaagtgtgagtgacacttgctgggggtggagggtgggacacatgaggatgtataagtacagattttaaaaaaggaaatcaacttacacttcctggctcttgtttaaaacagtggtgagctcctgtgtgggccgacttgctaaaggtcacacacgcgcccggtggagcacgagagacctcgtggcagcatgtgatctggaaggcaggcaggacgggggcgttggggagccaaagtcaactctgggcctctggagctatagtgacttttgggctagaagggaccctggtggtctgtgcttcagccatttgcagggcaggggcatcattaattcagacgtaaagattctatgaatatggactggccaaaagttatccttactccatctgtgaaagaagtttgctaaagcaaatcatgatatgaacaaaaattacaggggacctgtttaagagaacaaaatgttccaagcactttaggcagacaccagctgtttgcaaacaatgtgctaatatgcaaatgatgtgcttattaaaggaggcccatggggcctcttattggcaatacttggctgtgggttacattaaatatgtgaacatagtatgaagtagcatcattttagggttattctgttacttagggtttttgttttctgttttttttttctctttttttgtatttaccgtgctagttctcttctacacctactctgtctctcaagccattttgccactcgcttccctgccatctggcccttccctttgtctcagtgggatagatggattgtgaaatggaatctcccagaacccctgccctggcagcctggaagaccgtgcctgcccagccctcgtcaccacagggactccttgggtcctggcagtgcatgtgccagcaggcaggacaaactctgtgtacctgtgcccaggtgaatgggcgcagggtcctcttgccctgtcctgcggggggccccacgagttcctggcattcagcactgcttagcattctcggaaggtttcttcaactgcttgcttttcccaggcttgcctttagtgtcatgtaagacatttttaagttatatttattttgttgggttttaaaattgcacagaacactaagaccgaaaggctggactcttgtttctccttgaaagctttgcctttgttttgaacttcctttcccacttggtagaaagagcccagaagcagccctggccctgtaagatggactctttcatccttcagttgtatttagctttgagtttctctgcatctgtccaccccatgtgtatataacccagcccctggctctggggtggtcacctcgtcagtgccttttgttctggaggagaggacccccccgcctgccgagaggctctcttcctgttctgcacccctctccccatgggaccttggagaaaactgaactgttacaaacccctgcacagtgcctgtcaaacagatgcaaaccttcctgaataaagccttggagacca

SEQ ID NO: 447802 - DNA, 5297 bp, Homo sapiens
ggtgccttctaattctaattcttcccatttctgggtgtgtacttagtctctctgagccacagttttctgctctataaagtggggtgataatgctcagtacacggtttgctttggctcgatgagaaatccaggtctgaaagcttcaggtacagcggccggcgctgaggaaaacagcgttaagtgaggcgcgtcagcggacaccacctgcctgcacatctggctggcctcaacttcccgctgttcgagcccacgtgagtggctccgccccatctggcttctgaccaatggacgagcttcctaaggcgtaccgtcccgactccaaggcgcctggctttgaggcgggctgcgtcttgctcggagtcccgccccttgccgggtcgagcaatgggcgccttccgtttggcgcaggccccgcccctgtcgctctccggcctgcgggccgcagggctcgttccggagggcgggcgccacggaggccggagtggtcgcagttcgggcggaggccgggccaggcggggctgtagggctggggcaggcggcgggctgcccggcgggacagctgcggcagccggcggggggcgtcctgagttggcggtcgagggcgctgccagctcccgaggggccgctcgggccccttccggcccgggtctggttgggccgcaggagcagggcgggctgcggcgcccgggtctggccctggcctacgggctaagcgcccggccccggggccgcggatccggcagccatgtgtggatcttgaagcgccatgtggtcttctgaagcgctttgacagttctaaagggctttatattgcaaactgatcaaagcgcttcgtagccccggaagcgcttaggcatctccgaagtagcgctgggcaaagtgaaggcttcctgatctcagaagcacgttgtgggcttggaaaccgacggcagcctttagtcaattttggatcgctttgacttctccaacacggtttggcatctctgaaaccttgagaagtgcccatggcgtccgagcggggcaaggtcaagcacaactggagcagcacgtcggaagggtgtccccgcaagcgcagctgcctccgggagccctgtgatgtggccccctccagccggccagctcagaggtctgcgtcgcgttctggagggcccagcagccccaagcgcctgaaagcccagaaggaggacgatgtggcttgctcgcggaggttatcctggggctcatcccgccgcagaaataactcctcctcctccttctccccacatttcttgggccctggtgtgggcggggccgcctccaaaggctgcctgattcggaacactcgggggttcctgtcttcagggggatcccctctgcgtcctgccaacgcctctttggaagaaatggcttctctagaggaggaagcctgcagccttaaggttgattccaaagatagttctcataactccacaaactctgaatttgcagctgaagctgagggtcagaatgatacaattgaggaacccaacaaggtccagaaaaggaagagggatagacttcgagaccagggctccacaatgatctacctgaaggctatccagggcatcctggggaaatcgatgccaaaaaggaagggagaggctgccactcgggcaaaaccaagcgcagcagagcatcccagccatggagaaggaccagccaggagtgaaggaccagccaagactgcagaaggagcagccaggagtgtcacagtcactgctgctcagaaggagaaagacgcaaccccagaggtcagcatggaggaggataagacagtgccagagaggagcagcttctatgacaggagagtagttatagaccctcaagagaaacccagtgaggagccccttggggaccgaaggactgtcattgacaaatgctctccacccctagagttcttggatgactctgactctcatttagaaatccaaaagcataaagatagggaggtggtgatggagcacccctcttctggaagtgactggtctgatgttgaggagatctccacagtcagattctctcaggaggaacctgtctccctgaaaccttcagccgttccggagccttcttccttcaccaccgactatgtcatgtaccctcctcatttgtacagtagtccttggtgtgactacgccagctattggaccagcagccccaagccttctagctacccctccacaggcagcagcagcaacgatgcagcccaggttgggaagagcagccggagccgcatgagtgattattcccccaactctacagggagtgtccaaaacacctccagagacatggaggcctcagaggaaggctggtcccagaattctcgttcatttcgcttctccagaagctcagaagaaagagaggtgaaggagaaaagaacattccaagaggagatgcctccgcgtccttgtggaggacacgcatccagctccctgccaaagagccacctggagccaagcctagaggagggcttcattgacactcattgtcacctggacatgctctattccaagctatctttccaagggacctttacaaagttcagaaaaatttacagcagctccttccctaaggaatttcagggctgcatctctgacttctgtgatccccgcaccctgacagattgcctatgggaggagctgttgaaagaggatctggtctggggggcctttggctgtcaccctcattttgcacgttactacagtgagagtcaagaaagaaatcttttgcaagccttaaggcaccctaaggctgtggcatttggagaaatgggcttggattactcttacaagtgcaccacgcctgtcccagaacagcacaaggtatttgagagacagctgcagctggctgtgtctctaaagaagcccttggtgatccactgccgagaagctgatgaagatctgctagaaatcatgaaaaagtttgtgccccctgactacaagatccataggcattgcttcaccggcagctacccggtcattgagcccctgctgaagtactttcccaacatgtctgtgggcttcacggcagtgctgacatactcctctgcctgggaggcccgggaagccttgaggcagatcccactggagagaatcatcgtggaaacggatgctccctatttcctccctcgccaggttcccaaaagcctttgccagtatgcccacccgggcctggccttgcatacggtccgagagattgccagagtcaaagatcagccactctccctcaccttggctgccttgcgtgagaacaccagtcgcctctacagtctttaagcagagaagggcgaccagcagcctgacagaacacaggctggcttgaagtctgtgtctcaggtcgaggatgtgtttagagagctgattggaacacagaaaaccaggacaggatgttttcctccaagcgggtcataaggcttcagcttctgggtggtgggtggggtggggtgggcatggaatgaggggtatggggactgcctgtaatagcactgggattttgcctcccagccaaaatgctccagggtaggcagcaaagaagaaagagtgcgatatgagggtacagtgagtttggcagtccaaattctgttctctgcagcctgtttttgagtagtttgtgaataaagtcacccgcctacttgtctaagcacatgtgggtgtgtaactcagttcctggttctcggttctaaaaacagacttccaactgggaaactttttgggggaaattaactggacacctatctcggaggtttattttcttgcaaccagtgaagtcgtcctcctcccttccctggataactcttcagtttgactgtcactgttctggtgtcaactccagcgtcggcacaggcagaaggacttcagctgctggtctcattggttccactgccattgatatgggggggtgcagaggagcactcattgtccatgatggagatccaggacagactgggggactccgggaagaggctttcttggggaagaggaccccaaaggaggtacttcctcctcactgatgccctcagggctgctgtgtgggtgtgttaagctgataaggttcagtttgcggcggaaactacctgctagtcttgtgtcaggggctgccagcctccttttgtttcacttttgcccccttcttgggaacatttgaccaaaaataatcctcatttcatcttgtgtacagtcctttgtgtaccccgcccaggttgagaggtgaatcagcgtaattctccgaagctctgctgggcagctcagccatgttacattgtctatgcagaataagcaggcctggtgtctgcaaatgtaccagtccttctcccgcatctcctgggtgcccccttggctttgcctctcctgtgtcctgtctttctgcgttttagaagtgagagcctctccttcaccttttgagcaactgagtcatctcaagtcctgagctctgctctgccgcctgctggtgccttgtaaaggtatactcgttacaggccctagaggttctaatggtccagggttaagtgagaggagactgtactttgtttcaaaggatccttcaccctgatctgcagtgaggtggatagatcacctggagtccctcgtctgtggtcttggaggcttaaattgtaaaatacatcccttatggaatcctaaattcctctaggtgtttttggaaggcgcatttgagccttgtgagctaaaatggaatggatttaatatttcctatctggcatttccatcttgcccctggtacacaagtcactggcctggaactcagccttgattcactgtccgtcttcacggattagctgtgctgttatgttgtctgtgctgcagattggcccatgtgggaagtcgggggggacctgatttcctgcttggaagacttgggggactgccgagcatatcaaagtgtttatagtcaccaagtgaactgcagcacaaccatctcctctccagcaagccctgaagtcagtagtgcctgcaggtgaaaccaaccagccctgtgttagaggaggaaaagcggagatgacatggaagtctccaagcctgtgccatccacctgccaaggaaaagcacaaggtgctatctacttttctctctaggatttagattatcatttatgtgctgttgcacagtgaaacctcacctgtgtgggcgtgaaagctgattggcattgtttttgattcagctttttggatggctaattgttttcactgtgctgtgggaatgcctctgtattttttcccctctttggccatctttttctgaaaataaagtgatggatcctctagccaa

SEQ ID NO: 447803 - DNA, 5326 bp, Homo sapiens
ggtgccttctaattctaattcttcccatttctgggtgtgtacttagtctctctgagccacagttttctgctctataaagtggggtgataatgctcagtacacggtttgctttggctcgatgagaaatccaggtctgaaagcttcaggtacagcggccggcgctgaggaaaacagcgttaagtgaggcgcgtcagcggacaccacctgcctgcacatctggctggcctcaacttcccgctgttcgagcccacgtgagtggctccgccccatctggcttctgaccaatggacgagcttcctaaggcgtaccgtcccgactccaaggcgcctggctttgaggcgggctgcgtcttgctcggagtcccgccccttgccgggtcgagcaatgggcgccttccgtttggcgcaggccccgcccctgtcgctctccggcctgcgggccgcagggctcgttccggagggcgggcgccacggaggccggagtggtcgcagttcgggcggaggccgggccaggcggggctgtagggctggggcaggcggcgggctgcccggcgggacagctgcggcagccggcggggggcgtcctgagttggcggtcgagggcgctgccagctcccgaggggccgctcgggccccttccggcccgggtctggttgggccgcaggagcagggcgggctgcggcgcccgggtctggccctggcctacgggctaagcgcccggccccggggccgcggatccggcagccatgtgtggatcttgaagcgccatgtggtcttctgaagcgctttgacagttctaaagggctttatattgcaaactgatcaaagcgcttcgtagccccggaagcgcttaggcatctccgaagtagcgctgggcaaagtgaaggcttcctgatctcagaagcacgttgtgggcttggaaaccgacggcagcctttagtcaattttggatcgctttgacttctccaacacggtttggcatctctgaaaccttgagaagtgcccatggcgtccgagcggggcaaggtcaagcacaactggagcagcacgtcggaagggtgtccccgcaagcgcagctgcctccgggagccctgtgatgtggccccctccagccggccagctcagaggtctgcgtcgcgttctggagggcccagcagccccaagcgcctgaaagcccagaaggaggacgatgtggcttgctcgcggaggttatcctggggctcatcccgccgcagaaataactcctcctcctccttctccccacatttcttgggccctggtgtgggcggggccgcctccaaaggctgcctgattcggaacactcgggggttcctgtcttcagggggatcccctctgcgtcctgccaacgcctctttggaagaaatggcttctctagaggaggaagcctgcagccttaaggttgattccaaagatagttctcataactccacaaactctgaatttgcagctgaagctgagggtcagaatgatacaattgaggaacccaacaaggtccagaaaaggaagagggatagacttcgagaccagggctccacaatgatctacctgaaggctatccagggcatcctggggaaatcgatgccaaaaaggaagggagaggctgccactcgggcaaaaccaagcgcagcagagcatcccagccatggagaaggaccagccaggagtgaaggaccagccaagactgcagaaggagcagccaggagtgtcacagtcactgctgctcagaaggagaaagacgcaaccccagaggtcagcatggaggaggataagacagtgccagagaggagcagcttctatgacaggagagtagttatagaccctcaagagaaacccagtgaggagccccttggggaccgaaggactgtcattgacaaatgctctccacccctagagttcttggatgactctgactctcatttagaaatccaaaagcataaagatagggaggtggtgatggagcacccctcttctggaagtgactggtctgatgttgaggagatctccacagtcagattctctcaggaggaacctgtctccctgaaaccttcagccgttccggagccttcttccttcaccaccgactatgtcatgtaccctcctcatttgtacagtagtccttggtgtgactacgccagctattggaccagcagccccaagccttctagctacccctccacaggcagcagcagcaacgatgcagcccaggttgggaagagcagccggagccgcatgagtgattattcccccaactctacagggagtgtccaaaacacctccagagacatggaggcctcagaggaaggctggtcccagaattctcgttcatttcgcttctccagaagctcagaagaaagagaggtgaaggagaaaagaacattccaagaggagatgcctccgcgtccttgtggaggacacgcatccagctccctgccaaagagccacctggagccaagcctagaggagggcttcattgacactcattgtcacctggacatgctctattccaagctatctttccaagggacctttacaaagttcagaaaaatttacagcagctccttccctaaggaatttcagggctgcatctctgacttctgtgatccccgcaccctgacagattgcctatgggaggagctgttgaaagaggatctggtctggggggcctttggctgtcaccctcattttgcacgttactacagtgagagtcaagaaagaaatcttttgcaagccttaaggcaccctaaggctgtggcatttggagaaatgggcttggattactcttacaagtgcaccacgcctgtcccagaacagcacaaggtatttgagagacagctgcagctggctgtgtctctaaagaagcccttggtgatccactgccgagaagctgatgaagatctgctagaaatcatgaaaaagtttgtgccccctgactacaagatccataggcattgcttcaccggcagctacccggtcattgagcccctgctgaagtactttcccaacatgtctgtgggcttcacggcagtgctgacatactcctctgcctgggaggcccgggaagccttgaggcagatcccactggagagaatcatcgtggaaacggatgctccctatttcctccctcgccaggttcccaaaagcctttgccagtatgcccacccgggcctggccttgcatacggtccgagagattgccagagtcaaagatcagccactctccctcaccttggctgccttgcgtgagaacaccagtcgcctctacagtctttaagcagagaaggtacagtcctcgggagtctcctagaaaagggcgaccagcagcctgacagaacacaggctggcttgaagtctgtgtctcaggtcgaggatgtgtttagagagctgattggaacacagaaaaccaggacaggatgttttcctccaagcgggtcataaggcttcagcttctgggtggtgggtggggtggggtgggcatggaatgaggggtatggggactgcctgtaatagcactgggattttgcctcccagccaaaatgctccagggtaggcagcaaagaagaaagagtgcgatatgagggtacagtgagtttggcagtccaaattctgttctctgcagcctgtttttgagtagtttgtgaataaagtcacccgcctacttgtctaagcacatgtgggtgtgtaactcagttcctggttctcggttctaaaaacagacttccaactgggaaactttttgggggaaattaactggacacctatctcggaggtttattttcttgcaaccagtgaagtcgtcctcctcccttccctggataactcttcagtttgactgtcactgttctggtgtcaactccagcgtcggcacaggcagaaggacttcagctgctggtctcattggttccactgccattgatatgggggggtgcagaggagcactcattgtccatgatggagatccaggacagactgggggactccgggaagaggctttcttggggaagaggaccccaaaggaggtacttcctcctcactgatgccctcagggctgctgtgtgggtgtgttaagctgataaggttcagtttgcggcggaaactacctgctagtcttgtgtcaggggctgccagcctccttttgtttcacttttgcccccttcttgggaacatttgaccaaaaataatcctcatttcatcttgtgtacagtcctttgtgtaccccgcccaggttgagaggtgaatcagcgtaattctccgaagctctgctgggcagctcagccatgttacattgtctatgcagaataagcaggcctggtgtctgcaaatgtaccagtccttctcccgcatctcctgggtgcccccttggctttgcctctcctgtgtcctgtctttctgcgttttagaagtgagagcctctccttcaccttttgagcaactgagtcatctcaagtcctgagctctgctctgccgcctgctggtgccttgtaaaggtatactcgttacaggccctagaggttctaatggtccagggttaagtgagaggagactgtactttgtttcaaaggatccttcaccctgatctgcagtgaggtggatagatcacctggagtccctcgtctgtggtcttggaggcttaaattgtaaaatacatcccttatggaatcctaaattcctctaggtgtttttggaaggcgcatttgagccttgtgagctaaaatggaatggatttaatatttcctatctggcatttccatcttgcccctggtacacaagtcactggcctggaactcagccttgattcactgtccgtcttcacggattagctgtgctgttatgttgtctgtgctgcagattggcccatgtgggaagtcgggggggacctgatttcctgcttggaagacttgggggactgccgagcatatcaaagtgtttatagtcaccaagtgaactgcagcacaaccatctcctctccagcaagccctgaagtcagtagtgcctgcaggtgaaaccaaccagccctgtgttagaggaggaaaagcggagatgacatggaagtctccaagcctgtgccatccacctgccaaggaaaagcacaaggtgctatctacttttctctctaggatttagattatcatttatgtgctgttgcacagtgaaacctcacctgtgtgggcgtgaaagctgattggcattgtttttgattcagctttttggatggctaattgttttcactgtgctgtgggaatgcctctgtattttttcccctctttggccatctttttctgaaaataaagtgatggatcctctagccaa

SEQ ID NO: 447804 - DNA, 1023 bp, Homo sapiens
ggcaagccaaggggcaccagtagatgcgggagaaggactggtacatttgcagacaccaggcctgcttattctgcatagacaatgtaacatggctgagctgcccagcagagcttcggagaattacgctgattcaccttttgagcaactgagtcatctcaagtcctgagctctgctctgccgcctgctggtgccttgtaaaggtatactcgttacaggccctagaggttctaatggtccagggttaagtgagaggagactgtactttgtttcaaaggatccttcaccctgatctgcagtgaggtggatagatcacctggagtccctcgtctgtggtcttggaggcttaaattgtaaaatacatcccttatggaatcctaaattcctctaggtgtttttggaaggcgcatttgagccttgtgagctaaaatggaatggatttaatatttcctatctggcatttccatcttgcccctggtacacaagtcactggcctggaactcagccttgattcactgtccgtcttcacggattagctgtgctgttatgttgtctgtgctgcagattggcccatgtgggaagtcgggggggacctgatttcctgcttggaagacttgggggactgccgagcatatcaaagtgtttatagtcaccaagtgaactgcagcacaaccatctcctctccagcaagccctgaagtcagtagtgcctgcaggtgaaaccaaccagccctgtgttagaggaggaaaagcggagatgacatggaagtctccaagcctgtgccatccacctgccaaggaaaagcacaaggtgctatctacttttctctctaggatttagattatcatttatgtgctgttgcacagtgaaacctcacctgtgtgggcgtgaaagctgattggcattgtttttgattcagctttttggatggctaattgttttcactgtgctgtgggaatgcctctgtattttttcccctctttggccatctttttctgaaaataaagtgatggatcctctagccaa

SEQ ID NO: 447805 - DNA, 5204 bp, Homo sapiens
ggtgccttctaattctaattcttcccatttctgggtgtgtacttagtctctctgagccacagttttctgctctataaagtggggtgataatgctcagtacacggtttgctttggctcgatgagaaatccaggtctgaaagcttcaggtacagcggccggcgctgaggaaaacagcgttaagtgaggcgcgtcagcggacaccacctgcctgcacatctggctggcctcaacttcccgctgttcgagcccacgtgagtggctccgccccatctggcttctgaccaatggacgagcttcctaaggcgtaccgtcccgactccaaggcgcctggctttgaggcgggctgcgtcttgctcggagtcccgccccttgccgggtcgagcaatgggcgccttccgtttggcgcaggccccgcccctgtcgctctccggcctgcgggccgcagggctcgttccggagggcgggcgccacggaggccggagtggtcgcagttcgggcggaggccgggccaggcggggctgtagggctggggcaggcggcgggctgcccggcgggacagctgcggcagccggcggggggcgtcctgagttggcggtcgagggcgctgccagctcccgaggggccgctcgggccccttccggcccgggtctggttgggccgcaggagcagggcgggctgcggcgcccgggtctggccctggcctacgggctaagcgcccggccccggggccgcggatccggcagccatgtgtggatcttgaagcgccatgtggtcttctgaagcgctttgacagttctaaagggctttatattgcaaactgatcaaagcgcttcgtagccccggaagcgcttaggcatctccgaagtagcgctgggcaaagtgaaggcttcctgatctcagaagcacgttgtgggcttggaaaccgacggcagcctttagtcaattttggatcgctttgacttctccaacacggtttggcatctctgaaaccttgagaagtgcccatggcgtccgagcggggcaaggtcaagcacaactggagcagcacgtcggaagggtgtccccgcaagcgcagctgcctccgggagccctgtgatgtggccccctccagccggccagctcagaggtctgcgtcgcgttctggagggcccagcagccccaagcgcctgaaagcccagaaggaggacgatgtggcttgctcgcggaggttatcctggggctcatcccgccgcagaaataactcctcctcctccttctccccacatttcttgggccctggtgtgggcggggccgcctccaaaggctgcctgattcggaacactcgggggttcctgtcttcagggggatcccctctgcgtcctgccaacgcctctttggaagaaatggcttctctagaggaggaagcctgcagccttaaggttgattccaaagatagttctcataactccacaaactctgaatttgcagctgaagctgagggtcagaatgatacaattgaggaacccaacaaggtccagaaaaggaagagggatagacttcgagaccagggctccacaatgatctacctgaaggctatccagggcatcctggggaaatcgatgccaaaaaggaagggagaggctgccactcgggcaaaaccaagcgcagcagagcatcccagccatggagaaggaccagccaggagtgaaggaccagccaagactgcagaaggagcagccaggagtgtcacagtcactgctgctcagaaggagaaagacgcaaccccagaggtcagcatggaggaggataagacagtgccagagaggagcagcttctatgacaggagagtagttatagaccctcaagagaaacccagtgaggagccccttggggaccgaaggactgtcattgacaaatgctctccacccctagagttcttggatgactctgactctcatttagaaatccaaaagcataaagatagggaggtggtgatggagcacccctcttctggaagtgactggtctgatgttgaggagatctccacagtcagattctctcaggaggaacctgtctccctgaaaccttcagccgttccggagccttcttccttcaccaccgactatgtcatgtaccctcctcatttgtacagtagtccttggtgtgactacgccagctattggaccagcagccccaagccttctagctacccctccacaggcagcagcagcaacgatgcagcccaggttgggaagagcagccggagccgcatgagtgattattcccccaactctacagggagtgtccaaaacacctccagagacatggaggcctcagaggaaggctggtcccagaattctcgttcatttcgcttctccagaagctcagaagaaagagaggtgaaggagaaaagaacattccaagaggagatgcctccgcgtccttgtggaggacacgcatccagctccctgccaaagagccacctggagccaagcctagaggagggcttcattgacactcattgtcacctggacatgctctattccaagctatctttccaagggacctttacaaagttcagaaaaatttacagcagctccttccctaaggaatttcagggctgcatctctgacttctgtgatccccgcaccctgacagattgcctatgggaggagctgttgaaagaggatctggtctggggggcctttggctgtcaccctcattttgcacgttactacagtgagagtcaagaaagaaatcttttgcaagccttaaggcaccctaaggctgtggcatttggagaaatgggcttggattactcttacaagtgcaccacgcctgtcccagaacagcacaaggtatttgagagacagctgcagctggctgtgtctctaaagaagcccttggtgatccactgccgagaagctgatgaagatctgctagaaatcatgaaaaagtttgtgccccctgactacaagatccataggcattgcttcaccggcagctacccggtcattgagcccctgctgaagtactttcccaacatgtctgtgggcttcacggcagtgctgacatactcctctgcctgggaggcccgggaagccttgaggcagatcccactggagagaatcatcgtggaaacggatgctccctatttcctccctcgccaggttcccaaaagcctttgccagtatgcccacccgggcctggccttgcatacggtccgagagattgccagagtcaaagatcagccactctccctcaccttggctgccttgcgtgagaacaccagtcgcctctacagtctttaagcagagaagggcgaccagcagcctgacagaacacaggctggcttgaagtctgtgtctcaggtcgaggatgtgtttagagagctgattggaacacagaaaaccaggacaggatgttttcctccaagcgggtcataaggcttcagcttctgggtggtgggtggggtggggtgggcatggaatgaggggtatggggactgcctgtaatagcactgggattttgcctcccagccaaaatgctccagggtaggcagcaaagaagaaagagtgcgatatgagggtacagtgagtttggcagtccaaattctgttctctgcagcctgtttttgagtagtttgtgaataaagtcacccgcctacttgtctaagcacatgtgggtgtgtaactcagttcctggttctcggttctaaaaacagacttccaactgggaaactttttgggggaaattaactggacacctatctcggaggtttattttcttgcaaccagtgaagtcgtcctcctcccttccctggataactcttcagtttgactgtcactgttctggtgtcaactccagcgtcggcacaggcagaaggacttcagctgctggtctcattggttccactgccattgatatgggggggtgcagaggagcactcattgtccatgatggagatccaggacagactgggggactccgggaagaggctttcttggggaagaggaccccaaaggaggtacttcctcctcactgatgccctcagggctgctgtgtgggtgtgttaagctgataaggttcagtttgcggcggaaactacctgctagtcttgtgtcaggggctgccagcctccttttgtttcacttttgcccccttcttgggaacatttgaccaaaaataatcctcatttcatcttgtgtacagtcctttgtgtaccccgcccaggttgagaggtgaatcagcgtaattctccgaagctctgctgggcagctcagccatgttacattgtctatgcagaataagcaggcctggtgtctgcaaatgtaccagtccttctcccgcatctcctgggtgcccccttggctttgcctctcctgtgtcctgtctttctgcgttttagaagtgagagcctctccttcaccttttgagcaactgagtcatctcaagtcctgagctctgctctgccgcctgctggtgccttgtaaaggtatactcgttacaggccctagaggttctaatggtccagggttaagtgagaggagactgtactttgtttcaaaggatccttcaccctgatctgcagtgaggtggatagatcacctggagtccctcgtctgtggtcttggaggcttaaattgtaaaatacatcccttatggaatcctaaattcctctaggtgtttttggaaggcgcatttgagccttgtgagctaaaatggaatggatttaatatttcctatctggcatttccatcttgcccctggtacacaagtcactggcctggaactcagccttgattcactgtccgtcttcacggattagctgtgctgttatgttgtctgtgctgcagattggcccatgtgggaagtcgggggggacctgatttcctgcttggaagacttgggggactgccgagcatatcaaagtgtttatagtcaccaagtgaactgcagcacaaccatctcctctccagcaagccctgaagtcagtagtgcctgcaggtgaaaccaaccagccctgtgttagaggaggaaaagcggagatgacatggaagtctccaagcctgtgccatccacctgccaaggaaaagcacaaggtgctatctacttttctctctaggatttagattatcatttattgtgctgtgggaatgcctctgtattttttcccctctttggccatctttttctgaaaataaagtgatggatcctctagccaa

SEQ ID NO: 447806 - DNA, 5229 bp, Homo sapiens
ggtgccttctaattctaattcttcccatttctgggtgtgtacttagtctctctgagccacagttttctgctctataaagtggggtgataatgctcagtacacggtttgctttggctcgatgagaaatccaggtctgaaagcttcaggtacagcggccggcgctgaggaaaacagcgttaagtgaggcgcgtcagcggacaccacctgcctgcacatctggctggcctcaacttcccgctgttcgagcccacgtgagtggctccgccccatctggcttctgaccaatggacgagcttcctaaggcgtaccgtcccgactccaaggcgcctggctttgaggcgggctgcgtcttgctcggagtcccgccccttgccgggtcgagcaatgggcgccttccgtttggcgcaggccccgcccctgtcgctctccggcctgcgggccgcagggctcgttccggagggcgggcgccacggaggccggagtggtcgcagttcgggcggaggccgggccaggcggggctgtagggctggggcaggcggcgggctgcccggcgggacagctgcggcagccggcggggggcgtcctgagttggcggtcgagggcgctgccagctcccgaggggccgctcgggccccttccggcccgggtctggttgggccgcaggagcagggcgggctgcggcgcccgggtctggccctggcctacgggctaagcgcccggccccggggccgcggatccggcagccatgtgtggatcttgaagcgccatgtggtcttctgaagcgctttgacagttctaaagggctttatattgcaaactgatcaaagcgcttcgtagccccggaagcgcttaggcatctccgaagtagcgctgggcaaagtgaaggcttcctgatctcagaagcacgttgtgggcttggaaaccgacggcagcctttagtcaattttggatcgctttgacttctccaacacggtttggcatctctgaaaccttgagaagtgcccatggcgtccgagcggggcaaggtcaagcacaactggagcagcacgtcggaagggtgtccccgcaagcgcagctgcctccgggagccctgtgatgtggccccctccagccggccagctcagaggtctgcgtcgcgttctggagggcccagcagccccaagcgcctgaaagcccagaaggaggacgatgtggcttgctcgcggaggttatcctggggctcatcccgccgcagaaataactcctcctcctccttctccccacatttcttgggccctggtgtgggcggggccgcctccaaaggctgcctgattcggaacactcgggggttcctgtcttcagggggatcccctctgcgtcctgccaacgcctctttggaagaaatggcttctctagaggaggaagcctgcagccttaaggttgattccaaagatagttctcataactccacaaactctgaatttgcagctgaagctgagggtcagaatgatacaattgaggaacccaacaaggtccagaaaaggaagagggatagacttcgagaccagggctccacaatgatctacctgaaggctatccagggcatcctggggaaatcgatgccaaaaaggaagggagaggctgccactcgggcaaaaccaagcgcagcagagcatcccagccatggagaaggaccagccaggagtgaaggaccagccaagactgcagaaggagcagccaggagtgtcacagtcactgctgctcagaaggagaaagacgcaaccccagaggtcagcatggaggaggataagacagtgccagagaggagcagcttctatgacaggagagtagttatagaccctcaagagaaacccagtgaggagccccttggggaccgaaggactgtcattgacaaatgctctccacccctagagttcttggatgactctgactctcatttagaaatccaaaagcataaagatagggaggtggtgatggagcacccctcttctggaagtgactggtctgatgttgaggagatctccacagtcagattctctcaggaggaacctgtctccctgaaaccttcagccgttccggagccttcttccttcaccaccgactatgtcatgtaccctcctcatttgtacagtagtccttggtgtgactacgccagctattggaccagcagccccaagccttctagctacccctccacaggcagcagcagcaacgatgcagcccaggttgggaagagcagccggagccgcatgagtgattattcccccaactctacagggagtgtccaaaacacctccagagacatggaggcctcagaggaaggctggtcccagaattctcgttcatttcgcttctccagaagctcagaagaaagagaggtgaaggagaaaagaacattccaagaggagatgcctccgcgtccttgtggaggacacgcatccagctccctgccaaagagccacctggagccaagcctagaggagggcttcattgacactcattgtcacctggacatgctctattccaagctatctttccaagggacctttacaaagttcagaaaaatttacagcagctccttccctaaggaatttcagggctgcatctctgacttctgtgatccccgcaccctgacagattgcctatgggaggagctgttgaaagaggatctggtctggggggcctttggctgtcaccctcattttgcacgttactacagtgagagtcaagaaagaaatcttttgcaagccttaaggcaccctaaggctgtggcatttggagaaatgggcttggattactcttacaagtgcaccacgcctgtcccagaacagcacaaggtatttgagagacagctgcagctggctgtgtctctaaagaagcccttggtgatccactgccgagaagctgatgaagatctgctagaaatcatgaaaaagtttgtgccccctgactacaagatccataggcattgcttcaccggcagctacccggtcattgagcccctgctgaagtactttcccaacatgtctgtgggcttcacggcagtgctgacatactcctctgcctgggaggcccgggaagccttgaggcagatcccactggagagaatcatcgtggaaacggatgctccctatttcctccctcgccaggttcccaaaagcctttgccagtatgcccacccgggcctggccttgcatacggtccgagagattgccagagtcaaagatcagccactctccctcaccttggctgccttgcgtgagaacaccagtcgcctctacagtctttaagcagagaagggcgaccagcagcctgacagaacacaggctggcttgaagtctgtgtctcaggtcgaggatgtgtttagagagctgattggaacacagaaaaccaggacaggatgttttcctccaagcgggtcataaggcttcagcttctgggtggtgggtggggtggggtgggcatggaatgaggggtatggggactgcctgtaatagcactgggattttgcctcccagccaaaatgctccagggtaggcagcaaagaagaaagagtgcgatatgagggtacagtgagtttggcagtccaaattctgttctctgcagcctgtttttgagtagtttgtgaataaagtcacccgcctacttgtctaagcacatgtgggtgtgtaactcagttcctggttctcggttctaaaaacagacttccaactgggaaactttttgggggaaattaactggacacctatctcggaggtttattttcttgcaaccagtgaagtcgtcctcctcccttccctggataactcttcagtttgactgtcactgttctggtgtcaactccagcgtcggcacaggcagaaggacttcagctgctggtctcattggttccactgccattgatatgggggggtgcagaggagcactcattgtccatgatggagatccaggacagactgggggactccgggaagaggctttcttggggaagaggaccccaaaggaggtacttcctcctcactgatgccctcagggctgctgtgtgggtgtgttaagctgataaggttcagtttgcggcggaaactacctgctagtcttgtgtcaggggctgccagcctccttttgtttcacttttgcccccttcttgggaacatttgaccaaaaataatcctcatttcatcttgtgtacagtcctttgtgtaccccgcccaggttgagaggtgaatcagcgtaattctccgaagctctgctgggcagctcagccatgttacattgtctatgcagaataagcaggcctggtgtctgcaaatgtaccagtccttctcccgcatctcctgggtgcccccttggctttgcctctcctgtgtcctgtctttctgcgttttagaagtgagagcctctccttcaccttttgagcaactgagtcatctcaagtcctgagctctgctctgccgcctgctggtgccttgtaaaggtatactcgttacaggccctagaggttctaatggtccagggttaagtgagaggagactgtactttgtttcaaaggatccttcaccctgatctgcagtgaggtggatagatcacctggagtccctcgtctgtggtcttggaggcttaaattgtaaaatacatcccttatggaatcctaaattcctctaggtgtttttggaaggcgcatttgagccttgtgagctaaaatggaatggatttaatatttcctatctggcatttccatcttgcccctggtacacaagtcactggcctggaactcagccttgattcactgtccgtcttcacggattagctgtgctgttatgttgtctgtgctgcagattggcccatgtgggaagtcgggggggacctgatttcctgcttggaagacttgggggactgccgagcatatcaaagtgtttatagtcaccaagtgaactgcagcacaaccatctcctctccagcaagccctgaagtcagtagtgcctgtgccatccacctgccaaggaaaagcacaaggtgctatctacttttctctctaggatttagattatcatttatgtgctgttgcacagtgaaacctcacctgtgtgggcgtgaaagctgattggcattgtttttgattcagctttttggatggctaattgttttcactgtgctgtgggaatgcctctgtattttttcccctctttggccatctttttctgaaaataaagtgatggatcctctagccaa

SEQ ID NO: 447807 - DNA, 3456 bp, Homo sapiens
ggtgccttctaattctaattcttcccatttctgggtgtgtacttagtctctctgagccacagttttctgctctataaagtggggtgataatgctcagtacacggtttgctttggctcgatgagaaatccaggtctgaaagcttcaggtacagcggccggcgctgaggaaaacagcgttaagtgaggcgcgtcagcggacaccacctgcctgcacatctggctggcctcaacttcccgctgttcgagcccacgtgagtggctccgccccatctggcttctgaccaatggacgagcttcctaaggcgtaccgtcccgactccaaggcgcctggctttgaggcgggctgcgtcttgctcggagtcccgccccttgccgggtcgagcaatgggcgccttccgtttggcgcaggccccgcccctgtcgctctccggcctgcgggccgcagggctcgttccggagggcgggcgccacggaggccggagtggtcgcagttcgggcggaggccgggccaggcggggctgtagggctggggcaggcggcgggctgcccggcgggacagctgcggcagccggcggggggcgtcctgagttggcggtcgagggcgctgccagctcccgaggggccgctcgggccccttccggcccgggtctggttgggccgcaggagcagggcgggctgcggcgcccgggtctggccctggcctacgggctaagcgcccggccccggggccgcggatccggcagccatgtgtggatcttgaagcgccatgtggtcttctgaagcgctttgacagttctaaagggctttatattgcaaactgatcaaagcgcttcgtagccccggaagcgcttaggcatctccgaagtagcgctgggcaaagtgaaggcttcctgatctcagaagcacgttgtgggcttggaaaccgacggcagcctttagtcaattttggatcgctttgacttctccaacacggtttggcatctctgaaaccttgagaagtgcccatggcgtccgagcggggcaaggtcaagcacaactggagcagcacgtcggaagggtgtccccgcaagcgcagctgcctccgggagccctgtgatgtggccccctccagccggccagctcagaggtctgcgtcgcgttctggagggcccagcagccccaagcgcctgaaagcccagaaggaggacgatgtggcttgctcgcggaggttatcctggggctcatcccgccgcagaaataactcctcctcctccttctccccacatttcttgggccctggtgtgggcggggccgcctccaaaggctgcctgattcggaacactcgggggttcctgtcttcagggggatcccctctgcgtcctgccaacgcctctttggaagaaatggcttctctagaggaggaagcctgcagccttaaggttgattccaaagatagttctcataactccacaaactctgaatttgcagctgaagctgagggtcagaatgatacaattgaggaacccaacaaggtccagaaaaggaagagggatagacttcgagaccagggctccacaatgatctacctgaaggctatccagggcatcctggggaaatcgatgccaaaaaggaagggagaggctgccactcgggcaaaaccaagcgcagcagagcatcccagccatggagaaggaccagccaggagtgaaggaccagccaagactgcagaaggagcagccaggagtgtcacagtcactgctgctcagaaggagaaagacgcaaccccagaggtcagcatggaggaggataagacagtgccagagaggagcagcttctatgacaggagagtagttatagaccctcaagagaaacccagtgaggagccccttggggaccgaaggactgtcattgacaaatgctctccacccctagagttcttggatgactctgactctcatttagaaatccaaaagcataaagatagggaggtggtgatggagcacccctcttctggaagtgactggtctgatgttgaggagatctccacagtcagattctctcaggaggaacctgtctccctgaaaccttcagccgttccggagccttcttccttcaccaccgactatgtcatgtaccctcctcatttgtacagtagtccttggtgtgactacgccagctattggaccagcagccccaagccttctagctacccctccacaggcagcagcagcaacgatgcagcccaggttgggaagagcagccggagccgcatgagtgattattcccccaactctacagggagtgtccaaaacacctccagagacatggaggcctcagaggaaggctggtcccagaattctcgttcatttcgcttctccagaagctcagaagaaagagaggtgaaggagaaaagaacattccaagaggagatgcctccgcgtccttgtggaggacacgcatccagctccctgccaaagagccacctggagccaagcctagaggagggcttcattgacactcattgtcacctggacatgctctattccaagctatctttccaagggacctttacaaagttcagaaaaatttacagcagctccttccctaaggaatttcagggctgcatctctgacttctgtgatccccgcaccctgacagattgcctatgggaggagctgttgaaagaggatctggtctggggggcctttggctgtcaccctcattttgcacgttactacagtgagagtcaagaaagaaatcttttgcaagccttaaggcaccctaaggctgtggcatttggagaaatgggcttggattactcttacaagtgcaccacgcctgtcccagaacagcacaaggtatttgagagacagctgcagctggctgtgtctctaaagaagcccttggtgatccactgccgagaagctgatgaagatctgctagaaatcatgaaaaagtttgtgccccctgactacaagatccataggcattgcttcaccggcagctacccggtcattgagcccctgctgaagtactttcccaacatgtctgtgggcttcacggcagtgctgacatactcctctgcctgggaggcccgggaagccttgaggcagatcccactggagagaatcatcgtggaaacggatgctccctatttcctccctcgccaggttcccaaaagcctttgccagtatgcccacccgggcctggccttgcatacggtccgagagattgccagagtcaaagatcagccactctccctcaccttggctgccttgcgtgagaacaccagtcgcctctacagtctttaagcagagaaggtacagtcctcgggagtctcctagaaaaggtcgtaaaactcacattctgtattttttaaaaaccaggacaagtcttttgttgcattttgttaatgtaaagaatataaacatagtatgagcattaagcctgatttgttttgagtgacatggtttggaa

SEQ ID NO: 447808 - DNA, 341 bp, Homo sapiens
gaaaagcacaaggtgctatctacttttctctctaggatttagattatcatttatgtgctgttgcacagtgaaacctcacctgtgtgggcgtgaaagctgattggcattgtttttgattcagctttttggatggctaattgttttcactgtgctgtgggaatgcctctgtattttttcccctctttggccatctttttctgaaaataaagtgatggatcctctagccaacccagtctctccgtgtttgtatagacttacctgagtgatgcagtggtttagtctggttgttggccagcattgtaacccaagaatccaggtagctggagactttttttctttct

SEQ ID NO: 447809 - DNA, 5186 bp, Homo sapiens
ggtgccttctaattctaattcttcccatttctgggtgtgtacttagtctctctgagccacagttttctgctctataaagtggggtgataatgctcagtacacggtttgctttggctcgatgagaaatccaggtctgaaagcttcaggtacagcggccggcgctgaggaaaacagcgttaagtgaggcgcgtcagcggacaccacctgcctgcacatctggctggcctcaacttcccgctgttcgagcccacgtgagtggctccgccccatctggcttctgaccaatggacgagcttcctaaggcgtaccgtcccgactccaaggcgcctggctttgaggcgggctgcgtcttgctcggagtcccgccccttgccgggtcgagcaatgggcgccttccgtttggcgcaggccccgcccctgtcgctctccggcctgcgggccgcagggctcgttccggagggcgggcgccacggaggccggagtggtcgcagttcgggcggaggccgggccaggcggggctgtagggctggggcaggcggcgcccgggtctggccctggcctacgggctaagcgcccggccccggggccgcggatccggcagccatgtgtggatcttgaagcgccatgtggtcttctgaagcgctttgacagttctaaagggctttatattgcaaactgatcaaagcgcttcgtagccccggaagcgcttaggcatctccgaagtagcgctgggcaaagtgaaggcttcctgatctcagaagcacgttgtgggcttggaaaccgacggcagcctttagtcaattttggatcgctttgacttctccaacacggtttggcatctctgaaaccttgagaactgtgatgggcagtggaaagaagagggaaaggtgcccatggcgtccgagcggggcaaggtcaagcacaactggagcagcacgtcggaagggtgtccccgcaagcgcagctgcctccgggagccctgtgatgtggccccctccagccggccagctcagaggtctgcgtcgcgttctggagggcccagcagccccaagcgcctgaaagcccagaaggaggacgatgtggcttgctcgcggaggttatcctggggctcatcccgccgcagaaataactcctcctcctccttctccccacatttcttgggccctggtgtgggcggggccgcctccaaaggctgcctgattcggaacactcgggggttcctgtcttcagggggatcccctctgcgtcctgccaacgcctctttggaagaaatggcttctctagaggaggaagcctgcagccttaaggttgattccaaagatagttctcataactccacaaactctgaatttgcagctgaagctgagggtcagaatgatacaattgaggaacccaacaaggtccagaaaaggaagagggatagacttcgagaccagggctccacaatgatctacctgaaggctatccagggcatcctggggaaatcgatgccaaaaaggaagggagaggctgccactcgggcaaaaccaagcgcagcagagcatcccagccatggagaaggaccagccaggagtgaaggaccagccaagactgcagaaggagcagccaggagtgtcacagtcactgctgctcagaaggagaaagacgcaaccccagaggtcagcatggaggaggataagacagtgccagagaggagcagcttctatgacaggagagtagttatagaccctcaagagaaacccagtgaggagccccttggggaccgaaggactgtcattgacaaatgctctccacccctagagttcttggatgactctgactctcatttagaaatccaaaagcataaagatagggaggtggtgatggagcacccctcttctggaagtgactggtctgatgttgaggagatctccacagtcagattctctcaggaggaacctgtctccctgaaaccttcagccgttccggagccttcttccttcaccaccgactatgtcatgtaccctcctcatttgtacagtagtccttggtgtgactacgccagctattggaccagcagccccaagccttctagctacccctccacaggcagcagcagcaacgatgcagcccaggttgggaagagcagccggagccgcatgagtgattattcccccaactctacagggagtgtccaaaacacctccagagacatggaggcctcagaggaaggctggtcccagaattctcgttcatttcgcttctccagaagctcagaagaaagagaggtgaaggagaaaagaacattccaagaggagatgcctccgcgtccttgtggaggacacgcatccagctccctgccaaagagccacctggagccaagcctagaggagggcttcattgacactcattgtcacctggacatgctctattccaagctatctttccaagggacctttacaaagttcagaaaaatttacagcagctccttccctaaggaatttcagggctgcatctctgacttctgtgatccccgcaccctgacagattgcctatgggaggagctgttgaaagaggatctggtctggggggcctttggctgtcaccctcattttgcacgttactacagtgagagtcaagaaagaaatcttttgcaagccttaaggcaccctaaggctgtggcatttggagaaatgggcttggattactcttacaagtgcaccacgcctgtcccagaacagcacaaggtatttgagagacagctgcagctggctgtgtctctaaagaagcccttggtgatccactgccgagaagctgatgaagatctgctagaaatcatgaaaaagtttgtgccccctgactacaagatccataggcattgcttcaccggcagctacccggtcattgagcccctgctgaagtactttcccaacatgtctgtgggcttcacggcagtgctgacatactcctctgcctgggaggcccgggaagccttgaggcagatcccactggagagaatcatcgtggaaacggatgctccctatttcctccctcgccaggttcccaaaagcctttgccagtatgcccacccgggcctggccttgcatacggtccgagagattgccagagtcaaagatcagccactctccctcaccttggctgccttgcgtgagaacaccagtcgcctctacagtctttaagcagagaagggcgaccagcagcctgacagaacacaggctggcttgaagtctgtgtctcaggtcgaggatgtgtttagagagctgattggaacacagaaaaccaggacaggatgttttcctccaagcgggtcataaggcttcagcttctgggtggtgggtggggtggggtgggcatggaatgaggggtatggggactgcctgtaatagcactgggattttgcctcccagccaaaatgctccagggtaggcagcaaagaagaaagagtgcgatatgagggtacagtgagtttggcagtccaaattctgttctctgcagcctgtttttgagtagtttgtgaataaagtcacccgcctacttgtctaagcacatgtgggtgtgtaactcagttcctggttctcggttctaaaaacagacttccaactgggaaactttttgggggaaattaactggacacctatctcggaggtttattttcttgcaaccagtgaagtcgtcctcctcccttccctggataactcttcagtttgactgtcactgttctggtgtcaactccagcgtcggcacaggcagaaggacttcagctgctggtctcattggttccactgccattgatatgggggggtgcagaggagcactcattgtccatgatggagatccaggacagactgggggactccgggaagaggctttcttggggaagaggaccccaaaggaggtacttcctcctcactgatgccctcagggctgctgtgtgggtgtgttaagctgataaggttcagtttgcggcggaaactacctgctagtcttgtgtcaggggctgccagcctccttttgtttcacttttgcccccttcttgggaacatttgaccaaaaataatcctcatttcatcttgtgtacagtcctttgtgtaccccgcccaggttgagaggtgaatcagcgtaattctccgaagctctgctgggcagctcagccatgttacattgtctatgcagaataagcaggcctggtgtctgcaaatgtaccagtccttctcccgcatctcctgggtgcccccttggctttgcctctcctgtgtcctgtctttctgcgttttagaagtgagagcctctccttcaccttttgagcaactgagtcatctcaagtcctgagctctgctctgccgcctgctggtgccttgtaaaggtatactcgttacaggccctagaggttctaatggtccagggttaagtgagaggagactgtactttgtttcaaaggatccttcaccctgatctgcagtgaggtggatagatcacctggagtccctcgtctgtggtcttggaggcttaaattgtaaaatacatcccttatggaatcctaaattcctctaggtgtttttggaaggcgcatttgagccttgtgagctaaaatggaatggatttaatatttcctatctggcatttccatcttgcccctggtacacaagtcactggcctggaactcagccttgattcactgtccgtcttcacggattagctgtgctgttatgttgtctgtgctgcagattggcccatgtgggaagtcgggggggacctgatttcctgcttggaagacttgggggactgccgagcatatcaaagtgtttatagtcaccaagtgaactgcagcacaaccatctcctctccagcaagccctgaagtcagtagtgcctgcaggtgaaaccaaccagccctgtgttagaggaggaaaagcggagatgacatggaagtctccaagcctgtgccatccacctgccaaggaaaagcacaaggtgctatctacttttctctctaggatttagattatcatttatgtgctgttgcacagtgaaacctcacctgtgtgggcgtgaaagctgattggcattgtttttgattcagctttttggatggctaattgttttcactgtgctgtgggaatgcctctgtattttttcccctctttggccatctttttctgaaaataaagtgatggatcctctagccaa

SEQ ID NO: 447810 - DNA, 4978 bp, Homo sapiens
ggtgccttctaattctaattcttcccatttctgggtgtgtacttagtctctctgagccacagttttctgctctataaagtggggtgataatgctcagtacacggtttgctttggctcgatgagaaatccaggtctgaaagcttcaggtacagcggccggcgctgaggaaaacagcgttaagtgaggcgcgtcagcggacaccacctgcctgcacatctggctggcctcaacttcccgctgttcgagcccacgtgagtggctccgccccatctggcttctgaccaatggacgagcttcctaaggcgtaccgtcccgactccaaggcgcctggctttgaggcgggctgcgtcttgctcggagtcccgccccttgccgggtcgagcaatgggcgccttccgtttggcgcaggccccgcccctgtcgctctccggcctgcgggccgcagggctcgttccggagggcgggcgccacggaggccggagtggtcgcagttcgggcggaggccgggccaggcggggctgtagggctggggcaggcggcgggctgcccggcgggacagctgcggcagccggcggggggcgtcctgagttggcggtcgagggcgctgccagctcccgaggggccgctcgggccccttccggcccgggtctggttgggccgcaggagcagggcgggctgcggcgcccgggtctggccctggcctacgggctaagcgcccggccccggggccgcggatccggcagccatgtgtggatcttgaagcgccatgtggtcttctgaagcgctttgacagttctaaagggctttatattgcaaactgatcaaagcgcttcgtagccccggaagcgcttaggcatctccgaagtagcgctgggcaaagtgaaggcttcctgatctcagaagcacgttgtgggcttggaaaccgacggcagcctttagtcaattttggatcgctttgacttctccaacacggtttggcatctctgaaaccttgagaagtgcccatggcgtccgagcggggcaaggtcaagcacaactggagcagcacgtcggaagggtgtccccgcaagcgcagctgcctccgggagccctgtgatgtggccccctccagccggccagctcagaggtctgcgtcgcgttctggagggcccagcagccccaagcgcctgaaagcccagaaggaggacgatgtggcttgctcgcggaggttatcctggggctcatcccgccgcagaaataactcctcctcctccttctccccacatttcttgggccctggtgtgggcggggccgcctccaaaggctgcctgattcggaacactcgggggttcctgtcttcagggggatcccctctgcgtcctgccaacgcctctttggaagaaatggcttctctagaggaggaagcctgcagccttaaggttgattccaaagatagttctcataactccacaaactctgaatttgcagctgaagctgagggtcagaatgatacaattgaggaacccaacaaggtccagaaaaggaagagaaacccagtgaggagccccttggggaccgaaggactgtcattgacaaatgctctccacccctagagttcttggatgactctgactctcatttagaaatccaaaagcataaagatagggaggtggtgatggagcacccctcttctggaagtgactggtctgatgttgaggagatctccacagtcagattctctcaggaggaacctgtctccctgaaaccttcagccgttccggagccttcttccttcaccaccgactatgtcatgtaccctcctcatttgtacagtagtccttggtgtgactacgccagctattggaccagcagccccaagccttctagctacccctccacaggcagcagcagcaacgatgcagcccaggttgggaagagcagccggagccgcatgagtgattattcccccaactctacagggagtgtccaaaacacctccagagacatggaggcctcagaggaaggctggtcccagaattctcgttcatttcgcttctccagaagctcagaagaaagagaggtgaaggagaaaagaacattccaagaggagatgcctccgcgtccttgtggaggacacgcatccagctccctgccaaagagccacctggagccaagcctagaggagggcttcattgacactcattgtcacctggacatgctctattccaagctatctttccaagggacctttacaaagttcagaaaaatttacagcagctccttccctaaggaatttcagggctgcatctctgacttctgtgatccccgcaccctgacagattgcctatgggaggagctgttgaaagaggatctggtctggggggcctttggctgtcaccctcattttgcacgttactacagtgagagtcaagaaagaaatcttttgcaagccttaaggcaccctaaggctgtggcatttggagaaatgggcttggattactcttacaagtgcaccacgcctgtcccagaacagcacaaggtatttgagagacagctgcagctggctgtgtctctaaagaagcccttggtgatccactgccgagaagctgatgaagatctgctagaaatcatgaaaaagtttgtgccccctgactacaagatccataggcattgcttcaccggcagctacccggtcattgagcccctgctgaagtactttcccaacatgtctgtgggcttcacggcagtgctgacatactcctctgcctgggaggcccgggaagccttgaggcagatcccactggagagaatcatcgtggaaacggatgctccctatttcctccctcgccaggttcccaaaagcctttgccagtatgcccacccgggcctggccttgcatacggtccgagagattgccagagtcaaagatcagccactctccctcaccttggctgccttgcgtgagaacaccagtcgcctctacagtctttaagcagagaagggcgaccagcagcctgacagaacacaggctggcttgaagtctgtgtctcaggtcgaggatgtgtttagagagctgattggaacacagaaaaccaggacaggatgttttcctccaagcgggtcataaggcttcagcttctgggtggtgggtggggtggggtgggcatggaatgaggggtatggggactgcctgtaatagcactgggattttgcctcccagccaaaatgctccagggtaggcagcaaagaagaaagagtgcgatatgagggtacagtgagtttggcagtccaaattctgttctctgcagcctgtttttgagtagtttgtgaataaagtcacccgcctacttgtctaagcacatgtgggtgtgtaactcagttcctggttctcggttctaaaaacagacttccaactgggaaactttttgggggaaattaactggacacctatctcggaggtttattttcttgcaaccagtgaagtcgtcctcctcccttccctggataactcttcagtttgactgtcactgttctggtgtcaactccagcgtcggcacaggcagaaggacttcagctgctggtctcattggttccactgccattgatatgggggggtgcagaggagcactcattgtccatgatggagatccaggacagactgggggactccgggaagaggctttcttggggaagaggaccccaaaggaggtacttcctcctcactgatgccctcagggctgctgtgtgggtgtgttaagctgataaggttcagtttgcggcggaaactacctgctagtcttgtgtcaggggctgccagcctccttttgtttcacttttgcccccttcttgggaacatttgaccaaaaataatcctcatttcatcttgtgtacagtcctttgtgtaccccgcccaggttgagaggtgaatcagcgtaattctccgaagctctgctgggcagctcagccatgttacattgtctatgcagaataagcaggcctggtgtctgcaaatgtaccagtccttctcccgcatctcctgggtgcccccttggctttgcctctcctgtgtcctgtctttctgcgttttagaagtgagagcctctccttcaccttttgagcaactgagtcatctcaagtcctgagctctgctctgccgcctgctggtgccttgtaaaggtatactcgttacaggccctagaggttctaatggtccagggttaagtgagaggagactgtactttgtttcaaaggatccttcaccctgatctgcagtgaggtggatagatcacctggagtccctcgtctgtggtcttggaggcttaaattgtaaaatacatcccttatggaatcctaaattcctctaggtgtttttggaaggcgcatttgagccttgtgagctaaaatggaatggatttaatatttcctatctggcatttccatcttgcccctggtacacaagtcactggcctggaactcagccttgattcactgtccgtcttcacggattagctgtgctgttatgttgtctgtgctgcagattggcccatgtgggaagtcgggggggacctgatttcctgcttggaagacttgggggactgccgagcatatcaaagtgtttatagtcaccaagtgaactgcagcacaaccatctcctctccagcaagccctgaagtcagtagtgcctgcaggtgaaaccaaccagccctgtgttagaggaggaaaagcggagatgacatggaagtctccaagcctgtgccatccacctgccaaggaaaagcacaaggtgctatctacttttctctctaggatttagattatcatttatgtgctgttgcacagtgaaacctcacctgtgtgggcgtgaaagctgattggcattgtttttgattcagctttttggatggctaattgttttcactgtgctgtgggaatgcctctgtattttttcccctctttggccatctttttctgaaaataaagtgatggatcctctagccaa

SEQ ID NO: 447811 - DNA, 5328 bp, Homo sapiens
  misc_feature (737)..(738): n is a, c, g, or t
  misc_feature (745)..(745): n is a, c, g, or t
  misc_feature (759)..(759): n is a, c, g, or t
ggtgccttctaattctaattcttcccatttctgggtgtgtacttagtctctctgagccacagttttctgctctataaagtggggtgataatgctcagtacacggtttgctttggctcgatgagaaatccaggtctgaaagcttcaggtacagcggccggcgctgaggaaaacagcgttaagtgaggcgcgtcagcggacaccacctgcctgcacatctggctggcctcaacttcccgctgttcgagcccacgtgagtggctccgccccatctggcttctgaccaatggacgagcttcctaaggcgtaccgtcccgactccaaggcgcctggctttgaggcgggctgcgtcttgctcggagtcccgccccttgccgggtcgagcaatgggcgccttccgtttggcgcaggccccgcccctgtcgctctccggcctgcgggccgcagggctcgttccggagggcgggcgccacggaggccggagtggtcgcagttcgggcggaggccgggccaggcggggctgtagggctggggcaggcggcgggctgcccggcgggacagctgcggcagccggcggggggcgtcctgagttggcggtcgagggcgctgccagctcccgaggggccgctcgggccccttccggcccgggtctggttgggccgcaggagcagggcgggctgcggcgcccgggtctggccctggcctacgggctaagcgcccggccccggggccgcggatnnaacaacnattttttaattttnaaacacaatttttttttttaaaacactttaaaatttttaaaaagttttatattttaaaataattaaaaaactttttaacacaaaaataacttaagcatctccgaagtagcgctgggcaaagtgaaggcttcctgatctcagaagcacgttgtgggcttggaaaccgacggcagcctttagtcaattttggatcgctttgacttctccaacacggtttggcatctctgaaaccttgagaactgtgatgggcagtggaaagaagagggaaaggtgcccatggcgtccgagcggggcaaggtcaagcacaactggagcagcacgtcggaagggtgtccccgcaagcgcagctgcctccgggagccctgtgatgtggccccctccagccggccagctcagaggtctgcgtcgcgttctggagggcccagcagccccaagcgcctgaaagcccagaaggaggacgatgtggcttgctcgcggaggttatcctggggctcatcccgccgcagaaataactcctcctcctccttctccccacatttcttgggccctggtgtgggcggggccgcctccaaaggctgcctgattcggaacactcgggggttcctgtcttcagggggatcccctctgcgtcctgccaacgcctctttggaagaaatggcttctctagaggaggaagcctgcagccttaaggttgattccaaagatagttctcataactccacaaactctgaatttgcagctgaagctgagggtcagaatgatacaattgaggaacccaacaaggtccagaaaaggaagagggatagacttcgagaccagggctccacaatgatctacctgaaggctatccagggcatcctggggaaatcgatgccaaaaaggaagggagaggctgccactcgggcaaaaccaagcgcagcagagcatcccagccatggagaaggaccagccaggagtgaaggaccagccaagactgcagaaggagcagccaggagtgtcacagtcactgctgctcagaaggagaaagacgcaaccccagaggtcagcatggaggaggataagacagtgccagagaggagcagcttctatgacaggagagtagttatagaccctcaagagaaacccagtgaggagccccttggggaccgaaggactgtcattgacaaatgctctccacccctagagttcttggatgactctgactctcatttagaaatccaaaagcataaagatagggaggtggtgatggagcacccctcttctggaagtgactggtctgatgttgaggagatctccacagtcagattctctcaggaggaacctgtctccctgaaaccttcagccgttccggagccttcttccttcaccaccgactatgtcatgtaccctcctcatttgtacagtagtccttggtgtgactacgccagctattggaccagcagccccaagccttctagctacccctccacaggcagcagcagcaacgatgcagcccaggttgggaagagcagccggagccgcatgagtgattattcccccaactctacagggagtgtccaaaacacctccagagacatggaggcctcagaggaaggctggtcccagaattctcgttcatttcgcttctccagaagctcagaagaaagagaggtgaaggagaaaagaacattccaagaggagatgcctccgcgtccttgtggaggacacgcatccagctccctgccaaagagccacctggagccaagcctagaggagggcttcattgacactcattgtcacctggacatgctctattccaagctatctttccaagggacctttacaaagttcagaaaaatttacagcagctccttccctaaggaatttcagggctgcatctctgacttctgtgatccccgcaccctgacagattgcctatgggaggagctgttgaaagaggatctggtctggggggcctttggctgtcaccctcattttgcacgttactacagtgagagtcaagaaagaaatcttttgcaagccttaaggcaccctaaggctgtggcatttggagaaatgggcttggattactcttacaagtgcaccacgcctgtcccagaacagcacaaggtatttgagagacagctgcagctggctgtgtctctaaagaagcccttggtgatccactgccgagaagctgatgaagatctgctagaaatcatgaaaaagtttgtgccccctgactacaagatccataggcattgcttcaccggcagctacccggtcattgagcccctgctgaagtactttcccaacatgtctgtgggcttcacggcagtgctgacatactcctctgcctgggaggcccgggaagccttgaggcagatcccactggagagaatcatcgtggaaacggatgctccctatttcctccctcgccaggttcccaaaagcctttgccagtatgcccacccgggcctggccttgcatacggtccgagagattgccagagtcaaagatcagccactctccctcaccttggctgccttgcgtgagaacaccagtcgcctctacagtctttaagcagagaagggcgaccagcagcctgacagaacacaggctggcttgaagtctgtgtctcaggtcgaggatgtgtttagagagctgattggaacacagaaaaccaggacaggatgttttcctccaagcgggtcataaggcttcagcttctgggtggtgggtggggtggggtgggcatggaatgaggggtatggggactgcctgtaatagcactgggattttgcctcccagccaaaatgctccagggtaggcagcaaagaagaaagagtgcgatatgagggtacagtgagtttggcagtccaaattctgttctctgcagcctgtttttgagtagtttgtgaataaagtcacccgcctacttgtctaagcacatgtgggtgtgtaactcagttcctggttctcggttctaaaaacagacttccaactgggaaactttttgggggaaattaactggacacctatctcggaggtttattttcttgcaaccagtgaagtcgtcctcctcccttccctggataactcttcagtttgactgtcactgttctggtgtcaactccagcgtcggcacaggcagaaggacttcagctgctggtctcattggttccactgccattgatatgggggggtgcagaggagcactcattgtccatgatggagatccaggacagactgggggactccgggaagaggctttcttggggaagaggaccccaaaggaggtacttcctcctcactgatgccctcagggctgctgtgtgggtgtgttaagctgataaggttcagtttgcggcggaaactacctgctagtcttgtgtcaggggctgccagcctccttttgtttcacttttgcccccttcttgggaacatttgaccaaaaataatcctcatttcatcttgtgtacagtcctttgtgtaccccgcccaggttgagaggtgaatcagcgtaattctccgaagctctgctgggcagctcagccatgttacattgtctatgcagaataagcaggcctggtgtctgcaaatgtaccagtccttctcccgcatctcctgggtgcccccttggctttgcctctcctgtgtcctgtctttctgcgttttagaagtgagagcctctccttcaccttttgagcaactgagtcatctcaagtcctgagctctgctctgccgcctgctggtgccttgtaaaggtatactcgttacaggccctagaggttctaatggtccagggttaagtgagaggagactgtactttgtttcaaaggatccttcaccctgatctgcagtgaggtggatagatcacctggagtccctcgtctgtggtcttggaggcttaaattgtaaaatacatcccttatggaatcctaaattcctctaggtgtttttggaaggcgcatttgagccttgtgagctaaaatggaatggatttaatatttcctatctggcatttccatcttgcccctggtacacaagtcactggcctggaactcagccttgattcactgtccgtcttcacggattagctgtgctgttatgttgtctgtgctgcagattggcccatgtgggaagtcgggggggacctgatttcctgcttggaagacttgggggactgccgagcatatcaaagtgtttatagtcaccaagtgaactgcagcacaaccatctcctctccagcaagccctgaagtcagtagtgcctgcaggtgaaaccaaccagccctgtgttagaggaggaaaagcggagatgacatggaagtctccaagcctgtgccatccacctgccaaggaaaagcacaaggtgctatctacttttctctctaggatttagattatcatttatgtgctgttgcacagtgaaacctcacctgtgtgggcgtgaaagctgattggcattgtttttgattcagctttttggatggctaattgttttcactgtgctgtgggaatgcctctgtattttttcccctctttggccatctttttctgaaaataaagtgatggatcctctagccaa

SEQ ID NO: 447812 - DNA, 2909 bp, Homo sapiens
ggtgccttctaattctaattcttcccatttctgggtgtgtacttagtctctctgagccacagttttctgctctataaagtggggtgataatgctcagtacacggtttgctttggctcgatgagaaatccaggtctgaaagcttcaggtacagcggccggcgctgaggaaaacagcgttaagtgaggcgcgtcagcggacaccacctgcctgcacatctggctggcctcaacttcccgctgttcgagcccacgtgagtggctccgccccatctggcttctgaccaatggacgagcttcctaaggcgtaccgtcccgactccaaggcgcctggctttgaggcgggctgcgtcttgctcggagtcccgccccttgccgggtcgagcaatgggcgccttccgtttggcgcaggccccgcccctgtcgctctccggcctgcgggccgcagggctcgttccggagggcgggcgccacggaggccggagtggtcgcagttcgggcggaggccgggccaggcggggctgtagggctggggcaggcggcgggctgcccggcgggacagctgcggcagccggcggggggcgtcctgagttggcggtcgagggcgctgccagctcccgaggggccgctcgggccccttccggcccgggtctggttgggccgcaggagcagggcgggctgcggcgcccgggtctggccctggcctacgggctaagcgcccggccccggggccgcggatccggcagccatgtgtggatcttgaagcgccatgtggtcttctgaagcgctttgacagttctaaagggctttatattgcaaactgatcaaagcgcttcgtagccccggaagcgcttaggcatctccgaagtagcgctgggcaaagtgaaggcttcctgatctcagaagcacgttgtgggcttggaaaccgacggcagcctttagtcaattttggatcgctttgacttctccaacacggtttggcatctctgaaaccttgagaagtgcccatggcgtccgagcggggcaaggtcaagcacaactggagcagcacgtcggaagggtgtccccgcaagcgcagctgcctccgggagccctgtgatgtggccccctccagccggccagctcagaggtctgcgtcgcgttctggagggcccagcagccccaagcgcctgaaagcccagaaggaggacgatgtggcttgctcgcggaggttatcctggggctcatcccgccgcagaaataactcctcctcctccttctccccacatttcttgggccctggtgtgggcggggccgcctccaaaggctgcctgattcggaacactcgggggttcctgtcttcagggggatcccctctgcgtcctgccaacgcctctttggaagaaatggcttctctagaggaggaagcctgcagccttaaggttgattccaaagatagttctcataactccacaaactctgaatttgcagctgaagctgagggtcagaatgatacaattgaggaacccaacaaggtccagaaaaggaagagggatagacttcgagaccagggctccacaatgatctacctgaaggctatccagggcatcctggggaaatcgatgccaaaaaggaagggagaggctgccactcgggcaaaaccaagcgcagcagagcatcccagccatggagaaggaccagccaggagtgaaggaccagccaagactgcagaaggagcagccaggagtgtcacagtcactgctgctcagaaggagaaagacgcaaccccagaggtcagcatggaggaggataagacagtgccagagaggagcagcttctatgacaggagagtagttatagaccctcaagagaaacccagtgaggagccccttggggaccgaaggactgtcattgacaaatgctctccacccctagagttcttggatgactctgactctcatttagaaatccaaaagcataaagatagggaggtggtgatggagcacccctcttctggaagtgactggtctgatgttgaggagatctccacagtcagattctctcaggaggaacctgtctccctgaaaccttcagccgttccggagccttcttccttcaccaccgactatgtcatgtaccctcctcatttgtacagtagtccttggtgtgactacgccagctattggaccagcagccccaagccttctagctacccctccacaggcagcagcagcaacgatgcagcccaggttgggaagagcagccggagccgcatgagtgattattcccccaactctacagggagtgtccaaaacacctccagagacatggaggcctcagaggaaggctggtcccagaattctcgttcatttcgcttctccagaagctcagaagaaagagaggtgaaggagaaaagaacattccaagaggagatgcctccgcgtccttgtggaggacacgcatccagctccctgccaaagagccacctggagccaagcctagaggagggcttcattgacactcattgtcacctggacatgctctattccaagctatctttccaagggacctttacaaagttcagaaaaatttacagcagctccttccctaaggaatttcagggctgcatctctgacttctgtgttagaggaggaaaagcggagatgacatggaagtctccaagcctgtgccatccacctgccaaggaaaagcacaaggtgctatctacttttctctctaggatttagattatcatttatgtgctgttgcacagtgaaacctcacctgtgtgggcgtgaaagctgattggcattgtttttgattcagctttttggatggctaattgttttcactgtgctgtgggaatgcctctgtattttttcccctctttggccatctttttctgaaaataaagtgatggatcctctagccaa

SEQ ID NO: 447813 - DNA, 3553 bp, Homo sapiens
ggtgccttctaattctaattcttcccatttctgggtgtgtacttagtctctctgagccacagttttctgctctataaagtggggtgataatgctcagtacacggtttgctttggctcgatgagaaatccaggtctgaaagcttcaggtacagcggccggcgctgaggaaaacagcgttaagtgaggcgcgtcagcggacaccacctgcctgcacatctggctggcctcaacttcccgctgttcgagcccacgtgagtggctccgccccatctggcttctgaccaatggacgagcttcctaaggcgtaccgtcccgactccaaggcgcctggctttgaggcgggctgcgtcttgctcggagtcccgccccttgccgggtcgagcaatgggcgccttccgtttggcgcaggccccgcccctgtcgctctccggcctgcgggccgcagggctcgttccggagggcgggcgccacggaggccggagtggtcgcagttcgggcggaggccgggccaggcggggctgtagggctggggcaggcggcgggctgcccggcgggacagctgcggcagccggcggggggcgtcctgagttggcggtcgagggcgctgccagctcccgaggggccgctcgggccccttccggcccgggtctggttgggccgcaggagcagggcgggctgcggcgcccgggtctggccctggcctacgggctaagcgcccggccccggggccgcggatccggcagccatgtgtggatcttgaagcgccatgtggtcttctgaagcgctttgacagttctaaagggctttatattgcaaactgatcaaagcgcttcgtagccccggaagcgcttaggcatctccgaagtagcgctgggcaaagtgaaggcttcctgatctcagaagcacgttgtgggcttggaaaccgacggcagcctttagtcaattttggatcgctttgacttctccaacacggtttggcatctctgaaaccttgagaagtgcccatggcgtccgagcggggcaaggtcaagcacaactggagcagcacgtcggaagggtgtccccgcaagcgcagctgcctccgggagccctgtgatgtggccccctccagccggccagctcagaggtctgcgtcgcgttctggagggcccagcagccccaagcgcctgaaagcccagaaggaggacgatgtggcttgctcgcggaggttatcctggggctcatcccgccgcagaaataactcctcctcctccttctccccacatttcttgggccctggtgtgggcggggccgcctccaaaggctgcctgattcggaacactcgggggttcctgtcttcagggggatcccctctgcgtcctgccaacgcctctttggaagaaatggcttctctagaggaggaagcctgcagccttaaggttgattccaaagatagttctcataactccacaaactctgaatttgcagctgaagctgagggtcagaatgatacaattgaggaacccaacaaggtccagaaaaggaagagggatagacttcgagaccagggctccacaatgatctacctgaaggctatccagggcatcctggggaaatcgatgccaaaaaggaagggagaggctgccactcgggcaaaaccaagcgcagcagagcatcccagccatggagaaggaccagccaggagtgaaggaccagccaagactgcagaaggagcagccaggagtgtcacagtcactgctgctcagaaggagaaagacgcaaccccagaggtcagcatggaggaggataagacagtgccagagaggagcagcttctatgacaggagagtagttatagaccctcaagagaaacccagtgaggagccccttggggaccgaaggactgtcattgacaaatgctctccacccctagagttcttggatgactctgactctcatttagaaatccaaaagcataaagatagggaggtggtgatggagcacccctcttctggaagtgactggtctgatgttgaggagatctccacagtcagattctctcaggaggaacctgtctccctgaaaccttcagccgttccggagccttcttccttcaccaccgactatgtcatgtaccctcctcatttgtacagtagtccttggtgtgactacgccagctattggaccagcagccccaagccttctagctacccctccacaggcagcagcagcaacgatgcagcccaggttgggaagagcagccggagccgcatgagtgattattcccccaactctacagggagtgtccaaaacacctccagagacatggaggcctcagaggaaggctggtcccagaattctcgttcatttcgcttctccagaagctcagaagaaagagaggtgaaggagaaaagaacattccaagaggagatgcctccgcgtccttgtggaggacacgcatccagctccctgccaaagagccacctggagccaagcctagaggagggcttcattgacactcattgtcacctggacatgctctattccaagctatctttccaagggacctttacaaagttcagaaaaatttacagcagctccttccctaaggaatttcagggctgcatctctgacttctgtgatccccgcaccctgacagattgcctatgggaggagctgttgaaagaggatctggtctggggggcctttggctgtcaccctcattttgcacgttactacagtgagagtcaagaaagaaatcttttgcaagccttaaggcaccctaaggctgtggcatttggagaaatgggcttggattactcttacaagtgcaccacgcctgtcccagaacagcacaaggtatttgagagacagctgcagctggctgtgtctctaaagaagcccttggtgatccactgccgagaagctgatgaagatctgctagaaatcatgaaaaagtttgtgccccctgactacaagatccataggcattgcttcaccggcagctacccggtcattgagcccctgctgaagtactttcccaacatgtctgtgggcttcacggcagtgctgacatactcctctgcctgggaggcccgggaagccttgaggcagatcccactggagagaatcatcgtggaaacggatgctccctatttcctccctcgccaggcagtgcaaagccctaccctgtagagggtagtccaaggaagcgtgggaccctgctcacccagagcccccatgactaggactctccctgcacctgcaggttcccaaaagcctttgccagtatgcccacccgggcctggccttgcatacggtccgagagattgccagagtcaaagatcagccactctccctcaccttggctgccttgcgtgagaacaccagtcgcctctacagtctttaagcagagaaggtacagtcctcgggagtctcctagaaaaggtcgtaaaactcacattctgtattttttaaaaaccaggacaagtcttttgttgcattttgttaatgtaaagaatataaacatagtatgagcattaagcctgatttgttttgagtgacatggtttggaa

SEQ ID NO: 447814 - DNA, 432 bp, Homo sapiens
tagtgattatttcagggtctgttaccagagcgtgtctgccgtattcactgtatctgcagcttggagcacagtagactcaaatgcttgcatgccagctcttcccctgtacagcctggattaacactgatgctagcagactcctttgcacaactgattagctttcgtaactaccacagctttcttactgctagtcattctgtgatgggattaagctaggtcttgaactccttaactccagttccttggctactactgagtacatactgaataaggcaaaattgacttacctcttttgttttgctcccctgtggtagaattctaggggtacagaccgtcggacgatctgataccatagagtttctggcgtatacactggatctggagcttggagcacaacgacacgaatgctagaatgctagcgcttcccctgta

SEQ ID NO: 447815 - DNA, 1054 bp, Homo sapiens
tcacttatagtgttttcaaggctcatccaattagaatttcattcacttttaaggctgaataatattccatgcttatgtgcaccgtgggttgtttatccagtcatcctctgatggacactcggttgcttccaccttttggatattgggtatagtgctgctatgggcctgagtgtacacatatctgggtgagttcctgctttcagttcttttgggtatgcccaaaagtggaattgttggctcatatagtaattctatttttactttcttgaggaatcactattctgttttccatggtggctgcaccactgtatactctcaccagcagtgtacaagtgttccagtttctccatatcttcaccaacacttggcctagtgaagtttgccatatttttatgtccttattggcattccttttttttttttttttgtgaaacagagtcttgctctgttgccaggctggagtgcagtggcacaatctcggctcgctgtaacctccacttcccaggttcaagtgattctcctacctcagcctcctagctactcggaaggctgaggcaggagaattgctccagcccaggagtttgaggttacagtaaggtatgatatcaccattgcatttcaacctgggcaacagaccctgtctctgaaaaaagggaaaaagaccttgtgagctgtctacgtgtactctatgtctcaggagactcatatcctgtaatttttctaaatggcgtctccatgtggtctttcatgaatgtttgtctggtattctctatccttttactttcaacttttctttaccttctactgaaattatgtcttttgtaaacagcccatgattatttatttagttatttatttttacccccctgcactatttgtcttgtaattggagtgtctgagtccattatgtttaatgtaattattgacctcattgggtttaagtctgtccattgtcatttgctgccttctaatattatctctttcttgctcaactatttttcttatgttaccttctttagatgaataaaaacctttgcattataaaaaattctaa

SEQ ID NO: 447816 - DNA, 1925 bp, Homo sapiens
ggatcacaaactgttgggagaagagtggtatcttgggcctctagctgatctgatgaatattaatatccaatgtcctgtagtgaagtcatgtgtgcgtgtaacatcacttcttcacgcagtgtcataggaaagtgggttcctggaccccaggttaagagcctaagcactaaaggcacagagctagagctctaggaggggagggatggctggggtggaacctcgtcttgtcatttagtcctggggccttttcactccttacatggtgggtggtgggcgtctggcaggtgccgatgttgatggagtcaagggagggaactagccgggacagggaaaaacagggttggagagataattaaggtggacattattttttctgagcgtaagtcgtggctggaaatctggagagcctgaaagagtatccccctacccaaacctgttttttccttttccctcaagcctcatttggccacaggcccagtgtcaacaccagggggcgccacagaccatgaaggcaccgtgcagctgggattgtttgtggtcggctactgggtccctgacttaaccaggggagccaagaccctgtagccaagtggcctggattcaacctgcagctcaggtcttactgacacttctccccctggtgcctcagtttcttaatctgtgaaatggtgaggacattacagcatttacctctggggcgggtttctcaacagcagcactattaacaatttgggacagagaatcttgtggagtggtctgtcctgtgcattgtgggaggtttgccagcaacaccccactcaccccctcccaccaatccccatgtgacaaccgaaaatgtcccaggatttttaggtctcccttgggtctagaagctgcacttaggcattttcccacctgacacttgagttcatctctgctttggtccacataaggccactttaaaaaaatgttgtttctttaaagattctaaccatcttttaaacaaatccattttcttcctctatttctgcattcagttaatccttccaaaccctttgtttagtatatcttgaaatgtatcaattcctgttctagtaattaacatatgtgacttgcatgatatctgctatgacccctagtagagctctgattcctttagcacagggaatgtgttctcgattctgctctggatgatgtaaatcaatttattttactttacttgtctgggatgttgctcctcatctgtaagatgtaaatgtggatatggcttggattactaagtggttttatttcttaattcacctgacatttgttgtgtacctgctgcaagtcaaatacatggcatggtattgtttccttgttcacaccacagcaaatgagaaaatgagacattatagccaggtgtggcggcacaggcttgtggtcctagctactcggaaggctgaggcaggagaattgctccagcccaggagtttgaggttacagtaaggtatgatatcaccattgcatttcaacctgggcaacagaccctgtctctgaaaaaagggaaaaagaccttgtgagctgtctacgtgtactctatgtctcaggagactcatatcctgtaatttttctaaatggcgtctccatgtggtctttcatgaatgtttgtctggtattctctatccttttactttcaacttttctttaccttctactgaaattatgtcttttgtaaacagcccatgattatttatttagttatttatttttacccccctgcactatttgtcttgtaattggagtgtctgagtccattatgtttaatgtaattattgacctcattgggtttaagtctgtccattgtcatttgctgccttctaatattatctctttcttgctcaactatttttcttatgttaccttctttagatgaataaaaacctttgcattataaaaaattctaa

SEQ ID NO: 447817 - DNA, 1587 bp, Homo sapiens
acaatagacactaggggctactagtagggggagaatagaaggaggctgaaggttgaaaaactgcctattgggaactatgctcactacctgggggacagaatcatttgtacaccacctctcagtgacatgccgtttacccatgtaacaaacctacacaatgtaccctctgaatctaaaataaaatttttaaaaaagaaaagatgtatttaattcgtcttcaaatttggtatgtaacttgtatgaaagaaattttaatccaagcagattttgtaatgagataatgaagaaattaaaactacaggtgacactgtgctgttgctctctgacccagtggaagtctacatatgtgtgaaaatgaatacaccttctctctccaggttgcaatggttcagttcactgatgatcccagaacagaatttaaactaaatgcttacaaaaccaaagagactcttcttgatgcaattaaacacatttcatacaaaggaggaaatacaaaaacaggtatgaccaaaagaagcccagctaaggctcaaagtaattcattatttgtaactactgaaatgaccttttattttaaggcatagtaattttttaaagattttttttttcattaatttaagaactttgttcccaccctttcttctccagaaaaacaaaaatgggagggagtgaaatcaaactgttgcctttctttgtttcaggaaaagcaattaagtatgttcgagataccttgttcactgcagagtcaggtacaagaaggggcatcccaaaggttatcgtggttataactgatggaagatcacaagatgatgtgaacaaaatctccagggagatgcaattagatggtaagatatataaacaatagtggctaccaaatatgatgttagaattgttattttctaaatacaaatttataggctatatcagcattacttaaatgttttaaaatatttcttcatattaactagacagtgtaatttttaaaatactttctggtatacaaatctgtaattgtactgctttgttagagaaaataggttattttctctaacacttttgttacatacaggatgccctttatatggaactctagcaattaagtactgtaagaaaaggaccagggaaagaatcttattacagaaactcctcagcctcttaatcatacccaaatgtccatcgatgacagactggataaagaaaatgtggcacatataagccatggaatactatgcagccataaaaaagaatgagttcatgtcctttgcagggaaatggatgaagctggaaaccatcatcctcagcaaactaacacaggaacagaaaactaaacaccacatgttctcactcataagtgggagctgaacaatgagaacacatggacacagggaggggaacatcacacacgggggcctgtcgggggtggggggcaagggagggagagcattaagacaaatacctaatgcatgcagggcttaaaacctagatgacaggttgataggtgcagtaaaccaccatggcacacgtatacctatgtaaaaaacctgcatcttcagcacgtgtatcccagaatttaaagtaaaattgtgt

SEQ ID NO: 447818 - DNA, 603 bp, Homo sapiens
ttttactcaagtgaacatgaatacagtggattaaatatagttcgaccttcaactgggaaaattgtgaatgaacttttcaaagaggcaagggaacatggggctgtccctctgaatgaagccacaagagcttcaggtgatgataaatctaagtcatttacaggtggaggatacagattgggtagttctttttgtaagcggtctgaatatatctatggagaaaatcagctgcaagatgttcagattttgcttaaactgtggagcaatggtttcagtttagatgatggagaattgagaccttacaatgaaccaacaaatgctcaatttctggagtctgttaagagaggggtgactctcattgcatgtatgcctgaaattcagcaacttatgttagaaatcttttaatgtggcattactgctggcagaagatttcaaaaggttagtttgaagttataatttgtgaaagtaaactcagatattcagtgctctcacccatccaaagaacattgtaacttaccagctcttcttgctaaaggatgaggaatcaagtgattttgctatgataataaaagcttttctgtgttatgattaaactagctgaaagtg

SEQ ID NO: 447819 - DNA, 6211 bp, Homo sapiens
  misc_feature (1862)..(1862): n is a, c, g, or t
ttctcttctccctcctgccgccttatgaacagggtgactgtttccccatcggccatgattttaagtttcctgaggcctccccagtcatgctgaactatactgttcctaagagcatctgccccagtcaacttctcatccacagatattaatctcagtcaacctccagatttttagacatattttgaaagtctttcatcaccagatttcaaaggtgttgatagatatctatttttaaacatggaaagatggtggtgcaatggccagtggctgctacaccccatgtaaaaagcggaaaataaaatgaagattttccagcgcaagatgcggtactggttgcttccaccttttttggcaattgtttatttctgcaccattgtccaaggtcaagtggctccacccacaaggttaagatataatgtaatatctcatgacagtatacagatttcatggaaggctccaagagggaaatttggtggttacaaacttcttgtgactccaacttcaggtggaaaaactaaccagctgaatctgcagaacactgcaactaaagcaattattcaaggccttatgccagaccagaattacacagttcaaattattgcatacaataaagataaagaaagcaagccagctcaaggccaattcagaattaaagatttagaaaaaagaaaggatccaaagcccagagtcaaagttgtggacagaggaaatgggagtagaccatcttcaccagaagaagtgaaatttgtctgtcaaactccagcaattgctgacattgtaatcctggtcgatggttcatggagtattggaagattcaacttcagactggttcggcatttcttggaaaacctggttacagcattcgatgtgggctcagagaagacacgaattggggtgaaaaacgcggatgtgaatgagctgcaggagatcgcctctgaaccagacagcactcatgtgtacaatgttgccgaattcgatctgatgcacacagttgtggagagtctgaccaggactctctgctctagagtggaagaacaggacagagaaattaaagcctcagcccatgccatcactgggccgcctacggagttgattacttctgaagtcactgccagaagctttatggttaactggactcatgccccaggaaatgtggaaaaatacagagttgtgtattatcctaccaggggtggaaaaccagacgaggtggtggtagatggaactgtatcttccacagtgttgaaaaacttgatgtctttaactgaatatcagatagcagtctttgcaatctatgcccacactgctagtgaaggcctacggggaactgaaactacacttgctttaccgatggcttctgaccttctactgtacgacgtgactgagaacagcatgcgagtcaaatgggatgcagtgcctggggcctcaggttacctgatcctttatgctcctctaacagagggcctggctggggatgaaaaagagatgaaaattggagagacccacacagatattgaattgagtgggttgttgcccaatacagaatacacagtcacagtttatgccatgtttggagaagaggccagtgatcctgttacgggacaagaaacaacattggctttaagtccaccaagaaacctgagaatctccaatgttggctctaacagtgctcgattaacctgggacccaacttcaagacagatcaatggttatcgaattgtatataacaatgcagatgggactgaaatcaatgaggttgaagtcgatcctattactaccttccctctgaagggcttgacacctctcacagagtatactattgctattttctccatctatgatgaaggacagtcagagcctctgantggagtttttaccaccgaggaagttccagcccagcaatacttagaaattgatgaggtgacgacagacagttttagggtgacctggcatcccctctcagctgatgaagggctacacaaattgatgtggattccagtctatggggggaagactgaggaggttgtcctgaaagaagagcaggactcacatgttattgaaggcctggagcccggtacggagtatgaagtttcactattggccgtacttgatgatggaagcgagagtgaggtggtgactgctgtcgggaccacacttgacagtttttggacagaaccagctacaaccatagtgcctaccacatctgtgacttcagttttccagacgggaatcagaaacctagttgtaggtgatgaaactacttctagcctgcgggtaaaatgggacatttctgacagcgatgtgcagcagtttagggtgacctacatgacagctcaaggggaccctgaggaagaagtcataggaacggttatggtgcctggaagccagaacaacctccttctgaagcctctgcttcctgatactgaatacaaagtcacagtgactcccatctacacggatggcgaaggcgtcagcgtctccgctcctggaaaaaccttaccatcctcggggccccagaacttgcgggtgtccgaggaatggtataaccggttgcgcattacgtgggaccccccatcttccccggtgaaaggctatagaattgtctacaaacctgtcagtgttcctggtccaacactggaaacgtttgtgggagctgacattaacaccatccttatcacaaacctcctcagcggaatggactacaatgtgaagatatttgcctcccaggcctcaggcttcagcgacgccctgacaggcatggtgaaaacattgttcttgggtgttaccaatctccaagccaaacatgttgaaatgaccagcttgtgtgcccactggcaggtacatcgccatgccacagcctatagggttgttatagaatccctccaggataggcaaaagcaagaatccactgtgggtggagggacaaccaggcattgcttctatggacttcagcctgattctgaatataaaatcagtgtttatacaaagctccaggagattgaaggacctagtgtgagcataatggaaaaaacacaatcacttcctacacgaccaccaacttttcctccaaccattccaccagcaaaagaagtatgtaaggcggccaaggctgacctggtatttatggtggatggatcctggagcattggagatgaaaatttcaataagatcatcagctttctatacagcactgttggagccctgaacaagattggcacagatggaacccaagttgcaatggttcagttcactgatgatcccagaacagaatttaaactaaatgcttacaaaaccaaagagactcttcttgatgcaattaaacacatttcatacaaaggaggaaatacaaaaacaggaaaagcaattaagtatgttcgagataccttgttcactgcagagtcaggtacaagaaggggcatcccaaaggttatcgtggttataactgatggaagatcacaagatgatgtgaacaaaatctccagggagatgcaattagatggctatagcatttttgcaattggtgtggccgatgcagattactcggagttggttagcattggcagtaagcccagcgcacgccatgtcttctttgtggatgactttgacgcctttaagaaaatcgaagatgagttaattacttttgtctgcgaaacagcatcagcaacctgtccagtggtacacaaggatggcattgatcttgcaggatttaagatgatggaaatgtttggtttggttgaaaaagatttttcatcagtggaaggggtttctatggagcctggtaccttcaatgtgtttccatgttaccaactccataaagatgccctggtttcccagccaaccaggtacttgcacccagaaggattgccctccgactacacaatcagttttctattccggattcttcctgacactccacaggagccatttgctctttgggagattttaaataaaaattctgacccattggttggggttattttagacaatggtgggaaaactctaacatatttcaactatgaccagagtggggattttcaaactgttactttcgaaggacctgaaattaggaaaattttttatggaagctttcacaagctacacattgttgtcagtgagactttggtcaaagtggttattgactgcaagcaagtgggtgagaaggcaatgaacgcatcagctaatatcacgtcagatggtgtagaagtgctagggaaaatggttcgatcaagaggaccaggtggaaactctgcaccgttccagttacagatgtttgatattgtttgctccacatcatgggccaatacagacaaatgctgtgaacttccaggcctgagagatgatgagtcttgcccagaccttccccattcctgctcctgttctgaaaccaatgaagtggctctgggaccagcgggcccaccaggtggtccaggactccgaggaccaaagggccagcaaggtgaaccgggtccaaagggaccagatggccctcggggtgaaattggtctgccaggacctcagggtccacctggacctcaaggaccaagtggtctgtccattcaaggaatgcccggaatgccaggagaaaaaggagagaaaggagatactggccttccaggtccacagggtatcccaggaggcgttggttcaccaggacgtgatggctcaccaggccagaggggccttccgggaaaggatggatcctcgggacctccaggaccaccagggccaataggcattcctggcacccctggagtcccagggatcacaggaagcatgggaccgcaaggcgccctgggaccacctggtgtccctggagcaaagggggaacgaggagagcggggtgacctgcagtctcaagccatggtgagatcagtggcgcgtcaagtatgcgaacagctcatccagagtcacatggccaggtacactgccatcctcaaccagattcccagccactcctcatccatccggactgtccaagggcctcctggggagcctgggaggccaggctcacctggagcccctggtgaacaaggacccccaggcacaccaggcttccccggaaatgcaggcgtgccagggaccccaggagaacgaggtctaactggtatcaaaggagaaaaaggaaatccaggcgttggaacccaaggtccaagaggcccccctggaccagcaggaccttcaggggagagtcggcctggcagccctgggccccctggctctcctggaccaagaggcccaccaggtcatctgggggttcctggaccccaaggtccttctggccagcctggatattgtgacccctcatcatgttctgcctatggtgtgagagctccccatccagatcagccagagttcacccctgtccaagatgagctggaagccatggaactgtggggccctggagtctgatagcctcaggagaaatttgaagaccaactgcaagaactcttaaggaatcttgtttgagaaaatgttgttatgtggtttgtatgctacttttggggggcagggctcatttcagcagcctaaatctcctccttggataatgttaatattattattattattaacaaaaaatatatatttttaaaaagttcccttaatctatgacatggtagcaatgatttccctttggtgtcttaatggcatgtcagataatttgtttttccagagaagagagctcaaagaggaattgggaaaaataaattgaactctggaatcttctctctcaagtcctaaaatgaacaaacagatatgattgtgtttgagggaaatatgtccctagcaggaaaagaattcaaagaggttcaaagaatatgtcacttactcctacttgctataggaataaccttgctgataagaaaaaaagggacaatattggagaaactacctcttgtttaattgatctgtccaactctgagatcacttggtaactggtttcatgtgtatccaaaaatcagcatttggatttaagctttctgaatttggtagtttaagaaacagatttagtttttcagtggttttaactcatgtgaaataatgattttccaccagctctgatgcaaagagatataattttaatgaacgatttatccagcagtttgttccaggggttgcctctccttatctacggggattactttgtacatgcagataagttttcgcaaacctatttccattttcttttgtaagcaaataaaactttaaaacaaaa

SEQ ID NO: 447820 - DNA, 6039 bp, Homo sapiens
  misc_feature (56)..(56): n is a, c, g, or t
  misc_feature (1827)..(1827): n is a, c, g, or t
  misc_feature (5935)..(5935): n is a, c, g, or t
atcctgggctcccagctggagaggcggaggcagctccagggggctggaagtggaancgcagcggcagaaggagagggagagagaaagagagagaggctaattaaaaaaggatactccgagggaagagagcaagggcggtgcgccgccaaggaccaactagcggcggagcttcgatcttgcctaggcgcggagagctcccaacctgggctggaaccttgcccagcacaggtggctgctacaccccatgtaaaaagcggaaaataaaatgaagattttccagcgcaagatgcggtactggttgcttccaccttttttggcaattgtttatttctgcaccattgtccaaggtcaagtggctccacccacaaggttaagatataatgtaatatctcatgacagtatacagatttcatggaaggctccaagagggaaatttggtggttacaaacttcttgtgactccaacttcaggtggaaaaactaaccagctgaatctgcagaacactgcaactaaagcaattattcaaggccttatgccagaccagaattacacagttcaaattattgcatacaataaagataaagaaagcaagccagctcaaggccaattcagaattaaagatttagaaaaaagaaaggatccaaagcccagagtcaaagttgtggacagaggaaatgggagtagaccatcttcaccagaagaagtgaaatttgtctgtcaaactccagcaattgctgacattgtaatcctggtcgatggttcatggagtattggaagattcaacttcagactggttcggcatttcttggaaaacctggttacagcattcgatgtgggctcagagaagacacgaattggggtgaaaaacgcggatgtgaatgagctgcaggagatcgcctctgaaccagacagcactcatgtgtacaatgttgccgaattcgatctgatgcacacagttgtggagagtctgaccaggactctctgctctagagtggaagaacaggacagagaaattaaagcctcagcccatgccatcactgggccgcctacggagttgattacttctgaagtcactgccagaagctttatggttaactggactcatgccccaggaaatgtggaaaaatacagagttgtgtattatcctaccaggggtggaaaaccagacgaggtggtggtagatggaactgtatcttccacagtgttgaaaaacttgatgtctttaactgaatatcagatagcagtctttgcaatctatgcccacactgctagtgaaggcctacggggaactgaaactacacttgctttaccgatggcttctgaccttctactgtacgacgtgactgagaacagcatgcgagtcaaatgggatgcagtgcctggggcctcaggttacctgatcctttatgctcctctaacagagggcctggctggggatgaaaaagagatgaaaattggagagacccacacagatattgaattgagtgggttgttgcccaatacagaatacacagtcacagtttatgccatgtttggagaagaggccagtgatcctgttacgggacaagaaacaacattggctttaagtccaccaagaaacctgagaatctccaatgttggctctaacagtgctcgattaacctgggacccaacttcaagacagatcaatggttatcgaattgtatataacaatgcagatgggactgaaatcaatgaggttgaagtcgatcctattactaccttccctctgaagggcttgacacctctcacagagtatactattgctattttctccatctatgatgaaggacagtcagagcctctgantggagtttttaccaccgaggaagttccagcccagcaatacttagaaattgatgaggtgacgacagacagttttagggtgacctggcatcccctctcagctgatgaagggctacacaaattgatgtggattccagtctatggggggaagactgaggaggttgtcctgaaagaagagcaggactcacatgttattgaaggcctggagcccggtacggagtatgaagtttcactattggccgtacttgatgatggaagcgagagtgaggtggtgactgctgtcgggaccacacttgacagtttttggacagaaccagctacaaccatagtgcctaccacatctgtgacttcagttttccagacgggaatcagaaacctagttgtaggtgatgaaactacttctagcctgcgggtaaaatgggacatttctgacagcgatgtgcagcagtttagggtgacctacatgacagctcaaggggaccctgaggaagaagtcataggaacggttatggtgcctggaagccagaacaacctccttctgaagcctctgcttcctgatactgaatacaaagtcacagtgactcccatctacacggatggcgaaggcgtcagcgtctccgctcctggaaaaaccttaccatcctcggggccccagaacttgcgggtgtccgaggaatggtataaccggttgcgcattacgtgggaccccccatcttccccggtgaaaggctatagaattgtctacaaacctgtcagtgttcctggtccaacactggaaacgtttgtgggagctgacattaacaccatccttatcacaaacctcctcagcggaatggactacaatgtgaagatatttgcctcccaggcctcaggcttcagcgacgccctgacaggcatggtgaaaacattgttcttgggtgttaccaatctccaagccaaacatgttgaaatgaccagcttgtgtgcccactggcaggtacatcgccatgccacagcctatagggttgttatagaatccctccaggataggcaaaagcaagaatccactgtgggtggagggacaaccaggcattgcttctatggacttcagcctgattctgaatataaaatcagtgtttatacaaagctccaggagattgaaggacctagtgtgagcataatggaaaaaacacaatcacttcctacacgaccaccaacttttcctccaaccattccaccagcaaaagaagtatgtaaggcggccaaggctgacctggtatttatggtggatggatcctggagcattggagatgaaaatttcaataagatcatcagctttctatacagcactgttggagccctgaacaagattggcacagatggaacccaagttgcaatggttcagttcactgatgatcccagaacagaatttaaactaaatgcttacaaaaccaaagagactcttcttgatgcaattaaacacatttcatacaaaggaggaaatacaaaaacaggaaaagcaattaagtatgttcgagataccttgttcactgcagagtcaggtacaagaaggggcatcccaaaggttatcgtggttataactgatggaagatcacaagatgatgtgaacaaaatctccagggagatgcaattagatggctatagcatttttgcaattggtgtggccgatgcagattactcggagttggttagcattggcagtaagcccagcgcacgccatgtcttctttgtggatgactttgacgcctttaagaaaatcgaagatgagttaattacttttgtctgcgaaacagcatcagcaacctgtccagtggtacacaaggatggcattgatcttgcaggatttaagatgatggaaatgtttggtttggttgaaaaagatttttcatcagtggaaggggtttctatggagcctggtaccttcaatgtgtttccatgttaccaactccataaagatgccctggtttcccagccaaccaggtacttgcacccagaaggattgccctccgactacacaatcagttttctattccggattcttcctgacactccacaggagccatttgctctttgggagattttaaataaaaattctgacccattggttggggttattttagacaatggtgggaaaactctaacatatttcaactatgaccagagtggggattttcaaactgttactttcgaaggacctgaaattaggaaaattttttatggaagctttcacaagctacacattgttgtcagtgagactttggtcaaagtggttattgactgcaagcaagtgggtgagaaggcaatgaacgcatcagctaatatcacgtcagatggtgtagaagtgctagggaaaatggttcgatcaagaggaccaggtggaaactctgcaccgttccagttacagatgtttgatattgtttgctccacatcatgggccaatacagacaaatgctgtgaacttccaggcctgagagatgatgagtcttgcccagaccttccccattcctgctcctgttctgaaaccaatgaagtggctctgggaccagcgggcccaccaggtggtccaggactccgaggaccaaagggccagcaaggtgaaccgggtccaaagggaccagatggccctcggggtgaaattggtctgccaggacctcagggtccacctggacctcaaggaccaagtggtctgtccattcaaggaatgcccggaatgccaggagaaaaaggagagaaaggagatactggccttccaggtccacagggtatcccaggaggcgttggttcaccaggacgtgatggctcaccaggccagaggggccttccgggaaaggatggatcctcgggacctccaggaccaccagggccaataggcattcctggcacccctggagtcccagggatcacaggaagcatgggaccgcaaggcgccctgggaccacctggtgtccctggagcaaagggggaacgaggagagcggggtgacctgcagtctcaagccatggtgagatcagtggcgcgtcaagtatgcgaacagctcatccagagtcacatggccaggtacactgccatcctcaaccagattcccagccactcctcatccatccggactgtccaagggcctcctggggagcctgggaggccaggctcacctggagcccctggtgaacaaggacccccaggcacaccaggcttccccggaaatgcaggcgtgccagggaccccaggagaacgaggtctaactggtatcaaaggagaaaaaggaaatccaggcgttggaacccaaggtccaagaggcccccctggaccagcaggaccttcaggggagagtcggcctggcagccctgggccccctggctctcctggaccaagaggcccaccaggtcatctgggggttcctggaccccaaggtccttctggccagcctggatattgtgacccctcatcatgttctgcctatggtgtgagagatctgatcccctacaatgattaccagcactgaagtggaaatcctccactctggttccattggccccagacatttagctgtggatacagaactgtcctgtcaaccaccaccaccaccaagcccctgcccctaacaatggacactctgcttccctgcttcttctgcatccctgccttcccactttcaaacctcttgcccactctgctccaaacatgatggagtgataacatcggaacttaaccaaatcatatatgtctattttaatagacactgactgctccatgtcagcctggatagaggtatatgatcgtgtgccaagaatttatcccagactcccctgtgtgacagcttcataataaagttacttaactgtgcctcttcctccttcctctccccacacaggatggatgggcatctttctccttgaccaccctactctcccttcctcccctgatcacctcccctccctgctctcccctggtgatggacttctaacatgagatttttttaaaaaatttctatttcttttataattttgctgagttttcagggtttcttctgtaaataaaacataatatttaaaaaaatggttatgattctagttttctaacaatttctgtaatgtatctttcccttcgtctattnactaactgtctgaaaccttatggggaacggtacaggggcgtggtggattaagacatccactggttttttaccagcaggatatctctgggtctcctaaggacccg

SEQ ID NO: 447821 - DNA, 3446 bp, Homo sapiens
  misc_feature (56)..(56): n is a, c, g, or t
  misc_feature (2112)..(2112): n is a, c, g, or t
atcctgggctcccagctggagaggcggaggcagctccagggggctggaagtggaancgcagcggcagaaggagagggagagagaaagagagagaggctaattaaaaaaggatactccgagggaagagagcaagggcggtgcgccgccaaggaccaactagcggcggagcttcgatcttgcctaggcgcggagagctcccaacctgggctggaaccttgcccagcacaggtggctgctacaccccatgtaaaaagcggaaaataaaatgaagattttccagcgcaagatgcggtactggttgcttccaccttttttggcaattgtttatttctgcaccattgtccaaggtcaagtggctccacccacaaggttaagatataatgtaatatctcatgacagtatacagatttcatggaaggctccaagagggaaatttggtggttacaaacttcttgtgactccaacttcaggtggaaaaactaaccagctgaatctgcagaacactgcaactaaagcaattattcaaggccttatgccagaccagaattacacagttcaaattattgcatacaataaagataaagaaagcaagccagctcaaggccaattcagaattaaagatttagaaaaaagaaaggatccaaagcccagagtcaaagttgtggacagaggaaatgggagtagaccatcttcaccagaagaagtgaaatttgtctgtcaaactccagcaattgctgacattgtaatcctggtcgatggttcatggagtattggaagattcaacttcagactggttcggcatttcttggaaaacctggttacagcattcgatgtgggctcagagaagacacgaattggtcttgcacagtatagtggtgaccccagaatagaatggcacttgaatgcatttagcacaaaagatgaagtgattgaagctgtccgaaacctcccatataaaggaggaaatacactaacaggtcttgctttgaactacatttttgaaaatagcttcaaaccagaagcaggatcaaggactggagtatccaaaattggcattttaatcacagatggaaaatcccaagatgacattattccaccatctagaaatcttcgtgagtctggtgtagaactgtttgccataggggtgaaaaacgcggatgtgaatgagctgcaggagatcgcctctgaaccagacagcactcatgtgtacaatgttgccgaattcgatctgatgcacacagttgtggagagtctgaccaggactctctgctctagagtggaagaacaggacagagaaattaaagcctcagcccatgccatcactgggccgcctacggagttgattacttctgaagtcactgccagaagctttatggttaactggactcatgccccaggaaatgtggaaaaatacagagttgtgtattatcctaccaggggtggaaaaccagacgaggtggtggtagatggaactgtatcttccacagtgttgaaaaacttgatgtctttaactgaatatcagatagcagtctttgcaatctatgcccacactgctagtgaaggcctacggggaactgaaactacacttgctttaccgatggcttctgaccttctactgtacgacgtgactgagaacagcatgcgagtcaaatgggatgcagtgcctggggcctcaggttacctgatcctttatgctcctctaacagagggcctggctggggatgaaaaagagatgaaaattggagagacccacacagatattgaattgagtgggttgttgcccaatacagaatacacagtcacagtttatgccatgtttggagaagaggccagtgatcctgttacgggacaagaaacaacattggctttaagtccaccaagaaacctgagaatctccaatgttggctctaacagtgctcgattaacctgggacccaacttcaagacagatcaatggttatcgaattgtatataacaatgcagatgggactgaaatcaatgaggttgaagtcgatcctattactaccttccctctgaagggcttgacacctctcacagagtatactattgctattttctccatctatgatgaaggacagtcagagcctctgantggagtttttaccaccgaggaagttccagcccagcaatacttagaaattgatgaggtgacgacagacagttttagggtgacctggcatcccctctcagctgatgaagggctacacaaattgatgtggattccagtctatggggggaagactgaggaggttgtcctgaaagaagagcaggactcacatgttattgaaggcctggagcccggtacggagtatgaagtttcactattggccgtacttgatgatggaagcgagagtgaggtggtgactgctgtcgggaccacacttgacagtttttggacagaaccagctacaaccatagtgcctaccacatctgtgacttcagttttccagacgggaatcagaaacctagttgtaggtgatgaaactacttctagcctgcgggtaaaatgggacatttctgacagcgatgtgcagcagtttagggtgacctacatgacagctcaaggggaccctgaggaagaagtcataggaacggttatggtgcctggaagccagaacaacctccttctgaagcctctgcttcctgatactgaatacaaagtcacagtgactcccatctacacggatggcgaaggcgtcagcgtctccgctcctggaaaaaccttaccatcctcggggccccagaacttgcgggtgtccgaggaatggtataaccggttgcgcattacgtgggaccccccatcttccccggtgaaaggctatagaattgtctacaaacctgtcagtgttcctggtccaacactggaaacgtttgtgggagctgacattaacaccatccttatcacaaacctcctcagcggaatggactacaatgtgaagatatttgcctcccaggcctcaggcttcagcgacgccctgacaggcatggtgaaaacattgttcttgggtgttaccaatctccaagccaaacatgttgaaatgaccagcttgtgtgcccactggcaggtacatcgccatgccacagcctatagggttgttatagaatccctccaggataggcaaaagcaagaatccactgtgggtggagggacaaccaggcattgcttctatggacttcagcctgattctgaatataaaatcagtgtttatacaaagctccaggagattgaaggacctagtgtgagcataatggaaaaaacacaatcacttcctacacgaccaccaacttttcctccaaccattccaccagcaaaagaaggtaaaagaataatagaataattatctgattctaggtttaggatttgtgttggttttgtttgcctgttcatttcaaaccaggatattaataaagtatatttattgtgct

SEQ ID NO: 447822 - DNA, 6118 bp, Homo sapiens
  misc_feature (56)..(56): n is a, c, g, or t
  misc_feature (1827)..(1827): n is a, c, g, or t
  misc_feature (5076)..(5076): n is a, c, g, or t
atcctgggctcccagctggagaggcggaggcagctccagggggctggaagtggaancgcagcggcagaaggagagggagagagaaagagagagaggctaattaaaaaaggatactccgagggaagagagcaagggcggtgcgccgccaaggaccaactagcggcggagcttcgatcttgcctaggcgcggagagctcccaacctgggctggaaccttgcccagcacaggtggctgctacaccccatgtaaaaagcggaaaataaaatgaagattttccagcgcaagatgcggtactggttgcttccaccttttttggcaattgtttatttctgcaccattgtccaaggtcaagtggctccacccacaaggttaagatataatgtaatatctcatgacagtatacagatttcatggaaggctccaagagggaaatttggtggttacaaacttcttgtgactccaacttcaggtggaaaaactaaccagctgaatctgcagaacactgcaactaaagcaattattcaaggccttatgccagaccagaattacacagttcaaattattgcatacaataaagataaagaaagcaagccagctcaaggccaattcagaattaaagatttagaaaaaagaaaggatccaaagcccagagtcaaagttgtggacagaggaaatgggagtagaccatcttcaccagaagaagtgaaatttgtctgtcaaactccagcaattgctgacattgtaatcctggtcgatggttcatggagtattggaagattcaacttcagactggttcggcatttcttggaaaacctggttacagcattcgatgtgggctcagagaagacacgaattggggtgaaaaacgcggatgtgaatgagctgcaggagatcgcctctgaaccagacagcactcatgtgtacaatgttgccgaattcgatctgatgcacacagttgtggagagtctgaccaggactctctgctctagagtggaagaacaggacagagaaattaaagcctcagcccatgccatcactgggccgcctacggagttgattacttctgaagtcactgccagaagctttatggttaactggactcatgccccaggaaatgtggaaaaatacagagttgtgtattatcctaccaggggtggaaaaccagacgaggtggtggtagatggaactgtatcttccacagtgttgaaaaacttgatgtctttaactgaatatcagatagcagtctttgcaatctatgcccacactgctagtgaaggcctacggggaactgaaactacacttgctttaccgatggcttctgaccttctactgtacgacgtgactgagaacagcatgcgagtcaaatgggatgcagtgcctggggcctcaggttacctgatcctttatgctcctctaacagagggcctggctggggatgaaaaagagatgaaaattggagagacccacacagatattgaattgagtgggttgttgcccaatacagaatacacagtcacagtttatgccatgtttggagaagaggccagtgatcctgttacgggacaagaaacaacattggctttaagtccaccaagaaacctgagaatctccaatgttggctctaacagtgctcgattaacctgggacccaacttcaagacagatcaatggttatcgaattgtatataacaatgcagatgggactgaaatcaatgaggttgaagtcgatcctattactaccttccctctgaagggcttgacacctctcacagagtatactattgctattttctccatctatgatgaaggacagtcagagcctctgantggagtttttaccaccgaggaagttccagcccagcaatacttagaaattgatgaggtgacgacagacagttttagggtgacctggcatcccctctcagctgatgaagggctacacaaattgatgtggattccagtctatggggggaagactgaggaggttgtcctgaaagaagagcaggactcacatgttattgaaggcctggagcccggtacggagtatgaagtttcactattggccgtacttgatgatggaagcgagagtgaggtggtgactgctgtcgggaccacacttgacagtttttggacagaaccagctacaaccatagtgcctaccacatctgtgacttcagttttccagacgggaatcagaaacctagttgtaggtgatgaaactacttctagcctgcgggtaaaatgggacatttctgacagcgatgtgcagcagtttagggtgacctacatgacagctcaaggggaccctgaggaagaagtcataggaacggttatggtgcctggaagccagaacaacctccttctgaagcctctgcttcctgatactgaatacaaagtcacagtgactcccatctacacggatggcgaaggcgtcagcgtctccgctcctggaaaaaccttaccatcctcggggccccagaacttgcgggtgtccgaggaatggtataaccggttgcgcattacgtgggaccccccatcttccccggtgaaaggctatagaattgtctacaaacctgtcagtgttcctggtccaacactggaaacgtttgtgggagctgacattaacaccatccttatcacaaacctcctcagcggaatggactacaatgtgaagatatttgcctcccaggcctcaggcttcagcgacgccctgacaggcatggtgaaaacattgttcttgggtgttaccaatctccaagccaaacatgttgaaatgaccagcttgtgtgcccactggcaggtacatcgccatgccacagcctatagggttgttatagaatccctccaggataggcaaaagcaagaatccactgtgggtggagggacaaccaggcattgcttctatggacttcagcctgattctgaatataaaatcagtgtttatacaaagctccaggagattgaaggacctagtgtgagcataatggaaaaaacacaatcacttcctacacgaccaccaacttttcctccaaccattccaccagcaaaagaagtatgtaaggcggccaaggctgacctggtatttatggtggatggatcctggagcattggagatgaaaatttcaataagatcatcagctttctatacagcactgttggagccctgaacaagattggcacagatggaacccaagttgcaatggttcagttcactgatgatcccagaacagaatttaaactaaatgcttacaaaaccaaagagactcttcttgatgcaattaaacacatttcatacaaaggaggaaatacaaaaacaggaaaagcaattaagtatgttcgagataccttgttcactgcagagtcaggtacaagaaggggcatcccaaaggttatcgtggttataactgatggaagatcacaagatgatgtgaacaaaatctccagggagatgcaattagatggctatagcatttttgcaattggtgtggccgatgcagattactcggagttggttagcattggcagtaagcccagcgcacgccatgtcttctttgtggatgactttgacgcctttaagaaaatcgaagatgagttaattacttttgtctgcgaaacagcatcagcaacctgtccagtggtacacaaggatggcattgatcttgcaggatttaagatgatggaaatgtttggtttggttgaaaaagatttttcatcagtggaaggggtttctatggagcctggtaccttcaatgtgtttccatgttaccaactccataaagatgccctggtttcccagccaaccaggtacttgcacccagaaggattgccctccgactacacaatcagttttctattccggattcttcctgacactccacaggagccatttgctctttgggagattttaaataaaaattctgacccattggttggggttattttagacaatggtgggaaaactctaacatatttcaactatgaccagagtggggattttcaaactgttactttcgaaggacctgaaattaggaaaattttttatggaagctttcacaagctacacattgttgtcagtgagactttggtcaaagtggttattgactgcaagcaagtgggtgagaaggcaatgaacgcatcagctaatatcacgtcagatggtgtagaagtgctagggaaaatggttcgatcaagaggaccaggtggaaactctgcaccgttccagttacagatgtttgatattgtttgctccacatcatgggccaatacagacaaatgctgtgaacttccaggcctgagagatgatgagtcttgcccagaccttccccattcctgctcctgttctgaaaccaatgaagtggctctgggaccagcgggcccaccaggtggtccaggactccgaggaccaaagggccagcaaggtgaaccgggtccaaagggaccagatggccctcggggtgaaattggtctgccaggacctcagggtccacctggacctcaaggaccaagtggtctgtccattcaaggaatgcccggaatgccaggagaaaaaggagagaaaggagatactggccttccaggtccacagggtatcccaggaggcgttggttcaccaggacgtgatggctcaccaggccagaggggccttccgggaaaggatggatcctcgggacctccaggaccaccagggccaataggcattcctggcacccctggagtcccagggatcacaggaagcatgggaccgcaaggcgccctgggaccacctggtgtccctggagcaaagggggaacgaggagagcggggtgacctgcagtctcaagccatggtgagatcagtggcgcgtcaagtatgcgaacagctcatccagagtcacatggccaggtacactgccatcctcaaccagattcccagccactcctcatccatccggactgtccaagggcctcctggggagcctgggaggccaggctcacctggagcccctggtgaacaaggacccccaggcacaccaggcttccccggaaatgcaggcgtgccagggaccccaggagaacgaggtctaactggtatcgaganagaccttcaggggagagtcggcctggcagccctgggccccctggctctcctggaccaagaggcccaccaggtcatctgggggttcctggaccccaaggtccttctggccagcctggatattgtgacccctcatcatgttctgcctatggtgtgagagctccccatccagatcagccagagttcacccctgtccaagatgagctggaagccatggaactgtggggccctggagtctgatagcctcaggagaaatttgaagaccaactgcaagaactcttaaggaatcttgtttgagaaaatgttgttatgtggtttgtatgctacttttggggggcagggctcatttcagcagcctaaatctcctccttggataatgttaatattattattattattaacaaaaaatatatatttttaaaaagttcccttaatctatgacatggtagcaatgatttccctttggtgtcttaatggcatgtcagataatttgtttttccagagaagagagctcaaagaggaattgggaaaaataaattgaactctggaatcttctctctcaagtcctaaaatgaacaaacagatatgattgtgtttgagggaaatatgtccctagcaggaaaagaattcaaagaggttcaaagaatatgtcacttactcctacttgctataggaataaccttgctgataagaaaaaaagggacaatattggagaaactacctcttgtttaattgatctgtccaactctgagatcacttggtaactggtttcatgtgtatccaaaaatcagcatttggatttaagctttctgaatttggtagtttaagaaacagatttagtttttcagtggttttaactcatgtgaaataatgattttccaccagctctgatgcaaagagatataattttaatgaacgatttatccagcagtttgttccaggggttgcctctccttatctacggggattactttgtacatgcagataagttttcgcaaacctatttccattttcttttgtaagcaaataaaactttaaaacaaaa

SEQ ID NO: 447823 - DNA, 2090 bp, Homo sapiens
  misc_feature (56)..(56): n is a, c, g, or t
atcctgggctcccagctggagaggcggaggcagctccagggggctggaagtggaancgcagcggcagaaggagagggagagagaaagagagagaggctaattaaaaaaggatactccgagggaagagagcaagggcggtgcgccgccaaggaccaactagcggcggagcttcgatcttgcctaggcgcggagagctcccaacctgggctggaaccttgcccagcacaggtggctgctacaccccatgtaaaaagcggaaaataaaatgaagattttccagcgcaagatgcggtactggttgcttccaccttttttggcaattgtttatttctgcaccattgtccaaggtcaagtggctccacccacaaggttaagatataatgtaatatctcatgacagtatacagatttcatggaaggctccaagagggaaatttggtggttacaaacttcttgtgactccaacttcaggtggaaaaactaaccagctgaatctgcagaacactgcaactaaagcaattattcaaggccttatgccagaccagaattacacagttcaaattattgcatacaataaagataaagaaagcaagccagctcaaggccaattcagaattaaagatttagaaaaaagaaaggatccaaagcccagagtcaaagttgtggacagaggaaatgggagtagaccatcttcaccagaagaagtgaaatttgtctgtcaaactccagcaattgctgacattgtaatcctggtcgatggttcatggagtattggaagattcaacttcagactggttcggcatttcttggaaaacctggttacagcattcgatgtgggctcagagaagacacgaattggggtgaaaaacgcggatgtgaatgagctgcaggagatcgcctctgaaccagacagcactcatgtgtacaatgttgccgaattcgatctgatgcacacagttgtggagagtctgaccaggactctctgctctagagtggaagaacaggacagagaaattaaagcctcagcccatgccatcactgggccgcctacggagttgattacttctgaagtcactgccagaagctttatggttaactggactcatgccccaggaaatgtggaaaaatacagagttgtgtattatcctaccaggggtggaaaaccagacgaggtggtggtagatggaactgtatcttccacagtgttgaaaaacttgatgtctttaactgaatatcagatagcagtctttgcaatctatgcccacactgctagtgaaggcctacggggaactgaaactacacttgctttaccgatggcttctgaccttctactgtacgacgtgactgagaacagcatgcgagtcaaatgggatgcagtgcctggggcctcaggttacctgatcctttatgctcctctaacagagggcctggctggggatgaaaaagagatgaaaattggagagacccacacagatattgaattgagtgggttgttgcccaatacagaatacacagtcacagtttatgccatgtttggagaagaggccagtgatcctgttacgggacaagaaacaacattggctttaagtccaccaagaaacctgagaatctccaatgttggctctaacagtgctcgattaacctgggacccaacttcaagacagatcaatggttatcgaattgtatataacaatgcagatgggactgaaatcaatgaggttcagattttgcttaaactgtggagcaatggtttcagtttagatgatggagaattgagaccttacaatgaaccaacaaatgctcaatttctggagtctgttaagagaggccttacacctgaaatagtcagtacaccttcctctccagaagaggaggataaatcaatacttaatgcagttgttcttattgatgattcagtgccaacaacaaaaattcaaatcaggttagcagatgggagtcgtttgatacaaagattcaatagtacacacaggatcctggatgtccggaactttattgtacagtctcgtcctgaatttgcggctcttgactttattcttgtgacttcatttccgaataaagagctaacagatg

SEQ ID NO: 447824 - DNA, 2965 bp, Homo sapiens
  misc_feature (56)..(56): n is a, c, g, or t
atcctgggctcccagctggagaggcggaggcagctccagggggctggaagtggaancgcagcggcagaaggagagggagagagaaagagagagaggctaattaaaaaaggatactccgagggaagagagcaagggcggtgcgccgccaaggaccaactagcggcggagcttcgatcttgcctaggcgcggagagctcccaacctgggctggaaccttgcccagcacaggtggctgctacaccccatgtaaaaagcggaaaataaaatgaagattttccagcgcaagatgcggtactggttgcttccaccttttttggcaattgtttatttctgcaccattgtccaaggtcaagtggctccacccacaaggttaagatataatgtaatatctcatgacagtatacagatttcatggaaggctccaagagggaaatttggtggttacaaacttcttgtgactccaacttcaggtggaaaaactaaccagctgaatctgcagaacactgcaactaaagcaattattcaaggccttatgccagaccagaattacacagttcaaattattgcatacaataaagataaagaaagcaagccagctcaaggccaattcagaattaaagatttagaaaaaagaaaggatccaaagcccagagtcaaagttgtggacagaggaaatgggagtagaccatcttcaccagaagaagtgaaatttgtctgtcaaactccagcaattgctgacattgtaatcctggtcgatggttcatggagtattggaagattcaacttcagactggttcggcatttcttggaaaacctggttacagcattcgatgtgggctcagagaagacacgaattggggtgaaaaacgcggatgtgaatgagctgcaggagatcgcctctgaaccagacagcactcatgtgtacaatgttgccgaattcgatctgatgcacacagttgtggagagtctgaccaggactctctgctctagagtggaagaacaggacagagaaattaaagcctcagcccatgccatcactgggccgcctacggagttgattacttctgaagtcactgccagaagctttatggttaactggactcatgccccaggaaatgtggaaaaatacagagttgtgtattatcctaccaggggtggaaaaccagacgaggtggtggtagatggaactgtatcttccacagtgttgaaaaacttgatgtctttaactgaatatcagatagcagtctttgcaatctatgcccacactgctagtgaaggcctacggggaactgaaactacacttgctttaccgatggcttctgaccttctactgtacgacgtgactgagaacagcatgcgagtcaaatgggatgcagtgcctggggcctcaggttacctgatcctttatgctcctctaacagagggcctggctggggatgaaaaagagatgaaaattggagagacccacacagatattgaattgagtgggttgttgcccaatacagaatacacagtcacagtttatgccatgtttggagaagaggccagtgatcctgttacgggacaagaaacaacattggctttaagtccaccaagaaacctgagaatctccaatgttggctctaacagtgctcgattaacctgggacccaacttcaagacagatcaatggttatcgaattgtatataacaatgcagatgggactgaaatcaatgaggttcagattttgcttaaactgtggagcaatggtttcagtttagatgatggagaattgagaccttacaatgaaccaacaaatgctcaatttctggagtctgttaagagaggccttacacctgaaatagtcagtacaccttcctctccagaagaggaggataaatcaatacttaatgcagttgttcttattgatgattcagtgccaacaacaaaaattcaaatcaggttagcagatgggagtcgtttgatacaaagattcaatagtacacacaggatcctggatgtccggaactttattgtacagtctcgtcctgaatttgcggctcttgactttattcttgtgacttcatttccgaataaagagctaacagatgaaagcctgacactgctagaagcagatattcttaacactgtgttactccagcaactaaaataatattgttcctgtccatgcagtagcatgtgggaatagatgatgtgccgtattaataaggacaatacttcagcattaaaaacagccaaattatttttattatttttacagataaattttggttttattgttattctgtcttccaatctgaatatagacaaatttggattaggaatagaccttgagataagtatgtttgagtttttagttgaaggactggcttatgttgatagtttttggatttctaggcaaatgagttgttacatgcttagtgttaatgtaacaacatttgtttgcagagaaaaatgaacaaaacccctttttgataaatgcatttggtaaaatttgcactaaagtttcttgatgcagcattgaccaacagccattaagaaatcttttgatcaaataagttgaaaatttgtctataatatatactgaaacgtgtcttttgattttgaaattgtttgatcatacaataattatttctcctattaagattttacacatcctttttacttactgatttagatatattactagtatcagaaactacagttttgccttgtattttacagaattatgactgttgtgaacttaaacagaaacacataaaggtcagcaattctttttttttttttttttgatatggagttttgctcttgttgcccaggctggagtgcaatggcataatttctgctcaccgcaacctccgcctcccaggagaattgcttgaacccaggaggcagaggttgcagtaagccaagatcgtgccactgcactccagccttggtgacagagcaagactccgtctccaaa

SEQ ID NO: 447825 - DNA, 1711 bp, Homo sapiens
ttttactcaagtgaacatgaatacagtggattaaatatagttcgaccttcaactgggaaaattgtgaatgaacttttcaaagaggcaagggaacatggggctgtccctctgaatgaagccacaagagcttcaggtgatgataaatctaagtcatttacaggtggaggatacagattgggtagttctttttgtaagcggtctgaatatatctatggagaaaatcagctgcaagatgttcagattttgcttaaactgtggagcaatggtttcagtttagatgatggagaattgagaccttacaatgaaccaacaaatgctcaatttctggagtctgttaagagaggggtgactctcattgcatgtatgcctgaaattcagcaacttatgttagaaatcttttaatgtggcattactgctggcagaagatttcaaaagagagattcccctggagcttcagcgccttgttcatggtggccaagtgaatttggatatggaggatcatcaggatcaagaatacataaaacctagattgaggttcaaggcttttagtggagaagggcaaaaacttggaagccttacacctgaaatagtcagtacaccttcctctccagaagaggaggataaatcaatacttaatgcagttgttcttattgatgattcagtgccaacaacaaaaattcaaatcaggttagcagatgggagtcgtttgatacaaagattcaatagtacacacaggatcctggatgtccggaactttattgtacagtctcgtcctgaatttgcggctcttgactttattcttgtgacttcatttccgaataaagagctaacagatgaaagcctgacactgctagaagcagatattcttaacactgtgttactccagcaactaaaataatattgttcctgtccatgcagtagcatgtgggaatagatgatgtgccgtattaataaggacaatacttcagcattaaaaacagccaaattatttttattatttttacagataaattttggttttattgttattctgtcttccaatctgaatatagacaaatttggattaggaatagaccttgagataagtatgtttgagtttttagttgaaggactggcttatgttgatagtttttggatttctaggcaaatgagttgttacatgcttagtgttaatgtaacaacatttgtttgcagagaaaaatgaacaaaacccctttttgataaatgcatttggtaaaatttgcactaaagtttcttgatgcagcattgaccaacagccattaagaaatcttttgatcaaataagttgaaaatttgtctataatatatactgaaacgtgtcttttgattttgaaattgtttgatcatacaataattatttctcctattaagattttacacatcctttttacttactgatttagatatattactagtatcagaaactacagttttgccttgtattttacagaattatgactgttgtgaacttaaacagaaacacataaaggtcagcaattctttttttttttttttttgatatggagttttgctcttgttgcccaggctggagtgcaatggcataatttctgctcaccgcaacctccgcctcccaggagaattgcttgaacccaggaggcagaggttgcagtaagccaagatcgtgccactgcactccagccttggtgacagagcaagactccgtctccaaa

SEQ ID NO: 447826 - DNA, 557 bp, Homo sapiens
gcggaagatggcggagggcggaggccctgagcccggcgagcaggagaggaggtcttccgggccgcggcctccgagcgcgcgggatttgcagttggccttggcagaattgtatgaagatgaagtgaagtgcaaatcttccaagtctaatagacctaaagccacagtcttcaagagcccacggacaccacctcaacggtaagttttattttgttttgttgtaaaaagaaattataatcctttctaaaaatttactaacttcaaattattttaaatggccttcttcaaggtttcttcaataatttttaaaaattattattccaagatcgaggcagatttggataaaaaatagaaatgattaatatcatttaggtactattaaaacttttacaatcagaaagccaaaagaaacttacggaaaaattaccttaaaatacctaatattttggtagatatcatatgaaattatatcctgaatactatttttcttgggcacaatggttctttaatattttttgagtcataggactcattaagggtctgatgaaagctatagaatt

SEQ ID NO: 447827 - DNA, 202 bp, Homo sapiens
gaaatcttttaatgtggcattactgctggcagaagatttcaaaaggttagtttgaagttataatttgtgaaagtaaactcagatattcagtgctctcacccatccaaagaacattgtaacttaccagctcttcttgctaaaggatgaggaatcaagtgattttgctatgataataaaagcttttctgtgttatgattaaact

SEQ ID NO: 447828 - DNA, 399 bp, Homo sapiens
gtaagtcactggttcttaattttgtgggccaggggcattggacattggcccattttaaaatctgatgaaactatgaacccagctccaagaagaaacatcttaatgtgataatcagtgaattaattagtatgtagctgcccacccactaagccactgtcctgcttactgttgacagggtgactctcattgcatgtatgcctgaaattcagcaacttatgttagaaatcttttaatgtggcattactgctggcagaagatttcaaaaggttagtttgaagttataatttgtgaaagtaaactcagatattcagtgctctcacccatccaaagaacattgtaacttaccagctcttcttgctaaaggatgaggaatcaagtgattttgctatgataataaaa

SEQ ID NO: 447829 - DNA, 1970 bp, Homo sapiens
aacaatagtccttacactgaattcatttatcctgaaatggcagacatcattcatttttcttgaaatggcagaatagcagctgcagacattaatctatggtacataccaagcaattcaactttttcttgtaatgtcagacttttctcttcttcttgggagcacttccagtatcactagtgctagtggcatcactttatacgagtcttatggtattattcaaagtttacagtattgcattaaacacgatgaaaaatacatgagaaccacaagagattaccttttactgtggtaggcaatttactacagagacaaactgctgaaacagaggtgatcagtgccgattaaaatgtgtggcattttaagtggatacttgcagcacctgaactcactgcaatagcaataggaggtggctatgaaattattagagaagtatagtatataccacagtaactttttgccactctcacttaatactgcatctttacatttgtttcctcgtgccgaattcggcacgaggatcacaggaagcatgggaccgcaaggcgccctgggaccacctggtgtccctggagcaaagggggaacgaggagagcggggtgacctgcagtctcaagccatggtgagatcagtggcgcgtcaagtatgcgaacagctcatccagagtcacatggccaggtacactgccatcctcaaccagattcccagccactcctcatccatccggactgtccaagggcctcctggggagcctgggaggccaggctcacctggagcccctggtgaacaaggacccccaggcacaccaggcttccccggaaatgcaggcgtgccagggaccccaggagaacgaggtctaactggtatcaaaggagaaaaaggaaatccaggcgttggaacccaaggtccaagaggcccccctggaccagcaggaccttcaggggagagtcggcctggcagccctgggccccctggctctcctggaccaagaggcccaccaggtcatctgggggttcctggaccccaaggtccttctggccagcctggatattgtgacccctcatcatgttctgcctatggtgtgagagctccccatccagatcagccagagttcacccctgtccaagatgagctggaagccatggaactgtggggccctggagtctgatagcctcaggagaaatttgaagaccaactgcaagaactcttaaggaatcttgtttgagaaaatgttgttatgtggtttgtatgctacttttggggggcagggctcatttcagcagcctaaatctcctccttggataatgttaatattattattattattaacaaaaaatatatatttttaaaaagttcccttaatctatgacatggtagcaatgatttccctttggtgtcttaatggcatgtcagataatttgtttttccagagaagagagctcaaagaggaattgggaaaaataaattgaactctggaatcttctctctcaagtcctaaaatgaacaaacagatatgattgtgtttgagggaaatatgtccctagcaggaaaagaattcaaagaggttcaaagaatatgtcacttactcctacttgctataggaataaccttgctgataagaaaaaaagggacaatattggagaaactacctcttgtttaattgatctgtccaactctgagatcacttggtaactggtttcatgtgtatccaaaaatcagcatttggatttaagctttctgaatttggtagtttaagaaacagatttagtttttcagtggttttaactcatgtgaaataatgattttccaccagctctgatgcaaagagatataattttaatgaacgatttatccagcagtttgttccaggggttgcctctccttatctacggggattactttgtacatgcagataagttttcgcaaacctatttccattttcttttgtaagcaaataaaactttaaaacaaaa

SEQ ID NO: 447830 - DNA, 6176 bp, Homo sapiens
  misc_feature (56)..(56): n is a, c, g, or t
  misc_feature (1827)..(1827): n is a, c, g, or t
atcctgggctcccagctggagaggcggaggcagctccagggggctggaagtggaancgcagcggcagaaggagagggagagagaaagagagagaggctaattaaaaaaggatactccgagggaagagagcaagggcggtgcgccgccaaggaccaactagcggcggagcttcgatcttgcctaggcgcggagagctcccaacctgggctggaaccttgcccagcacaggtggctgctacaccccatgtaaaaagcggaaaataaaatgaagattttccagcgcaagatgcggtactggttgcttccaccttttttggcaattgtttatttctgcaccattgtccaaggtcaagtggctccacccacaaggttaagatataatgtaatatctcatgacagtatacagatttcatggaaggctccaagagggaaatttggtggttacaaacttcttgtgactccaacttcaggtggaaaaactaaccagctgaatctgcagaacactgcaactaaagcaattattcaaggccttatgccagaccagaattacacagttcaaattattgcatacaataaagataaagaaagcaagccagctcaaggccaattcagaattaaagatttagaaaaaagaaaggatccaaagcccagagtcaaagttgtggacagaggaaatgggagtagaccatcttcaccagaagaagtgaaatttgtctgtcaaactccagcaattgctgacattgtaatcctggtcgatggttcatggagtattggaagattcaacttcagactggttcggcatttcttggaaaacctggttacagcattcgatgtgggctcagagaagacacgaattggggtgaaaaacgcggatgtgaatgagctgcaggagatcgcctctgaaccagacagcactcatgtgtacaatgttgccgaattcgatctgatgcacacagttgtggagagtctgaccaggactctctgctctagagtggaagaacaggacagagaaattaaagcctcagcccatgccatcactgggccgcctacggagttgattacttctgaagtcactgccagaagctttatggttaactggactcatgccccaggaaatgtggaaaaatacagagttgtgtattatcctaccaggggtggaaaaccagacgaggtggtggtagatggaactgtatcttccacagtgttgaaaaacttgatgtctttaactgaatatcagatagcagtctttgcaatctatgcccacactgctagtgaaggcctacggggaactgaaactacacttgctttaccgatggcttctgaccttctactgtacgacgtgactgagaacagcatgcgagtcaaatgggatgcagtgcctggggcctcaggttacctgatcctttatgctcctctaacagagggcctggctggggatgaaaaagagatgaaaattggagagacccacacagatattgaattgagtgggttgttgcccaatacagaatacacagtcacagtttatgccatgtttggagaagaggccagtgatcctgttacgggacaagaaacaacattggctttaagtccaccaagaaacctgagaatctccaatgttggctctaacagtgctcgattaacctgggacccaacttcaagacagatcaatggttatcgaattgtatataacaatgcagatgggactgaaatcaatgaggttgaagtcgatcctattactaccttccctctgaagggcttgacacctctcacagagtatactattgctattttctccatctatgatgaaggacagtcagagcctctgantggagtttttaccaccgaggaagttccagcccagcaatacttagaaattgatgaggtgacgacagacagttttagggtgacctggcatcccctctcagctgatgaagggctacacaaattgatgtggattccagtctatggggggaagactgaggaggttgtcctgaaagaagagcaggactcacatgttattgaaggcctggagcccggtacggagtatgaagtttcactattggccgtacttgatgatggaagcgagagtgaggtggtgactgctgtcgggaccacacttgacagtttttggacagaaccagctacaaccatagtgcctaccacatctgtgacttcagttttccagacgggaatcagaaacctagttgtaggtgatgaaactacttctagcctgcgggtaaaatgggacatttctgacagcgatgtgcagcagtttagggtgacctacatgacagctcaaggggaccctgaggaagaagtcataggaacggttatggtgcctggaagccagaacaacctccttctgaagcctctgcttcctgatactgaatacaaagtcacagtgactcccatctacacggatggcgaaggcgtcagcgtctccgctcctggaaaaaccttaccatcctcggggccccagaacttgcgggtgtccgaggaatggtataaccggttgcgcattacgtgggaccccccatcttccccggtgaaaggctatagaattgtctacaaacctgtcagtgttcctggtccaacactggaaacgtttgtgggagctgacattaacaccatccttatcacaaacctcctcagcggaatggactacaatgtgaagatatttgcctcccaggcctcaggcttcagcgacgccctgacaggcatggtgaaaacattgttcttgggtgttaccaatctccaagccaaacatgttgaaatgaccagcttgtgtgcccactggcaggtacatcgccatgccacagcctatagggttgttatagaatccctccaggataggcaaaagcaagaatccactgtgggtggagggacaaccaggcattgcttctatggacttcagcctgattctgaatataaaatcagtgtttatacaaagctccaggagattgaaggacctagtgtgagcataatggaaaaaacacaatcacttcctacacgaccaccaacttttcctccaaccattccaccagcaaaagaagtatgtaaggcggccaaggctgacctggtatttatggtggatggatcctggagcattggagatgaaaatttcaataagatcatcagctttctatacagcactgttggagccctgaacaagattggcacagatggaacccaagttgcaatggttcagttcactgatgatcccagaacagaatttaaactaaatgcttacaaaaccaaagagactcttcttgatgcaattaaacacatttcatacaaaggaggaaatacaaaaacaggaaaagcaattaagtatgttcgagataccttgttcactgcagagtcaggtacaagaaggggcatcccaaaggttatcgtggttataactgatggaagatcacaagatgatgtgaacaaaatctccagggagatgcaattagatggctatagcatttttgcaattggtgtggccgatgcagattactcggagttggttagcattggcagtaagcccagcgcacgccatgtcttctttgtggatgactttgacgcctttaagaaaatcgaagatgagttaattacttttgtctgcgaaacagcatcagcaacctgtccagtggtacacaaggatggcattgatcttgcaggatttaagatgatggaaatgtttggtttggttgaaaaagatttttcatcagtggaaggggtttctatggagcctggtaccttcaatgtgtttccatgttaccaactccataaagatgccctggtttcccagccaaccaggtacttgcacccagaaggattgccctccgactacacaatcagttttctattccggattcttcctgacactccacaggagccatttgctctttgggagattttaaataaaaattctgacccattggttggggttattttagacaatggtgggaaaactctaacatatttcaactatgaccagagtggggattttcaaactgttactttcgaaggacctgaaattaggaaaattttttatggaagctttcacaagctacacattgttgtcagtgagactttggtcaaagtggttattgactgcaagcaagtgggtgagaaggcaatgaacgcatcagctaatatcacgtcagatggtgtagaagtgctagggaaaatggttcgatcaagaggaccaggtggaaactctgcaccgttccagttacagatgtttgatattgtttgctccacatcatgggccaatacagacaaatgctgtgaacttccaggcctgagagatgatgagtcttgcccagaccttccccattcctgctcctgttctgaaaccaatgaagtggctctgggaccagcgggcccaccaggtggtccaggactccgaggaccaaagggccagcaaggtgaaccgggtccaaagggaccagatggccctcggggtgaaattggtctgccaggacctcagggtccacctggacctcaaggaccaagtggtctgtccattcaaggaatgcccggaatgccaggagaaaaaggagagaaaggagatactggccttccaggtccacagggtatcccaggaggcgttggttcaccaggacgtgatggctcaccaggccagaggggccttccgggaaaggatggatcctcgggacctccaggaccaccagggccaataggcattcctggcacccctggagtcccagggatcacaggaagcatgggaccgcaaggcgccctgggaccacctggtgtccctggagcaaagggggaacgaggagagcggggtgacctgcagtctcaagccatggtgagatcagtggcgcgtcaagtatgcgaacagctcatccagagtcacatggccaggtacactgccatcctcaaccagattcccagccactcctcatccatccggactgtccaagggcctcctggggagcctgggaggccaggctcacctggagcccctggtgaacaaggacccccaggcacaccaggcttccccggaaatgcaggcgtgccagggaccccaggagaacgaggtctaactggtatcaaaggagaaaaaggaaatccaggcgttggaacccaaggtccaagaggcccccctggaccagcaggaccttcaggggagagtcggcctggcagccctgggccccctggctctcctggaccaagaggcccaccaggtcatctgggggttcctggaccccaaggtccttctggccagcctggatattgtgacccctcatcatgttctgcctatggtgtgagagctccccatccagatcagccagagttcacccctgtccaagatgagctggaagccatggaactgtggggccctggagtctgatagcctcaggagaaatttgaagaccaactgcaagaactcttaaggaatcttgtttgagaaaatgttgttatgtggtttgtatgctacttttggggggcagggctcatttcagcagcctaaatctcctccttggataatgttaatattattattattattaacaaaaaatatatatttttaaaaagttcccttaatctatgacatggtagcaatgatttccctttggtgtcttaatggcatgtcagataatttgtttttccagagaagagagctcaaagaggaattgggaaaaataaattgaactctggaatcttctctctcaagtcctaaaatgaacaaacagatatgattgtgtttgagggaaatatgtccctagcaggaaaagaattcaaagaggttcaaagaatatgtcacttactcctacttgctataggaataaccttgctgataagaaaaaaagggacaatattggagaaactacctcttgtttaattgatctgtccaactctgagatcacttggtaactggtttcatgtgtatccaaaaatcagcatttggatttaagctttctgaatttggtagtttaagaaacagatttagtttttcagtggttttaactcatgtgaaataatgattttccaccagctctgatgcaaagagatataattttaatgaacgatttatccagcagtttgttccaggggttgcctctccttatctacggggattactttgtacatgcagataagttttcgcaaacctatttccattttcttttgtaagcaaataaaactttaaaacaaaa

SEQ ID NO: 447831 - DNA, 3364 bp, Homo sapiens
  misc_feature (3260)..(3260): n is a, c, g, or t
aaaggctaggtagaggctggggtgaaatcggccgagggacagccatggtgtaaacattgttcttgggtgttaccaatctccaagccaaacatgttgaaatgaccagcttgtgtgcccactggcaggtacatcgccatgccacagcctatagggttgttatagaatccctccaggataggcaaaagcaagaatccactgtgggtggagggacaaccaggcattgcttctatggacttcagcctgattctgaatataaaatcagtgtttatacaaagctccaggagattgaaggacctagtgtgagcataatggaaaaaacacaatcacttcctacacgaccaccaacttttcctccaaccattccaccagcaaaagaagtatgtaaggcggccaaggctgacctggtatttatggtggatggatcctggagcattggagatgaaaatttcaataagatcatcagctttctatacagcactgttggagccctgaacaagattggcacagatggaacccaagttgcaatggttcagttcactgatgatcccagaacagaatttaaactaaatgcttacaaaaccaaagagactcttcttgatgcaattaaacacatttcatacaaaggaggaaatacaaaaacaggaaaagcaattaagtatgttcgagataccttgttcactgcagagtcaggtacaagaaggggcatcccaaaggttatcgtggttataactgatggaagatcacaagatgatgtgaacaaaatctccagggagatgcaattagatggctatagcatttttgcaattggtgtggccgatgcagattactcggagttggttagcattggcagtaagcccagcgcacgccatgtcttctttgtggatgactttgacgcctttaagaaaatcgaagatgagttaattacttttgtctgcgaaacagcatcagcaacctgtccagtggtacacaaggatggcattgatcttgcaggatttaagatgatggaaatgtttggtttggttgaaaaagatttttcatcagtggaaggggtttctatggagcctggtaccttcaatgtgtttccatgttaccaactccataaagatgccctggtttcccagccaaccaggtacttgcacccagaaggattgccctccgactacacaatcagttttctattccggattcttcctgacactccacaggagccatttgctctttgggagattttaaataaaaattctgacccattggttggggttattttagacaatggtgggaaaactctaacatatttcaactatgaccagagtggggattttcaaactgttactttcgaaggacctgaaattaggaaaattttttatggaagctttcacaagctacacattgttgtcagtgagactttggtcaaagtggttattgactgcaagcaagtgggtgagaaggcaatgaacgcatcagctaatatcacgtcagatggtgtagaagtgctagggaaaatggttcgatcaagaggaccaggtggaaactctgcaccgttccagttacagatgtttgatattgtttgctccacatcatgggccaatacagacaaatgctgtgaacttccaggcctgagagatgatgagtcttgcccagaccttccccattcctgctcctgttctgaaaccaatgaagtggctctgggaccagcgggcccaccaggtggtccaggactccgaggaccaaagggccagcaaggtgaaccgggtccaaagggaccagatggccctcggggtgaaattggtctgccaggacctcagggtccacctggacctcaaggaccaagtggtctgtccattcaaggaatgcccggaatgccaggagaaaaaggagagaaaggagatactggccttccaggtccacagggtatcccaggaggcgttggttcaccaggacgtgatggctcaccaggccagaggggccttccgggaaaggatggatcctcgggacctccaggaccaccagggccaataggcattcctggcacccctggagtcccagggatcacaggaagcatgggaccgcaaggcgccctgggaccacctggtgtccctggagcaaagggggaacgaggagagcggggtgacctgcagtctcaagccatggtgagatcagtggcgcgtcaagtatgcgaacagctcatccagagtcacatggccaggtacactgccatcctcaaccagattcccagccactcctcatccatccggactgtccaagggcctcctggggagcctgggaggccaggctcacctggagcccctggtgaacaaggacccccaggcacaccaggcttccccggaaatgcaggcgtgccagggaccccaggagaacgaggtctaactggtatcaaaggagaaaaaggaaatccaggcgttggaacccaaggtccaagaggcccccctggaccagcaggaccttcaggggagagtcggcctggcagccctgggccccctggctctcctggaccaagaggcccaccaggtcatctgggggttcctggaccccaaggtccttctggccagcctggatattgtgacccctcatcatgttctgcctatggtgtgagagatctgatcccctacaatgattaccagcactgaagtggaaatcctccactctggttccattggccccagacatttagctgtggatacagaactgtcctgtcaaccaccaccaccaccaagcccctgcccctaacaatggacactctgcttccctgcttcttctgcatccctgccttcccactttcaaacctcttgcccactctgctccaaacatgatggagtgataacatcggaacttaaccaaatcatatatgtctattttaatagacactgactgctccatgtcagcctggatagaggtatatgatcgtgtgccaagaatttatcccagactcccctgtgtgacagcttcataataaagttacttaactgtgcctcttcctccttcctctccccacacaggatggatgggcatctttctccttgaccaccctactctcccttcctcccctgatcacctcccctccctgctctcccctggtgatggacttctaacatgagatttttttaaaaaatttctatttcttttataattttgctgagttttcagggtttcttctgtaaataaaacataatatttaaaaaaatggttatgattctagttttctaacaatttctgtaatgtatctttcccttcgtctattnactaactgtctgaaaccttatggggaacggtacaggggcgtggtggattaagacatccactggttttttaccagcaggatatctctgggtctcctaaggacccg

SEQ ID NO: 447832 - DNA, 5640 bp, Homo sapiens
  misc_feature (56)..(56): n is a, c, g, or t
  misc_feature (1827)..(1827): n is a, c, g, or t
  misc_feature (5536)..(5536): n is a, c, g, or t
atcctgggctcccagctggagaggcggaggcagctccagggggctggaagtggaancgcagcggcagaaggagagggagagagaaagagagagaggctaattaaaaaaggatactccgagggaagagagcaagggcggtgcgccgccaaggaccaactagcggcggagcttcgatcttgcctaggcgcggagagctcccaacctgggctggaaccttgcccagcacaggtggctgctacaccccatgtaaaaagcggaaaataaaatgaagattttccagcgcaagatgcggtactggttgcttccaccttttttggcaattgtttatttctgcaccattgtccaaggtcaagtggctccacccacaaggttaagatataatgtaatatctcatgacagtatacagatttcatggaaggctccaagagggaaatttggtggttacaaacttcttgtgactccaacttcaggtggaaaaactaaccagctgaatctgcagaacactgcaactaaagcaattattcaaggccttatgccagaccagaattacacagttcaaattattgcatacaataaagataaagaaagcaagccagctcaaggccaattcagaattaaagatttagaaaaaagaaaggatccaaagcccagagtcaaagttgtggacagaggaaatgggagtagaccatcttcaccagaagaagtgaaatttgtctgtcaaactccagcaattgctgacattgtaatcctggtcgatggttcatggagtattggaagattcaacttcagactggttcggcatttcttggaaaacctggttacagcattcgatgtgggctcagagaagacacgaattggggtgaaaaacgcggatgtgaatgagctgcaggagatcgcctctgaaccagacagcactcatgtgtacaatgttgccgaattcgatctgatgcacacagttgtggagagtctgaccaggactctctgctctagagtggaagaacaggacagagaaattaaagcctcagcccatgccatcactgggccgcctacggagttgattacttctgaagtcactgccagaagctttatggttaactggactcatgccccaggaaatgtggaaaaatacagagttgtgtattatcctaccaggggtggaaaaccagacgaggtggtggtagatggaactgtatcttccacagtgttgaaaaacttgatgtctttaactgaatatcagatagcagtctttgcaatctatgcccacactgctagtgaaggcctacggggaactgaaactacacttgctttaccgatggcttctgaccttctactgtacgacgtgactgagaacagcatgcgagtcaaatgggatgcagtgcctggggcctcaggttacctgatcctttatgctcctctaacagagggcctggctggggatgaaaaagagatgaaaattggagagacccacacagatattgaattgagtgggttgttgcccaatacagaatacacagtcacagtttatgccatgtttggagaagaggccagtgatcctgttacgggacaagaaacaacattggctttaagtccaccaagaaacctgagaatctccaatgttggctctaacagtgctcgattaacctgggacccaacttcaagacagatcaatggttatcgaattgtatataacaatgcagatgggactgaaatcaatgaggttgaagtcgatcctattactaccttccctctgaagggcttgacacctctcacagagtatactattgctattttctccatctatgatgaaggacagtcagagcctctgantggagtttttaccaccgaggaagttccagcccagcaatacttagaaattgatgaggtgacgacagacagttttagggtgacctggcatcccctctcagctgatgaagggctacacaaattgatgtggattccagtctatggggggaagactgaggaggttgtcctgaaagaagagcaggactcacatgttattgaaggcctggagcccggtacggagtatgaagtttcactattggccgtacttgatgatggaagcgagagtgaggtggtgactgctgtcgggaccacacttgacagtttttggacagaaccagctacaaccatagtgcctaccacatctgtgacttcagttttccagacgggaatcagaaacctagttgtaggtgatgaaactacttctagcctgcgggtaaaatgggacatttctgacagcgatgtgcagcagtttagggtgacctacatgacagctcaaggggaccctgaggaagaagtcataggaacggttatggtgcctggaagccagaacaacctccttctgaagcctctgcttcctgatactgaatacaaagtcacagtgactcccatctacacggatggcgaaggcgtcagcgtctccgctcctggaaaaaccttaccatcctcggggccccagaacttgcgggtgtccgaggaatggtataaccggttgcgcattacgtgggaccccccatcttccccggtgaaaggctatagaattgtctacaaacctgtcagtgttcctggtccaacactggaaacgtttgtgggagctgacattaacaccatccttatcacaaacctcctcagcggaatggactacaatgtgaagatatttgcctcccaggcctcaggcttcagcgacgccctgacaggcatggtgaaaacattgttcttgggtgttaccaatctccaagccaaacatgttgaaatgaccagcttgtgtgcccactggcaggtacatcgccatgccacagcctatagggttgttatagaatccctccaggataggcaaaagcaagaatccactgtgggtggagggacaaccaggcattgcttctatggacttcagcctgattctgaatataaaatcagtgtttatacaaagctccaggagattgaaggacctagtgtgagcataatggaaaaaacacaatcacttcctacacgaccaccaacttttcctccaaccattccaccagcaaaagaagtatgtaaggcggccaaggctgacctggtatttatggtggatggatcctggagcattggagatgaaaatttcaataagatcatcagctttctatacagcactgttggagccctgaacaagattggcacagatggaacccaagttgcaatggttcagttcactgatgatcccagaacagaatttaaactaaatgcttacaaaaccaaagagactcttcttgatgcaattaaacacatttcatacaaaggaggaaatacaaaaacaggaaaagcaattaagtatgttcgagataccttgttcactgcagagtcaggtacaagaaggggcatcccaaaggttatcgtggttataactgatggaagatcacaagatgatgtgaacaaaatctccagggagatgcaattagatggctatagcatttttgcaattggtgtggccgatgcagattactcggagttggttagcattggcagtaagcccagcgcacgccatgtcttctttgtggatgactttgacgcctttaagaaaatcgaagatgagttaattacttttgtctgcgaaacagcatcagcaacctgtccagtggtacacaaggatggcattgatcttgcaggatttaagatgatggaaatgtttggtttggttgaaaaagatttttcatcagtggaaggggtttctatggagcctggtaccttcaatgtgtttccatgttaccaactccataaagatgccctggtttcccagccaaccaggtacttgcacccagaaggattgccctccgactacacaatcagttttctattccggattcttcctgacactccacaggagccatttgctctttgggagattttaaataaaaattctgacccattggttggggttattttagacaatggtgggaaaactctaacatatttcaactatgaccagagtggggattttcaaactgttactttcgaaggacctgaaattaggaaaattttttatggaagctttcacaagctacacattgttgtcagtgagactttggtcaaagtggttattgactgcaagcaagtgggtgagaaggcaatgaacgcatcagctaatatcacgtcagatggtgtagaagtgctagggaaaatggttcgatcaagaggaccaggtggaaactctgcaccgttccagttacagatgtttgatattgtttgctccacatcatgggccaatacagacaaatgctgtgaacttccaggcctgagagatgatgagtcttgcccagaccttccccattcctgctcctgttctgaaaccaatgaagtggctctgggaccagcgggcccaccaggtggtccaggactccgaggaccaaagggccagcaaggtgaaccgggtccaaagggaccagatggccctcggggtgaaattggtctgccaggacctcagggtccacctggacctcaaggaccaagtggtctgtccattcaaggaatgcccggaatgccaggagaaaaaggagagaaaggagatactggccttccaggtccacagggtatcccaggaggcgttggttcaccaggacgtgatggctcaccaggccagaggggccttccgggaaaggatggatcctcgggacctccaggaccaccagggccaataggcattcctggcacccctggagtcccagggatcacaggaagcatgggaccgcaaggcgccctgggaccacctggtgtccctggagcaaagggggaacgaggagagcggggtgacctgcagtctcaagccatggtgagatcagtggcgcgtcaagtatgcgaacagctcatccagagtcacatggccaggtacactgccatcctcaaccagattcccagccactcctcatccatccggactgtccaagggcctcctggggagcctgggaggccaggctcacctggagcccctggtgaacaaggacccccaggcacaccaggcttccccggaaatgcaggcgtgccagggaccccaggagaacgaggtctaactggtatcaaaggagaaaaaggaaatccaggcgttggaacccaaggtccaagaggcccccctggaccagcaggaccttcaggggagagtcggcctggcagccctgggccccctggctctcctggaccaagaggcccaccaggtcatctgggggttcctggaccccaaggtccttctggccagcctggatattgtgacccctcatcatgttctgcctatggtgtgagagaggatggatgggcatctttctccttgaccaccctactctcccttcctcccctgatcacctcccctccctgctctcccctggtgatggacttctaacatgagatttttttaaaaaatttctatttcttttataattttgctgagttttcagggtttcttctgtaaataaaacataatatttaaaaaaatggttatgattctagttttctaacaatttctgtaatgtatctttcccttcgtctattnactaactgtctgaaaccttatggggaacggtacaggggcgtggtggattaagacatccactggttttttaccagcaggatatctctgggtctcctaaggacccg

SEQ ID NO: 447833 - DNA, 3560 bp, Homo sapiens
acaatagacactaggggctactagtagggggagaatagaaggaggctgaaggttgaaaaactgcctattgggaactatgctcactacctgggggacagaatcatttgtacaccacctctcagtgacatgccgtttacccatgtaacaaacctacacaatgtaccctctgaatctaaaataaaatttttaaaaaagaaaagatgtatttaattcgtcttcaaatttggtatgtaacttgtatgaaagaaattttaatccaagcagattttgtaatgagataatgaagaaattaaaactacaggtgacactgtgctgttgctctctgacccagtggaagtctacatatgtgtgaaaatgaatacaccttctctctccaggttgcaatggttcagttcactgatgatcccagaacagaatttaaactaaatgcttacaaaaccaaagagactcttcttgatgcaattaaacacatttcatacaaaggaggaaatacaaaaacaggtatgaccaaaagaagcccagctaaggctcaaagtaattcattatttgtaactactgaaatgaccttttattttaaggcatagtaattttttaaagattttttttttcattaatttaagaactttgttcccaccctttcttctccagaaaaacaaaaatgggagggagtgaaatcaaactgttgcctttctttgtttcaggaaaagcaattaagtatgttcgagataccttgttcactgcagagtcaggtacaagaaggggcatcccaaaggttatcgtggttataactgatggaagatcacaagatgatgtgaacaaaatctccagggagatgcaattagatggctatagcatttttgcaattggtgtggccgatgcagattactcggagttggttagcattggcagtaagcccagcgcacgccatgtcttctttgtggatgactttgacgcctttaagaaaatcgaagatgagttaattacttttgtctgcgaaacagcatcagcaacctgtccagtggtacacaaggatggcattgatcttgcaggatttaagatgatggaaatgtttggtttggttgaaaaagatttttcatcagtggaaggggtttctatggagcctggtaccttcaatgtgtttccatgttaccaactccataaagatgccctggtttcccagccaaccaggtacttgcacccagaaggattgccctccgactacacaatcagttttctattccggattcttcctgacactccacaggagccatttgctctttgggagattttaaataaaaattctgacccattggttggggttattttagacaatggtgggaaaactctaacatatttcaactatgaccagagtggggattttcaaactgttactttcgaaggacctgaaattaggaaaattttttatggaagctttcacaagctacacattgttgtcagtgagactttggtcaaagtggttattgactgcaagcaagtgggtgagaaggcaatgaacgcatcagctaatatcacgtcagatggtgtagaagtgctagggaaaatggttcgatcaagaggaccaggtggaaactctgcaccgttccagttacagatgtttgatattgtttgctccacatcatgggccaatacagacaaatgctgtgaacttccaggcctgagagatgatgagtcttgcccagaccttccccattcctgctcctgttctgaaaccaatgaagtggctctgggaccagcgggcccaccaggtggtccaggactccgaggaccaaagggccagcaaggtgaaccgggtccaaagggaccagatggccctcggggtgaaattggtctgccaggacctcagggtccacctggacctcaaggaccaagtggtctgtccattcaaggaatgcccggaatgccaggagaaaaaggagagaaaggagatactggccttccaggtccacagggtatcccaggaggcgttggttcaccaggacgtgatggctcaccaggccagaggggccttccgggaaaggatggatcctcgggacctccaggaccaccagggccaataggcattcctggcacccctggagtcccagggatcacaggaagcatgggaccgcaaggcgccctgggaccacctggtgtccctggagcaaagggggaacgaggagagcggggtgacctgcagtctcaagccatggtgagatcagtggcgcgtcaagtatgcgaacagctcatccagagtcacatggccaggtacactgccatcctcaaccagattcccagccactcctcatccatccggactgtccaagggcctcctggggagcctgggaggccaggctcacctggagcccctggtgaacaaggacccccaggcacaccaggcttccccggaaatgcaggcgtgccagggaccccaggagaacgaggtctaactggtatcaaaggagaaaaaggaaatccaggcgttggaacccaaggtccaagaggcccccctggaccagcaggaccttcaggggagagtcggcctggcagccctgggccccctggctctcctggaccaagaggcccaccaggtcatctgggggttcctggaccccaaggtccttctggccagcctggatattgtgacccctcatcatgttctgcctatggtgtgagagctccccatccagatcagccagagttcacccctgtccaagatgagctggaagccatggaactgtggggccctggagtctgatagcctcaggagaaatttgaagaccaactgcaagaactcttaaggaatcttgtttgagaaaatgttgttatgtggtttgtatgctacttttggggggcagggctcatttcagcagcctaaatctcctccttggataatgttaatattattattattattaacaaaaaatatatatttttaaaaagttcccttaatctatgacatggtagcaatgatttccctttggtgtcttaatggcatgtcagataatttgtttttccagagaagagagctcaaagaggaattgggaaaaataaattgaactctggaatcttctctctcaagtcctaaaatgaacaaacagatatgattgtgtttgagggaaatatgtccctagcaggaaaagaattcaaagaggttcaaagaatatgtcacttactcctacttgctataggaataaccttgctgataagaaaaaaagggacaatattggagaaactacctcttgtttaattgatctgtccaactctgagatcacttggtaactggtttcatgtgtatccaaaaatcagcatttggatttaagctttctgaatttggtagtttaagaaacagatttagtttttcagtggttttaactcatgtgaaataatgattttccaccagctctgatgcaaagagatataattttaatgaacgatttatccagcagtttgttccaggggttgcctctccttatctacggggattactttgtacatgcagataagttttcgcaaacctatttccattttcttttgtaagcaaataaaactttaaaacaaaa

SEQ ID NO: 447834 - DNA, 2086 bp, Homo sapiens
  misc_feature (56)..(56): n is a, c, g, or t
atcctgggctcccagctggagaggcggaggcagctccagggggctggaagtggaancgcagcggcagaaggagagggagagagaaagagagagaggctaattaaaaaaggatactccgagggaagagagcaagggcggtgcgccgccaaggaccaactagcggcggagcttcgatcttgcctaggcgcggagagctcccaacctgggctggaaccttgcccagcacaggtggctgctacaccccatgtaaaaagcggaaaataaaatgaagattttccagcgcaagatgcggtactggttgcttccaccttttttggcaattgtttatttctgcaccattgtccaaggtcaagtggctccacccacaaggttaagatataatgtaatatctcatgacagtatacagatttcatggaaggctccaagagggaaatttggtggttacaaacttcttgtgactccaacttcaggtggaaaaactaaccagctgaatctgcagaacactgcaactaaagcaattattcaaggccttatgccagaccagaattacacagttcaaattattgcatacaataaagataaagaaagcaagccagctcaaggccaattcagaattaaagatttagaaaaaagaaaggatccaaagcccagagtcaaagttgtggacagaggaaatgggagtagaccatcttcaccagaagaagtgaaatttgtctgtcaaactccagcaattgctgacattgtaatcctggtcgatggttcatggagtattggaagattcaacttcagactggttcggcatttcttggaaaacctggttacagcattcgatgtgggctcagagaagacacgaattggggtgaaaaacgcggatgtgaatgagctgcaggagatcgcctctgaaccagacagcactcatgtgtacaatgttgccgaattcgatctgatgcacacagttgtggagagtctgaccaggactctctgctctagagtggaagaacaggacagagaaattaaagcctcagcccatgccatcactgggccgcctacggagttgattacttctgaagtcactgccagaagctttatggttaactggactcatgccccaggaaatgtggaaaaatacagagttgtgtattatcctaccaggggtggaaaaccagacgaggtggtggtagatggaactgtatcttccacagtgttgaaaaacttgatgtctttaactgaatatcagatagcagtctttgcaatctatgcccacactgctagtgaaggcctacggggaactgaaactacacttgctttaccgatggcttctgaccttctactgtacgacgtgactgagaacagcatgcgagtcaaatgggatgcagtgcctggggcctcaggttacctgatcctttatgctcctctaacagagggcctggctggggatgaaaaagagatgaaaattggagagacccacacagatattgaattgagtgggttgttgcccaatacagaatacacagtcacagtttatgccatgtttggagaagaggccagtgatcctgttacgggacaagaaacaacattggctttaagtccaccaagaaacctgagaatctccaatgttggctctaacagtgctcgattaacctgggacccaacttcaagacagatcaatggttatcgaattgtatataacaatgcagatgggactgaaatcaatgaggttcagattttgcttaaactgtggagcaatggtttcagtttagatgatggagaattgagaccttacaatgaaccaacaaatgctcaatttctggagtctgttaagagaggggtgactctcattgcatgtatgcctgaaattcagcaacttatgttagaaatcttttaatgtggcattactgctggcagaagatttcaaaaggttagtttgaagttataatttgtgaaagtaaactcagatattcagtgctctcacccatccaaagaacattgtaacttaccagctcttcttgctaaaggatgaggaatcaagtgattttgctatgataataaaagcttttctgtgttatgattaaactagctgaaagtg

SEQ ID NO: 447835 - DNA, 1665 bp, Homo sapiens
gcggaagatggcggagggcggaggccctgagcccggcgagcaggagaggaggtcttccgggccgcggcctccgagcgcgcgggatttgcagttggccttggcagaattgtatgaagatgaagtgaagtgcaaatcttccaagtctaatagacctaaagccacagtcttcaagagcccacggacaccacctcaacgtcatttacaggtggaggatacagattgggtagttctttttgtaagcggtctgaatatatctatggagaaaatcagctgcaagatgttcagattttgcttaaactgtggagcaatggtttcagtttagatgatggagaattgagaccttacaatgaaccaacaaatgctcaatttctggagtctgttaagagaggagagattcccctggagcttcagcgccttgttcatggtggccaagtgaatttggatatggaggatcatcaggatcaagaatacataaaacctagattgaggttcaaggcttttagtggagaagggcaaaaacttggaagccttacacctgaaatagtcagtacaccttcctctccagaagaggaggataaatcaatacttaatgcagttgttcttattgatgattcagtgccaacaacaaaaattcaaatcaggttagcagatgggagtcgtttgatacaaagattcaatagtacacacaggatcctggatgtccggaactttattgtacagtctcgtcctgaatttgcggctcttgactttattcttgtgacttcatttccgaataaagagctaacagatgaaagcctgacactgctagaagcagatattcttaacactgtgttactccagcaactaaaataatattgttcctgtccatgcagtagcatgtgggaatagatgatgtgccgtattaataaggacaatacttcagcattaaaaacagccaaattatttttattatttttacagataaattttggttttattgttattctgtcttccaatctgaatatagacaaatttggattaggaatagaccttgagataagtatgtttgagtttttagttgaaggactggcttatgttgatagtttttggatttctaggcaaatgagttgttacatgcttagtgttaatgtaacaacatttgtttgcagagaaaaatgaacaaaacccctttttgataaatgcatttggtaaaatttgcactaaagtttcttgatgcagcattgaccaacagccattaagaaatcttttgatcaaataagttgaaaatttgtctataatatatactgaaacgtgtcttttgattttgaaattgtttgatcatacaataattatttctcctattaagattttacacatcctttttacttactgatttagatatattactagtatcagaaactacagttttgccttgtattttacagaattatgactgttgtgaacttaaacagaaacacataaaggtcagcaattctttttttttttttttttgatatggagttttgctcttgttgcccaggctggagtgcaatggcataatttctgctcaccgcaacctccgcctcccaggagaattgcttgaacccaggaggcagaggttgcagtaagccaagatcgtgccactgcactccagccttggtgacagagcaagactccgtctccaaa

SEQ ID NO: 447836 - DNA, 3710 bp, Homo sapiens
  misc_feature (3)..(4): n is a, c, g, or t
  misc_feature (6)..(6): n is a, c, g, or t
ggnntncccggccgggcgcacccgcggggccctgggctcgctggcttgcgcgcagctgagcggggtgtaggttggaagggccagggcccctggggcgcaagtgggggccggcgccatggaacccccgaccgtcccctcggaaaggagcctgtctctgtcactgcccgggccccgggagggccaggccaccctgaagcctcccccgcagcacctgtggcggcagcctcggacccccatccgtatccagcagcgcggctactccgacagcgcggagcgcgccgagcgggagcggcagccgcaccggcccatagagcgcgccgatgccatggacaccagcgaccggcccggcctgcgcacgacccgcatgtcctggccctcgtccttccatggcactggcaccggcagcggcggcgcgggcggaggcagcagcaggcgcttcgaggcagagaatgggccgacaccatctcctggccgcagccccctggactcgcaggcgagcccaggactcgtgctgcacgccggggcggccaccagccagcgccgggagtccttcctgtaccgctcagacagcgactatgacatgtcacccaagaccatgtcccggaactcatcggtcaccagcgaggcgcacgctgaagacctcatcgtaacaccatttgctcaggtgctggccagcctccggagcgtccgtagcaacttctcactcctgaccaatgtgcccgttcccagtaacaagcggtccccgctgggcggccccacccctgtctgcaaggccacgctgtcagaagaaacgtgtcagcagttggcccgggagactctggaggagctggactggtgtctggagcagctggagaccatgcagacctatcgctctgtcagcgagatggcctcgcacaagttcaaaaggatgttgaaccgtgagctcacacacctgtcagaaatgagcaggtccggaaaccaggtctcagagtacatttccacaacattcctggacaaacagaatgaagtggagatcccatcacccacgatgaaggaacgagaaaaacagcaagcgccgcgaccaagaccctcccagccgcccccgccccctgtaccacacttacagcccatgtcccaaatcacagggttgaaaaagttgatgcatagtaacagcctgaacaactctaacattccccgatttggggtgaagaccgatcaagaagagctcctggcccaagaactggagaacctgaacaagtggggcctgaacatcttttgcgtgtcggattacgctggaggccgctcactcacctgcatcatgtacatgatattccaggagcgggacctgctgaagaaattccgcatccctgtggacacgatggtgacatacatgctgacgctggaggatcactaccacgctgacgtggcctaccataacagcctgcacgcagctgacgtgctgcagtccacccacgtactgctggccacgcctgcactagatgcagtgttcacggacctggagattctcgccgccctcttcgcggctgccatccacgatgtggatcaccctggggtctccaaccagttcctcatcaacaccaattcggagctggcgctcatgtacaacgatgagtcggtgctcgagaatcaccacctggccgtgggcttcaagctgctgcaggaggacaactgcgacatcttccagaacctcagcaagcgccagcggcagagcctacgcaagatggtcatcgacatggtgctggccacggacatgtccaagcacatgaccctcctggctgacctgaagaccatggtggagaccaagaaagtgaccagctcaggggtcctcctgctagataactactccgaccgcatccaggtcctccggaacatggtgcactgtgccgacctcagcaaccccaccaagccgctggagctgtaccgccagtggacagaccgcatcatggccgagttcttccagcagggtgaccgagagcgcgagcgtggcatggaaatcagccccatgtgtgacaagcacactgcctccgtggagaagtctcaggtgggttttattgactacattgtgcacccattgtgggagacctgggcggaccttgtccacccagatgcccaggagatcttggacactttggaggacaaccgggactggtactacagcgccatccggcagagcccatctccgccacccgaggaggagtcaagggggccaggccacccacccctgcctgacaagttccagtttgagctgacgctggaggaggaagaggaggaagaaatatcaatggcccagataccgtgcacagcccaagaggcattgactgcgcagggattgtcaggagtcgaggaagctctggatgcaaccatagcctgggaggcatccccggcccaggagtcgttggaagttatggcacaggaagcatccctggaggccgagctggaggcagtgtatttgacacagcaggcacagtccacaggcagtgcacctgtggctccggatgagttctcgtcccgggaggaattcgtggttgctgtaagccacagcagcccctctgccctggctcttcaaagcccccttctccctgcttggaggaccctgtctgtttcagagcatgccccgggcctcccgggcctcccctccacggcggccgaggtggaggcccaacgagagcaccaggctgccaagagggcttgcagtgcctgcgcagggacatttggggaggacacatccgcactcccagctcctggtggcggggggtcaggtggagaccctacctgatccccagacctctgtccctgttcccctccactcctcccctcactcccctgctcccccgaccacctcctcctctgcctcaaagactcttgtcctcttgtccctcctgagaaaaaagaaaacgaaaagtggggtttttttctgttttctttttttcccctttccccctgcccccacccacggggcctttttttggaggtgggggctggggaatgaggggctgaggtcccggaagggattttatttttttgaattttaattgtaacatttttagaaaaagaacaaaaaaagaaaaaaaaaagaaagaaacacagcaactgtagatgctcctgttcctggttcccgctttccacttccaaatccctcccctcaccttcccccactgccccccaagttccaggctcagtcttccagccgcctggggagtctctacctgggcccaagcaggtgtggggcctccttctgggcttttcttctgaatttagaggatttctagaacgtggtcaggaatagccattctaggcggggctggggccagggtggggggcagtcactgtgggaggtcccagctccagcccccctctggtttgctgcctcctctcccctctaaaaaagtcttccgcttgattttgcacaatcccggcgatactcctggcgatactgactagaaagtcagggagctgggggagctgttcactttaggatacgggggtggtatggaagggagcgttcacaccgccagcctcgggcctgggatttgaggagggccctagacctcctccactctccatcccctttcccttccactttgggttcactttgaattttctccgttttttggggcagtggctctgatccactcacccccccgccccgtaagttatagccactgtggaaagtagtatgaaagttcctcaagaaactaaaaatggaattc

SEQ ID NO: 447837 - DNA, 527 bp, Homo sapiens
gcgcggccgcgcggcctaggccgcatcccggagctgcaactggtggccttcccggtggcggtggcggctgaggacgaggcgttcctgcccgagcccctggccccgcgcgcgccccgccgcccgcgttcgccgccctcctcgcccgtcttcttcgccagcccgtccccaactttccgcagacgccttcggcttctccgcagctgccaggatttgggccgccaggcttgggctggggctgggtaagtgcagcgctggtggccgtgggttcaagtcgcccctggccacctggcgcactccagggtctagggttcgtggctcactctctccagcctcactttcctcttctgtcacatagcagcgatcaaaatcatccctgaccgccagggttgccctggagacctctgatagggcatgcagtagacgtttaataaatgttgcatccttcccacttcctgtgcaaacctgaagctgcggtcacgctttggaggagtgagggcgacctgccatccaggtcatgtgttcatcct

SEQ ID NO: 447838 - DNA, 4500 bp, Homo sapiens
atgcgctccggtgcagcgccccgggcccggccccggccccctgccctggcactgccccccacgggccccgagtccctgacccacttccccttcagcgatgaggacacccgtcggcaccctccgggcagatctgtcagcttcgaggcagagaatgggccgacaccatctcctggccgcagccccctggactcgcaggcgagcccaggactcgtgctgcacgccggggcggccaccagccagcgccgggagtccttcctgtaccgctcagacagcgactatgacatgtcacccaagaccatgtcccggaactcatcggtcaccagcgaggcgcacgctgaagacctcatcgtaacaccatttgctcaggtgctggccagcctccggagcgtccgtagcaacttctcactcctgaccaatgtgcccgttcccagtaacaagcggtccccgctgggcggccccacccctgtctgcaaggccacgctgtcagaagaaacgtgtcagcagttggcccgggagactctggaggagctggactggtgtctggagcagctggagaccatgcagacctatcgctctgtcagcgagatggcctcgcacaagttcaaaaggatgttgaaccgtgagctcacacacctgtcagaaatgagcaggtccggaaaccaggtctcagagtacatttccacaacattcctggacaaacagaatgaagtggagatcccatcacccacgatgaaggaacgagaaaaacagcaagcgccgcgaccaagaccctcccagccgcccccgccccctgtaccacacttacagcccatgtcccaaatcacagggttgaaaaagttgatgcatagtaacagcctgaacaactctaacattccccgatttggggtgaagaccgatcaagaagagctcctggcccaagaactggagaacctgaacaagtggggcctgaacatcttttgcgtgtcggattacgctggaggccgctcactcacctgcatcatgtacatgatattccaggagcgggacctgctgaagaaattccgcatccctgtggacacgatggtgacatacatgctgacgctggaggatcactaccacgctgacgtggcctaccataacagcctgcacgcagctgacgtgctgcagtccacccacgtactgctggccacgcctgcactagatgcagtgttcacggacctggagattctcgccgccctcttcgcggctgccatccacgatgtggatcaccctggggtctccaaccagttcctcatcaacaccaattcggagctggcgctcatgtacaacgatgagtcggtgctcgagaatcaccacctggccgtgggcttcaagctgctgcaggaggacaactgcgacatcttccagaacctcagcaagcgccagcggcagagcctacgcaagatggtcatcgacatggtgctggccacggacatgtccaagcacatgaccctcctggctgacctgaagaccatggtggagaccaagaaagtgaccagctcaggggtcctcctgctagataactactccgaccgcatccaggtcctccggaacatggtgcactgtgccgacctcagcaaccccaccaagccgctggagctgtaccgccagtggacagaccgcatcatggccgagttcttccagcagggtgaccgagagcgcgagcgtggcatggaaatcagccccatgtgtgacaagcacactgcctccgtggagaagtctcaggtgggttttattgactacattgtgcacccattgtgggagacctgggcggaccttgtccacccagatgcccaggagatcttggacactttggaggacaaccgggactggtactacagcgccatccggcagagcccatctccgccacccgaggaggagtcaagggggccaggccacccacccctgcctgacaagttccagtttgagctgacgctggaggaggaagaggaggaagaaatatcaatggcccagataccgtgcacagcccaagaggcattgactgcgcagggattgtcaggagtcgaggaagctctggatgcaaccatagcctgggaggcatccccggcccaggagtcgttggaagttatggcacaggaagcatccctggaggccgagctggaggcagtgtatttgacacagcaggcacagtccacaggcagtgcacctgtggctccggatgagttctcgtcccgggaggaattcgtggttgctgtaagccacagcagcccctctgccctggctcttcaaagcccccttctccctgcttggaggaccctgtctgtttcagagcatgccccgggcctcccgggcctcccctccacggcggccgaggtggaggcccaacgagagcaccaggctgccaagagggcttgcagtgcctgcgcagggacatttggggaggacacatccgcactcccagctcctggtggcggggggtcaggtggagaccctacctgatccccagacctctgtccctgttcccctccactcctcccctcactcccctgctcccccgaccacctcctcctctgcctcaaagactcttgtcctcttgtccctcctgagaaaaaagaaaacgaaaagtggggtttttttctgttttctttttttcccctttccccctgcccccacccacggggcctttttttggaggtgggggctggggaatgaggggctgaggtcccggaagggattttatttttttgaattttaattgtaacatttttagaaaaagaacaaaaaaagaaaaaaaaaagaaagaaacacagcaactgtagatgctcctgttcctggttcccgctttccacttccaaatccctcccctcaccttcccccactgccccccaagttccaggctcagtcttccagccgcctggggagtctctacctgggcccaagcaggtgtggggcctccttctgggcttttcttctgaatttagaggatttctagaacgtggtcaggaatagccattctaggcggggctggggccagggtggggggcagtcactgtgggaggtcccagctccagcccccctctggtttgctgcctcctctcccctctaaaaaagtcttccgcttgattttgcacaatcccggcgatactcctggcgatactgactagaaagtcagggagctgggggagctgttcactttaggatacgggggtggtatggaagggagcgttcacaccgccagcctcgggcctgggatttgaggagggccctagacctcctccactctccatcccctttcccttccactttgggttcactttgaattttctccgttttttggggcagtggctctgatccactcacccccccgccccccgccccacttctagctgcttctcctcttgtttctgccttaataattcccacggccacaggcaagggggttgcagtggccgcctgcaccttggatgaggcagggccaggcgcccagaacccccatcctggccgcacccccctttccagggtcctccggaccccaccttccacactctgatcacagcccccctaccttttgccctaggaggaagcaataatggtgtataccctcattctcattcctgggcagcccttccttccaccctggcaccaaaataatttctcctccatccgtaccttgcctagcctctccctctcccccagctagtccctgagcaatacggcagacagatgcaagaccatttttctccaagccatgggggactgtttggaaggaaagccccctctctccctcctcccctcgccctcggcctggttctgcagctggaccgacctcattcatcgcctgccccctacccaattctgagcacacggtactgtagcccccagttcctccctagccttccatccctctgtccaccccagggggaggtaaccccgcactcacactcccttgatgctgtctgtacagggttcatattttgtagcgaaagtcgtttttgtcccagccggcgatcggagtgggccttttctttctttttgttcattctttacctttttttcttttctttctttcttttttgtacatactgtaaggttggtttgtaaattattctacggaggcaaaaagggaaaataaaaacttgcccttccctggctgacccagtcgggaaggtagggaaggaggtctcccgttgggagagtctctgttcctgctgtattatacaaactgtaccatagtcctgggaaaagggtggactcaccgctgttgttttatgggaagtcgtgtcatcctaggggttggggctgggcagagcctgtcccctccccccttctccaggagccagggggtgactggagagacagacccacccccaagcagggctcctctccccagggtgagcacaggacctctgtaagctgcttgtgtattgtccactttgacgatcagtcattcggtccgttgatcaataatccttcgatcttgtctccaattaaaccgaggctttcaccgatttacctggctga

SEQ ID NO: 447839 - DNA, 4046 bp, Homo sapiens
ggagagacatggaaaataagcccttcttcctttctcccctggggctcgtgaacagcttagctaagaggctgagctgtgctggggccagtcgtgctggttcctatcctagctttgccacttatgagctgcatgatcttggagaagtcacatcgcctctctgagccttggtgccttcacctgccaaacgagatcaagtgcttagagcaatacttggcagatcataagtactcaaaagacagtggctgtgattgctttcgctattttgcagcccagtaggacgagggcagtacattctgtgctgttgaacctgtcacccactgggtgagcaataatggtgcttccttcagaccaaggcttcaaactcctaggaaatgttctccagggccctgagccttacaggcttctgacctctggcctccgtctccaccaggaactggagaacctgaacaagtggggcctgaacatcttttgcgtgtcggattacgctggaggccgctcactcacctgcatcatgtacatgatattccaggagcgggacctgctgaagaaattccgcatccctgtggacacgatggtgacatacatgctgacgctggaggatcactaccacgctgacgtggcctaccataacagcctgcacgcagctgacgtgctgcagtccacccacgtactgctggccacgcctgcactagatgcagtgttcacggacctggagattctcgccgccctcttcgcggctgccatccacgatgtggatcaccctggggtctccaaccagttcctcatcaacaccaattcggagctggcgctcatgtacaacgatgagtcggtgctcgagaatcaccacctggccgtgggcttcaagctgctgcaggaggacaactgcgacatcttccagaacctcagcaagcgccagcggcagagcctacgcaagatggtcatcgacatggtgctggccacggacatgtccaagcacatgaccctcctggctgacctgaagaccatggtggagaccaagaaagtgaccagctcaggggtcctcctgctagataactactccgaccgcatccaggtcctccggaacatggtgcactgtgccgacctcagcaaccccaccaagccgctggagctgtaccgccagtggacagaccgcatcatggccgagttcttccagcagggtgaccgagagcgcgagcgtggcatggaaatcagccccatgtgtgacaagcacactgcctccgtggagaagtctcaggtacaggctcggggcattgatggacgggcacagggtgggttttattgactacattgtgcacccattgtgggagacctgggcggaccttgtccacccagatgcccaggagatcttggacactttggaggacaaccgggactggtactacagcgccatccggcagagcccatctccgccacccgaggaggagtcaagggggccaggccacccacccctgcctgacaagttccagtttgagctgacgctggaggaggaagaggaggaagaaatatcaatggcccagataccgtgcacagcccaagaggcattgactgcgcagggattgtcaggagtcgaggaagctctggatgcaaccatagcctgggaggcatccccggcccaggagtcgttggaagttatggcacaggaagcatccctggaggccgagctggaggcagtgtatttgacacagcaggcacagtccacaggcagtgcacctgtggctccggatgagttctcgtcccgggaggaattcgtggttgctgtaagccacagcagcccctctgccctggctcttcaaagcccccttctccctgcttggaggaccctgtctgtttcagagcatgccccgggcctcccgggcctcccctccacggcggccgaggtggaggcccaacgagagcaccaggctgccaagagggcttgcagtgcctgcgcagggacatttggggaggacacatccgcactcccagctcctggtggcggggggtcaggtggagaccctacctgatccccagacctctgtccctgttcccctccactcctcccctcactcccctgctcccccgaccacctcctcctctgcctcaaagactcttgtcctcttgtccctcctgagaaaaaagaaaacgaaaagtggggtttttttctgttttctttttttcccctttccccctgcccccacccacggggcctttttttggaggtgggggctggggaatgaggggctgaggtcccggaagggattttatttttttgaattttaattgtaacatttttagaaaaagaacaaaaaaagaaaaaaaaaagaaagaaacacagcaactgtagatgctcctgttcctggttcccgctttccacttccaaatccctcccctcaccttcccccactgccccccaagttccaggctcagtcttccagccgcctggggagtctctacctgggcccaagcaggtgtggggcctccttctgggcttttcttctgaatttagaggatttctagaacgtggtcaggaatagccattctaggcggggctggggccagggtggggggcagtcactgtgggaggtcccagctccagcccccctctggtttgctgcctcctctcccctctaaaaaagtcttccgcttgattttgcacaatcccggcgatactcctggcgatactgactagaaagtcagggagctgggggagctgttcactttaggatacgggggtggtatggaagggagcgttcacaccgccagcctcgggcctgggatttgaggagggccctagacctcctccactctccatcccctttcccttccactttgggttcactttgaattttctccgttttttggggcagtggctctgatccactcacccccccgccccccgccccacttctagctgcttctcctcttgtttctgccttaataattcccacggccacaggcaagggggttgcagtggccgcctgcaccttggatgaggcagggccaggcgcccagaacccccatcctggccgcacccccctttccagggtcctccggaccccaccttccacactctgatcacagcccccctaccttttgccctaggaggaagcaataatggtgtataccctcattctcattcctgggcagcccttccttccaccctggcaccaaaataatttctcctccatccgtaccttgcctagcctctccctctcccccagctagtccctgagcaatacggcagacagatgcaagaccatttttctccaagccatgggggactgtttggaaggaaagccccctctctccctcctcccctcgccctcggcctggttctgcagctggaccgacctcattcatcgcctgccccctacccaattctgagcacacggtactgtagcccccagttcctccctagccttccatccctctgtccaccccagggggaggtaaccccgcactcacactcccttgatgctgtctgtacagggttcatattttgtagcgaaagtcgtttttgtcccagccggcgatcggagtgggccttttctttctttttgttcattctttacctttttttcttttctttctttcttttttgtacatactgtaaggttggtttgtaaattattctacggaggcaaaaagggaaaataaaaacttgcccttccctggctgacccagtcgggaaggtagggaaggaggtctcccgttgggagagtctctgttcctgctgtattatacaaactgtaccatagtcctgggaaaagggtggactcaccgctgttgttttatgggaagtcgtgtcatcctaggggttggggctgggcagagcctgtcccctccccccttctccaggagccagggggtgactggagagacagacccacccccaagcagggctcctctccccagggtgagcacaggacctctgtaagctgcttgtgtattgtccactttgacgatcagtcattcggtccgttgatcaataatccttcgatcttgtctccaattaaaccgaggctttcaccgatttacctggctga

SEQ ID NO: 447840 - DNA, 4437 bp, Homo sapiens
gcgcggccgcgcggcctaggccgcatcccggagctgcaactggtggccttcccggtggcggtggcggctgaggacgaggcgttcctgcccgagcccctggccccgcgcgcgccccgccgcccgcgttcgccgccctcctcgcccgtcttcttcgccagcccgtccccaactttccgcagacgccttcggcttctccgcagctgccaggatttgggccgccaggcttgggctggggctggcttcgaggcagagaatgggccgacaccatctcctggccgcagccccctggactcgcaggcgagcccaggactcgtgctgcacgccggggcggccaccagccagcgccgggagtccttcctgtaccgctcagacagcgactatgacatgtcacccaagaccatgtcccggaactcatcggtcaccagcgaggcgcacgctgaagacctcatcgtaacaccatttgctcaggtgctggccagcctccggagcgtccgtagcaacttctcactcctgaccaatgtgcccgttcccagtaacaagcggtccccgctgggcggccccacccctgtctgcaaggccacgctgtcagaagaaacgtgtcagcagttggcccgggagactctggaggagctggactggtgtctggagcagctggagaccatgcagacctatcgctctgtcagcgagatggcctcgcacaagttcaaaaggatgttgaaccgtgagctcacacacctgtcagaaatgagcaggtccggaaaccaggtctcagagtacatttccacaacattcctggacaaacagaatgaagtggagatcccatcacccacgatgaaggaacgagaaaaacagcaagcgccgcgaccaagaccctcccagccgcccccgccccctgtaccacacttacagcccatgtcccaaatcacagggttgaaaaagttgatgcatagtaacagcctgaacaactctaacattccccgatttggggtgaagaccgatcaagaagagctcctggcccaagaactggagaacctgaacaagtggggcctgaacatcttttgcgtgtcggattacgctggaggccgctcactcacctgcatcatgtacatgatattccaggcagtgttcacggacctggagattctcgccgccctcttcgcggctgccatccacgatgtggatcaccctggggtctccaaccagttcctcatcaacaccaattcggagctggcgctcatgtacaacgatgagtcggtgctcgagaatcaccacctggccgtgggcttcaagctgctgcaggaggacaactgcgacatcttccagaacctcagcaagcgccagcggcagagcctacgcaagatggtcatcgacatggtgctggccacggacatgtccaagcacatgaccctcctggctgacctgaagaccatggtggagaccaagaaagtgaccagctcaggggtcctcctgctagataactactccgaccgcatccaggtcctccggaacatggtgcactgtgccgacctcagcaaccccaccaagccgctggagctgtaccgccagtggacagaccgcatcatggccgagttcttccagcagggtgaccgagagcgcgagcgtggcatggaaatcagccccatgtgtgacaagcacactgcctccgtggagaagtctcaggtgggttttattgactacattgtgcacccattgtgggagacctgggcggaccttgtccacccagatgcccaggagatcttggacactttggaggacaaccgggactggtactacagcgccatccggcagagcccatctccgccacccgaggaggagtcaagggggccaggccacccacccctgcctgacaagttccagtttgagctgacgctggaggaggaagaggaggaagaaatatcaatggcccagataccgtgcacagcccaagaggcattgactgcgcagggattgtcaggagtcgaggaagctctggatgcaaccatagcctgggaggcatccccggcccaggagtcgttggaagttatggcacaggaagcatccctggaggccgagctggaggcagtgtatttgacacagcaggcacagtccacaggcagtgcacctgtggctccggatgagttctcgtcccgggaggaattcgtggttgctgtaagccacagcagcccctctgccctggctcttcaaagcccccttctccctgcttggaggaccctgtctgtttcagagcatgccccgggcctcccgggcctcccctccacggcggccgaggtggaggcccaacgagagcaccaggctgccaagagggcttgcagtgcctgcgcagggacatttggggaggacacatccgcactcccagctcctggtggcggggggtcaggtggagaccctacctgatccccagacctctgtccctgttcccctccactcctcccctcactcccctgctcccccgaccacctcctcctctgcctcaaagactcttgtcctcttgtccctcctgagaaaaaagaaaacgaaaagtggggtttttttctgttttctttttttcccctttccccctgcccccacccacggggcctttttttggaggtgggggctggggaatgaggggctgaggtcccggaagggattttatttttttgaattttaattgtaacatttttagaaaaagaacaaaaaaagaaaaaaaaaagaaagaaacacagcaactgtagatgctcctgttcctggttcccgctttccacttccaaatccctcccctcaccttcccccactgccccccaagttccaggctcagtcttccagccgcctggggagtctctacctgggcccaagcaggtgtggggcctccttctgggcttttcttctgaatttagaggatttctagaacgtggtcaggaatagccattctaggcggggctggggccagggtggggggcagtcactgtgggaggtcccagctccagcccccctctggtttgctgcctcctctcccctctaaaaaagtcttccgcttgattttgcacaatcccggcgatactcctggcgatactgactagaaagtcagggagctgggggagctgttcactttaggatacgggggtggtatggaagggagcgttcacaccgccagcctcgggcctgggatttgaggagggccctagacctcctccactctccatcccctttcccttccactttgggttcactttgaattttctccgttttttggggcagtggctctgatccactcacccccccgccccccgccccacttctagctgcttctcctcttgtttctgccttaataattcccacggccacaggcaagggggttgcagtggccgcctgcaccttggatgaggcagggccaggcgcccagaacccccatcctggccgcacccccctttccagggtcctccggaccccaccttccacactctgatcacagcccccctaccttttgccctaggaggaagcaataatggtgtataccctcattctcattcctgggcagcccttccttccaccctggcaccaaaataatttctcctccatccgtaccttgcctagcctctccctctcccccagctagtccctgagcaatacggcagacagatgcaagaccatttttctccaagccatgggggactgtttggaaggaaagccccctctctccctcctcccctcgccctcggcctggttctgcagctggaccgacctcattcatcgcctgccccctacccaattctgagcacacggtactgtagcccccagttcctccctagccttccatccctctgtccaccccagggggaggtaaccccgcactcacactcccttgatgctgtctgtacagggttcatattttgtagcgaaagtcgtttttgtcccagccggcgatcggagtgggccttttctttctttttgttcattctttacctttttttcttttctttctttcttttttgtacatactgtaaggttggtttgtaaattattctacggaggcaaaaagggaaaataaaaacttgcccttccctggctgacccagtcgggaaggtagggaaggaggtctcccgttgggagagtctctgttcctgctgtattatacaaactgtaccatagtcctgggaaaagggtggactcaccgctgttgttttatgggaagtcgtgtcatcctaggggttggggctgggcagagcctgtcccctccccccttctccaggagccagggggtgactggagagacagacccacccccaagcagggctcctctccccagggtgagcacaggacctctgtaagctgcttgtgtattgtccactttgacgatcagtcattcggtccgttgatcaataatccttcgatcttgtctccaattaaaccgaggctttcaccgatttacctggctga

SEQ ID NO: 447841 - DNA, 3977 bp, Homo sapiens
cagcctcctcctgggacccttgccctgcccccctcccatgggcacggaccccccaccgcctccacccactgccgcgggggggcccgttggggcccagggctggcgggccatgtaaccagggctgctgctgggagcgcggaggggaagggagcccccagccctgctgggccggcccaggcccctccgcggctcccccttccactacccacctgcccggcaccccctccccagtggttgttaaccccgggactccccaagcccagcctctgtgtgcagcagccccaggcgggctaagtctccaagatgcccttggtggatttcttctgcgagacctgctctaagccttggctggtgggctggtgggaccagttcaaaaggatgttgaaccgtgagctcacacacctgtcagaaatgagcaggtccggaaaccaggtctcagagtacatttccacaacattcctgggcagtgttcacggacctggagattctcgccgccctcttcgcggctgccatccacgatgtggatcaccctggggtctccaaccagttcctcatcaacaccaattcggagctggcgctcatgtacaacgatgagtcggtgctcgagaatcaccacctggccgtgggcttcaagctgctgcaggaggacaactgcgacatcttccagaacctcagcaagcgccagcggcagagcctacgcaagatggtcatcgacatggtgggcggggctggggcgggacggagcgggaaaggaagcctaggagtcgagggctttggggaggagtgggtctgagtcccagaggaaccctcaacctggacagagcgggcggcttctacctggtgaaaacttcagaggcccgggtcagtctggggggcgggtgtcagcggccccagtgacgcccccttgcccgcaggtgctggccacggacatgtccaagcacatgaccctcctggctgacctgaagaccatggtggagaccaagaaagtgaccagctcaggggtcctcctgctagataactactccgaccgcatccaggtcctccggaacatggtgcactgtgccgacctcagcaaccccaccaagccgctggagctgtaccgccagtggacagaccgcatcatggccgagttcttccagcagggtgaccgagagcgcgagcgtggcatggaaatcagccccatgtgtgacaagcacactgcctccgtggagaagtctcaggtgggttttattgactacattgtgcacccattgtgggagacctgggcggaccttgtccacccagatgcccaggagatcttggacactttggaggacaaccgggactggtactacagcgccatccggcagagcccatctccgccacccgaggaggagtcaagggggccaggccacccacccctgcctgacaagttccagtttgagctgacgctggaggaggaagaggaggaagaaatatcaatggcccagataccgtgcacagcccaagaggcattgactgcgcagggattgtcaggagtcgaggaagctctggatgcaaccatagcctgggaggcatccccggcccaggagtcgttggaagttatggcacaggaagcatccctggaggccgagctggaggcagtgtatttgacacagcaggcacagtccacaggcagtgcacctgtggctccggatgagttctcgtcccgggaggaattcgtggttgctgtaagccacagcagcccctctgccctggctcttcaaagcccccttctccctgcttggaggaccctgtctgtttcagagcatgccccgggcctcccgggcctcccctccacggcggccgaggtggaggcccaacgagagcaccaggctgccaagagggcttgcagtgcctgcgcagggacatttggggaggacacatccgcactcccagctcctggtggcggggggtcaggtggagaccctacctgatccccagacctctgtccctgttcccctccactcctcccctcactcccctgctcccccgaccacctcctcctctgcctcaaagactcttgtcctcttgtccctcctgagaaaaaagaaaacgaaaagtggggtttttttctgttttctttttttcccctttccccctgcccccacccacggggcctttttttggaggtgggggctggggaatgaggggctgaggtcccggaagggattttatttttttgaattttaattgtaacatttttagaaaaagaacaaaaaaagaaaaaaaaaagaaagaaacacagcaactgtagatgctcctgttcctggttcccgctttccacttccaaatccctcccctcaccttcccccactgccccccaagttccaggctcagtcttccagccgcctggggagtctctacctgggcccaagcaggtgtggggcctccttctgggcttttcttctgaatttagaggatttctagaacgtggtcaggaatagccattctaggcggggctggggccagggtggggggcagtcactgtgggaggtcccagctccagcccccctctggtttgctgcctcctctcccctctaaaaaagtcttccgcttgattttgcacaatcccggcgatactcctggcgatactgactagaaagtcagggagctgggggagctgttcactttaggatacgggggtggtatggaagggagcgttcacaccgccagcctcgggcctgggatttgaggagggccctagacctcctccactctccatcccctttcccttccactttgggttcactttgaattttctccgttttttggggcagtggctctgatccactcacccccccgccccccgccccacttctagctgcttctcctcttgtttctgccttaataattcccacggccacaggcaagggggttgcagtggccgcctgcaccttggatgaggcagggccaggcgcccagaacccccatcctggccgcacccccctttccagggtcctccggaccccaccttccacactctgatcacagcccccctaccttttgccctaggaggaagcaataatggtgtataccctcattctcattcctgggcagcccttccttccaccctggcaccaaaataatttctcctccatccgtaccttgcctagcctctccctctcccccagctagtccctgagcaatacggcagacagatgcaagaccatttttctccaagccatgggggactgtttggaaggaaagccccctctctccctcctcccctcgccctcggcctggttctgcagctggaccgacctcattcatcgcctgccccctacccaattctgagcacacggtactgtagcccccagttcctccctagccttccatccctctgtccaccccagggggaggtaaccccgcactcacactcccttgatgctgtctgtacagggttcatattttgtagcgaaagtcgtttttgtcccagccggcgatcggagtgggccttttctttctttttgttcattctttacctttttttcttttctttctttcttttttgtacatactgtaaggttggtttgtaaattattctacggaggcaaaaagggaaaataaaaacttgcccttccctggctgacccagtcgggaaggtagggaaggaggtctcccgttgggagagtctctgttcctgctgtattatacaaactgtaccatagtcctgggaaaagggtggactcaccgctgttgttttatgggaagtcgtgtcatcctaggggttggggctgggcagagcctgtcccctccccccttctccaggagccagggggtgactggagagacagacccacccccaagcagggctcctctccccagggtgagcacaggacctctgtaagctgcttgtgtattgtccactttgacgatcagtcattcggtccgttgatcaataatccttcgatcttgtctccaattaaaccgaggctttcaccgatttacctggctga

SEQ ID NO: 447842 - DNA, 4269 bp, Homo sapiens
cagcctcctcctgggacccttgccctgcccccctcccatgggcacggaccccccaccgcctccacccactgccgcgggggggcccgttggggcccagggctggcgggccatgtaaccagggctgctgctgggagcgcggaggggaagggagcccccagccctgctgggccggcccaggcccctccgcggctcccccttccactacccacctgcccggcaccccctccccagtggttgttaaccccgggactccccaagcccagcctctgtgtgcagcagccccaggcgggctaagtctccaagatgcccttggtggatttcttctgcgagacctgctctaagccttggctggtgggctggtgggaccagttcaaaaggatgttgaaccgtgagctcacacacctgtcagaaatgagcaggtccggaaaccaggtctcagagtacatttccacaacattcctggacaaacagaatgaagtggagatcccatcacccacgatgaaggaacgagaaaaacagcaagcgccgcgaccaagaccctcccagccgcccccgccccctgtaccacacttacagcccatgtcccaaatcacagggttgaaaaagttgatgcatagtaacagcctgaacaactctaacattccccgatttggggtgaagaccgatcaagaagagctcctggcccaagaactggagaacctgaacaagtggggcctgaacatcttttgcgtgtcggattacgctggaggccgctcactcacctgcatcatgtacatgatattccaggagcgggacctgctgaagaaattccgcatccctgtggacacgatggtgacatacatgctgacgctggaggatcactaccacgctgacgtggcctaccataacagcctgcacgcagctgacgtgctgcagtccacccacgtactgctggccacgcctgcactagatgcagtgttcacggacctggagattctcgccgccctcttcgcggctgccatccacgatgtggatcaccctggggtctccaaccagttcctcatcaacaccaattcggagctggcgctcatgtacaacgatgagtcggtgctcgagaatcaccacctggccgtgggcttcaagctgctgcaggaggacaactgcgacatcttccagaacctcagcaagcgccagcggcagagcctacgcaagatggtcatcgacatggtgctggccacggacatgtccaagcacatgaccctcctggctgacctgaagaccatggtggagaccaagaaagtgaccagctcaggggtcctcctgctagataactactccgaccgcatccaggtcctccggaacatggtgcactgtgccgacctcagcaaccccaccaagccgctggagctgtaccgccagtggacagaccgcatcatggccgagttcttccagcagggtgaccgagagcgcgagcgtggcatggaaatcagccccatgtgtgacaagcacactgcctccgtggagaagtctcaggtgggttttattgactacattgtgcacccattgtgggagacctgggcggaccttgtccacccagatgcccaggagatcttggacactttggaggacaaccgggactggtactacagcgccatccggcagagcccatctccgccacccgaggaggagtcaagggggccaggccacccacccctgcctgacaagttccagtttgagctgacgctggaggaggaagaggaggaagaaatatcaatggcccagataccgtgcacagcccaagaggcattgactgcgcagggattgtcaggagtcgaggaagctctggatgcaaccatagcctgggaggcatccccggcccaggagtcgttggaagttatggcacaggaagcatccctggaggccgagctggaggcagtgtatttgacacagcaggcacagtccacaggcagtgcacctgtggctccggatgagttctcgtcccgggaggaattcgtggttgctgtaagccacagcagcccctctgccctggctcttcaaagcccccttctccctgcttggaggaccctgtctgtttcagagcatgccccgggcctcccgggcctcccctccacggcggccgaggtggaggcccaacgagagcaccaggctgccaagagggcttgcagtgcctgcgcagggacatttggggaggacacatccgcactcccagctcctggtggcggggggtcaggtggagaccctacctgatccccagacctctgtccctgttcccctccactcctcccctcactcccctgctcccccgaccacctcctcctctgcctcaaagactcttgtcctcttgtccctcctgagaaaaaagaaaacgaaaagtggggtttttttctgttttctttttttcccctttccccctgcccccacccacggggcctttttttggaggtgggggctggggaatgaggggctgaggtcccggaagggattttatttttttgaattttaattgtaacatttttagaaaaagaacaaaaaaagaaaaaaaaaagaaagaaacacagcaactgtagatgctcctgttcctggttcccgctttccacttccaaatccctcccctcaccttcccccactgccccccaagttccaggctcagtcttccagccgcctggggagtctctacctgggcccaagcaggtgtggggcctccttctgggcttttcttctgaatttagaggatttctagaacgtggtcaggaatagccattctaggcggggctggggccagggtggggggcagtcactgtgggaggtcccagctccagcccccctctggtttgctgcctcctctcccctctaaaaaagtcttccgcttgattttgcacaatcccggcgatactcctggcgatactgactagaaagtcagggagctgggggagctgttcactttaggatacgggggtggtatggaagggagcgttcacaccgccagcctcgggcctgggatttgaggagggccctagacctcctccactctccatcccctttcccttccactttgggttcactttgaattttctccgttttttggggcagtggctctgatccactcacccccccgccccccgccccacttctagctgcttctcctcttgtttctgccttaataattcccacggccacaggcaagggggttgcagtggccgcctgcaccttggatgaggcagggccaggcgcccagaacccccatcctggccgcacccccctttccagggtcctccggaccccaccttccacactctgatcacagcccccctaccttttgccctaggaggaagcaataatggtgtataccctcattctcattcctgggcagcccttccttccaccctggcaccaaaataatttctcctccatccgtaccttgcctagcctctccctctcccccagctagtccctgagcaatacggcagacagatgcaagaccatttttctccaagccatgggggactgtttggaaggaaagccccctctctccctcctcccctcgccctcggcctggttctgcagctggaccgacctcattcatcgcctgccccctacccaattctgagcacacggtactgtagcccccagttcctccctagccttccatccctctgtccaccccagggggaggtaaccccgcactcacactcccttgatgctgtctgtacagggttcatattttgtagcgaaagtcgtttttgtcccagccggcgatcggagtgggccttttctttctttttgttcattctttacctttttttcttttctttctttcttttttgtacatactgtaaggttggtttgtaaattattctacggaggcaaaaagggaaaataaaaacttgcccttccctggctgacccagtcgggaaggtagggaaggaggtctcccgttgggagagtctctgttcctgctgtattatacaaactgtaccatagtcctgggaaaagggtggactcaccgctgttgttttatgggaagtcgtgtcatcctaggggttggggctgggcagagcctgtcccctccccccttctccaggagccagggggtgactggagagacagacccacccccaagcagggctcctctccccagggtgagcacaggacctctgtaagctgcttgtgtattgtccactttgacgatcagtcattcggtccgttgatcaataatccttcgatcttgtctccaattaaaccgaggctttcaccgatttacctggctga

SEQ ID NO: 447843 - DNA, 4602 bp, Homo sapiens
gcgcggccgcgcggcctaggccgcatcccggagctgcaactggtggccttcccggtggcggtggcggctgaggacgaggcgttcctgcccgagcccctggccccgcgcgcgccccgccgcccgcgttcgccgccctcctcgcccgtcttcttcgccagcccgtccccaactttccgcagacgccttcggcttctccgcagctgccaggatttgggccgccaggcttgggctggggctggcttcgaggcagagaatgggccgacaccatctcctggccgcagccccctggactcgcaggcgagcccaggactcgtgctgcacgccggggcggccaccagccagcgccgggagtccttcctgtaccgctcagacagcgactatgacatgtcacccaagaccatgtcccggaactcatcggtcaccagcgaggcgcacgctgaagacctcatcgtaacaccatttgctcaggtgctggccagcctccggagcgtccgtagcaacttctcactcctgaccaatgtgcccgttcccagtaacaagcggtccccgctgggcggccccacccctgtctgcaaggccacgctgtcagaagaaacgtgtcagcagttggcccgggagactctggaggagctggactggtgtctggagcagctggagaccatgcagacctatcgctctgtcagcgagatggcctcgcacaagttcaaaaggatgttgaaccgtgagctcacacacctgtcagaaatgagcaggtccggaaaccaggtctcagagtacatttccacaacattcctggacaaacagaatgaagtggagatcccatcacccacgatgaaggaacgagaaaaacagcaagcgccgcgaccaagaccctcccagccgcccccgccccctgtaccacacttacagcccatgtcccaaatcacagggttgaaaaagttgatgcatagtaacagcctgaacaactctaacattccccgatttggggtgaagaccgatcaagaagagctcctggcccaagaactggagaacctgaacaagtggggcctgaacatcttttgcgtgtcggattacgctggaggccgctcactcacctgcatcatgtacatgatattccaggagcgggacctgctgaagaaattccgcatccctgtggacacgatggtgacatacatgctgacgctggaggatcactaccacgctgacgtggcctaccataacagcctgcacgcagctgacgtgctgcagtccacccacgtactgctggccacgcctgcactagatgcagtgttcacggacctggagattctcgccgccctcttcgcggctgccatccacgatgtggatcaccctggggtctccaaccagttcctcatcaacaccaattcggagctggcgctcatgtacaacgatgagtcggtgctcgagaatcaccacctggccgtgggcttcaagctgctgcaggaggacaactgcgacatcttccagaacctcagcaagcgccagcggcagagcctacgcaagatggtcatcgacatggtgctggccacggacatgtccaagcacatgaccctcctggctgacctgaagaccatggtggagaccaagaaagtgaccagctcaggggtcctcctgctagataactactccgaccgcatccaggtcctccggaacatggtgcactgtgccgacctcagcaaccccaccaagccgctggagctgtaccgccagtggacagaccgcatcatggccgagttcttccagcagggtgaccgagagcgcgagcgtggcatggaaatcagccccatgtgtgacaagcacactgcctccgtggagaagtctcaggtgggttttattgactacattgtgcacccattgtgggagacctgggcggaccttgtccacccagatgcccaggagatcttggacactttggaggacaaccgggactggtactacagcgccatccggcagagcccatctccgccacccgaggaggagtcaagggggccaggccacccacccctgcctgacaagttccagtttgagctgacgctggaggaggaagaggaggaagaaatatcaatggcccagataccgtgcacagcccaagaggcattgactgcgcagggattgtcaggagtcgaggaagctctggatgcaaccatagcctgggaggcatccccggcccaggagtcgttggaagttatggcacaggaagcatccctggaggccgagctggaggcagtgtatttgacacagcaggcacagtccacaggcagtgcacctgtggctccggatgagttctcgtcccgggaggaattcgtggttgctgtaagccacagcagcccctctgccctggctcttcaaagcccccttctccctgcttggaggaccctgtctgtttcagagcatgccccgggcctcccgggcctcccctccacggcggccgaggtggaggcccaacgagagcaccaggctgccaagagggcttgcagtgcctgcgcagggacatttggggaggacacatccgcactcccagctcctggtggcggggggtcaggtggagaccctacctgatccccagacctctgtccctgttcccctccactcctcccctcactcccctgctcccccgaccacctcctcctctgcctcaaagactcttgtcctcttgtccctcctgagaaaaaagaaaacgaaaagtggggtttttttctgttttctttttttcccctttccccctgcccccacccacggggcctttttttggaggtgggggctggggaatgaggggctgaggtcccggaagggattttatttttttgaattttaattgtaacatttttagaaaaagaacaaaaaaagaaaaaaaaaagaaagaaacacagcaactgtagatgctcctgttcctggttcccgctttccacttccaaatccctcccctcaccttcccccactgccccccaagttccaggctcagtcttccagccgcctggggagtctctacctgggcccaagcaggtgtggggcctccttctgggcttttcttctgaatttagaggatttctagaacgtggtcaggaatagccattctaggcggggctggggccagggtggggggcagtcactgtgggaggtcccagctccagcccccctctggtttgctgcctcctctcccctctaaaaaagtcttccgcttgattttgcacaatcccggcgatactcctggcgatactgactagaaagtcagggagctgggggagctgttcactttaggatacgggggtggtatggaagggagcgttcacaccgccagcctcgggcctgggatttgaggagggccctagacctcctccactctccatcccctttcccttccactttgggttcactttgaattttctccgttttttggggcagtggctctgatccactcacccccccgccccccgccccacttctagctgcttctcctcttgtttctgccttaataattcccacggccacaggcaagggggttgcagtggccgcctgcaccttggatgaggcagggccaggcgcccagaacccccatcctggccgcacccccctttccagggtcctccggaccccaccttccacactctgatcacagcccccctaccttttgccctaggaggaagcaataatggtgtataccctcattctcattcctgggcagcccttccttccaccctggcaccaaaataatttctcctccatccgtaccttgcctagcctctccctctcccccagctagtccctgagcaatacggcagacagatgcaagaccatttttctccaagccatgggggactgtttggaaggaaagccccctctctccctcctcccctcgccctcggcctggttctgcagctggaccgacctcattcatcgcctgccccctacccaattctgagcacacggtactgtagcccccagttcctccctagccttccatccctctgtccaccccagggggaggtaaccccgcactcacactcccttgatgctgtctgtacagggttcatattttgtagcgaaagtcgtttttgtcccagccggcgatcggagtgggccttttctttctttttgttcattctttacctttttttcttttctttctttcttttttgtacatactgtaaggttggtttgtaaattattctacggaggcaaaaagggaaaataaaaacttgcccttccctggctgacccagtcgggaaggtagggaaggaggtctcccgttgggagagtctctgttcctgctgtattatacaaactgtaccatagtcctgggaaaagggtggactcaccgctgttgttttatgggaagtcgtgtcatcctaggggttggggctgggcagagcctgtcccctccccccttctccaggagccagggggtgactggagagacagacccacccccaagcagggctcctctccccagggtgagcacaggacctctgtaagctgcttgtgtattgtccactttgacgatcagtcattcggtccgttgatcaataatccttcgatcttgtctccaattaaaccgaggctttcaccgatttacctggctga

SEQ ID NO: 447844 - DNA, 4798 bp, Homo sapiens
gcgcggccgcgcggcctaggccgcatcccggagctgcaactggtggccttcccggtggcggtggcggctgaggacgaggcgttcctgcccgagcccctggccccgcgcgcgccccgccgcccgcgttcgccgccctcctcgcccgtcttcttcgccagcccgtccccaactttccgcagacgccttcggcttctccgcagctgccaggatttgggccgccaggcttgggctggggctggcttcgaggcagagaatgggccgacaccatctcctggccgcagccccctggactcgcaggcgagcccaggactcgtgctgcacgccggggcggccaccagccagcgccgggagtccttcctgtaccgctcagacagcgactatgacatgtcacccaagaccatgtcccggaactcatcggtcaccagcgaggcgcacgctgaagacctcatcgtaacaccatttgctcaggtgctggccagcctccggagcgtccgtagcaacttctcactcctgaccaatgtgcccgttcccagtaacaagcggtccccgctgggcggccccacccctgtctgcaaggccacgctgtcagaagaaacgtgtcagcagttggcccgggagactctggaggagctggactggtgtctggagcagctggagaccatgcagacctatcgctctgtcagcgagatggcctcgcacaagttcaaaaggatgttgaaccgtgagctcacacacctgtcagaaatgagcaggtccggaaaccaggtctcagagtacatttccacaacattcctggacaaacagaatgaagtggagatcccatcacccacgatgaaggaacgagaaaaacagcaagcgccgcgaccaagaccctcccagccgcccccgccccctgtaccacacttacagcccatgtcccaaatcacagggttgaaaaagttgatgcatagtaacagcctgaacaactctaacattccccgatttggggtgaagaccgatcaagaagagctcctggcccaagaactggagaacctgaacaagtggggcctgaacatcttttgcgtgtcggattacgctggaggccgctcactcacctgcatcatgtacatgatattccaggagcgggacctgctgaagaaattccgcatccctgtggacacgatggtgacatacatgctgacgctggaggatcactaccacgctgacgtggcctaccataacagcctgcacgcagctgacgtgctgcagtccacccacgtactgctggccacgcctgcactagatgcagtgttcacggacctggagattctcgccgccctcttcgcggctgccatccacgatgtggatcaccctggggtctccaaccagttcctcatcaacaccaattcggagctggcgctcatgtacaacgatgagtcggtgctcgagaatcaccacctggccgtgggcttcaagctgctgcaggaggacaactgcgacatcttccagaacctcagcaagcgccagcggcagagcctacgcaagatggtcatcgacatggtgggcggggctggggcgggacggagcgggaaaggaagcctaggagtcgagggctttggggaggagtgggtctgagtcccagaggaaccctcaacctggacagagcgggcggcttctacctggtgaaaacttcagaggcccgggtcagtctggggggcgggtgtcagcggccccagtgacgcccccttgcccgcaggtgctggccacggacatgtccaagcacatgaccctcctggctgacctgaagaccatggtggagaccaagaaagtgaccagctcaggggtcctcctgctagataactactccgaccgcatccaggtcctccggaacatggtgcactgtgccgacctcagcaaccccaccaagccgctggagctgtaccgccagtggacagaccgcatcatggccgagttcttccagcagggtgaccgagagcgcgagcgtggcatggaaatcagccccatgtgtgacaagcacactgcctccgtggagaagtctcaggtgggttttattgactacattgtgcacccattgtgggagacctgggcggaccttgtccacccagatgcccaggagatcttggacactttggaggacaaccgggactggtactacagcgccatccggcagagcccatctccgccacccgaggaggagtcaagggggccaggccacccacccctgcctgacaagttccagtttgagctgacgctggaggaggaagaggaggaagaaatatcaatggcccagataccgtgcacagcccaagaggcattgactgcgcagggattgtcaggagtcgaggaagctctggatgcaaccatagcctgggaggcatccccggcccaggagtcgttggaagttatggcacaggaagcatccctggaggccgagctggaggcagtgtatttgacacagcaggcacagtccacaggcagtgcacctgtggctccggatgagttctcgtcccgggaggaattcgtggttgctgtaagccacagcagcccctctgccctggctcttcaaagcccccttctccctgcttggaggaccctgtctgtttcagagcatgccccgggcctcccgggcctcccctccacggcggccgaggtggaggcccaacgagagcaccaggctgccaagagggcttgcagtgcctgcgcagggacatttggggaggacacatccgcactcccagctcctggtggcggggggtcaggtggagaccctacctgatccccagacctctgtccctgttcccctccactcctcccctcactcccctgctcccccgaccacctcctcctctgcctcaaagactcttgtcctcttgtccctcctgagaaaaaagaaaacgaaaagtggggtttttttctgttttctttttttcccctttccccctgcccccacccacggggcctttttttggaggtgggggctggggaatgaggggctgaggtcccggaagggattttatttttttgaattttaattgtaacatttttagaaaaagaacaaaaaaagaaaaaaaaaagaaagaaacacagcaactgtagatgctcctgttcctggttcccgctttccacttccaaatccctcccctcaccttcccccactgccccccaagttccaggctcagtcttccagccgcctggggagtctctacctgggcccaagcaggtgtggggcctccttctgggcttttcttctgaatttagaggatttctagaacgtggtcaggaatagccattctaggcggggctggggccagggtggggggcagtcactgtgggaggtcccagctccagcccccctctggtttgctgcctcctctcccctctaaaaaagtcttccgcttgattttgcacaatcccggcgatactcctggcgatactgactagaaagtcagggagctgggggagctgttcactttaggatacgggggtggtatggaagggagcgttcacaccgccagcctcgggcctgggatttgaggagggccctagacctcctccactctccatcccctttcccttccactttgggttcactttgaattttctccgttttttggggcagtggctctgatccactcacccccccgccccccgccccacttctagctgcttctcctcttgtttctgccttaataattcccacggccacaggcaagggggttgcagtggccgcctgcaccttggatgaggcagggccaggcgcccagaacccccatcctggccgcacccccctttccagggtcctccggaccccaccttccacactctgatcacagcccccctaccttttgccctaggaggaagcaataatggtgtataccctcattctcattcctgggcagcccttccttccaccctggcaccaaaataatttctcctccatccgtaccttgcctagcctctccctctcccccagctagtccctgagcaatacggcagacagatgcaagaccatttttctccaagccatgggggactgtttggaaggaaagccccctctctccctcctcccctcgccctcggcctggttctgcagctggaccgacctcattcatcgcctgccccctacccaattctgagcacacggtactgtagcccccagttcctccctagccttccatccctctgtccaccccagggggaggtaaccccgcactcacactcccttgatgctgtctgtacagggttcatattttgtagcgaaagtcgtttttgtcccagccggcgatcggagtgggccttttctttctttttgttcattctttacctttttttcttttctttctttcttttttgtacatactgtaaggttggtttgtaaattattctacggaggcaaaaagggaaaataaaaacttgcccttccctggctgacccagtcgggaaggtagggaaggaggtctcccgttgggagagtctctgttcctgctgtattatacaaactgtaccatagtcctgggaaaagggtggactcaccgctgttgttttatgggaagtcgtgtcatcctaggggttggggctgggcagagcctgtcccctccccccttctccaggagccagggggtgactggagagacagacccacccccaagcagggctcctctccccagggtgagcacaggacctctgtaagctgcttgtgtattgtccactttgacgatcagtcattcggtccgttgatcaataatccttcgatcttgtctccaattaaaccgaggctttcaccgatttacctggctga

SEQ ID NO: 447845 - DNA, 4365 bp, Homo sapiens
cagcctcctcctgggacccttgccctgcccccctcccatgggcacggaccccccaccgcctccacccactgccgcgggggggcccgttggggcccagggctggcgggccatgtaaccagggctgctgctgggagcgcggaggggaagggagcccccagccctgctgggccggcccaggcccctccgcggctcccccttccactacccacctgcccggcaccccctccccagtggttgttaaccccgggactccccaagcccagcctctgtgtgcagcagccccaggcgggctaagtctccaagatgcccttggtggatttcttctgcgagacctgctctaagccttggctggtgggctggtgggaccagttcaaaaggatgttgaaccgtgagctcacacacctgtcagaaatgagcaggtccggaaaccaggtctcagagtacatttccacaacattcctggacaaacagaatgaagtggagatcccatcacccacgatgaaggaacgagaaaaacagcaagcgccgcgaccaagaccctcccagccgcccccgccccctgtaccacacttacagcccatgtcccaaatcacagggttgaaaaagttgatgcatagtaacagcctgaacaactctaacattccccgatttggggtgaagaccgatcaagaagagctcctggcccaagaactggagaacctgaacaagtggggcctgaacatcttttgcgtgtcggattacgctggaggccgctcactcacctgcatcatgtacatgatattccaggtgatggggacagctgggagtgggcccgggtgaggggctcatagcggggcgctggaggccggtggaggtcaccaccctgcccctgcctgctctcaggagcgggacctgctgaagaaattccgcatccctgtggacacgatggtgacatacatgctgacgctggaggatcactaccacgctgacgtggcctaccataacagcctgcacgcagctgacgtgctgcagtccacccacgtactgctggccacgcctgcactagatgcagtgttcacggacctggagattctcgccgccctcttcgcggctgccatccacgatgtggatcaccctggggtctccaaccagttcctcatcaacaccaattcggagctggcgctcatgtacaacgatgagtcggtgctcgagaatcaccacctggccgtgggcttcaagctgctgcaggaggacaactgcgacatcttccagaacctcagcaagcgccagcggcagagcctacgcaagatggtcatcgacatggtgctggccacggacatgtccaagcacatgaccctcctggctgacctgaagaccatggtggagaccaagaaagtgaccagctcaggggtcctcctgctagataactactccgaccgcatccaggtcctccggaacatggtgcactgtgccgacctcagcaaccccaccaagccgctggagctgtaccgccagtggacagaccgcatcatggccgagttcttccagcagggtgaccgagagcgcgagcgtggcatggaaatcagccccatgtgtgacaagcacactgcctccgtggagaagtctcaggtgggttttattgactacattgtgcacccattgtgggagacctgggcggaccttgtccacccagatgcccaggagatcttggacactttggaggacaaccgggactggtactacagcgccatccggcagagcccatctccgccacccgaggaggagtcaagggggccaggccacccacccctgcctgacaagttccagtttgagctgacgctggaggaggaagaggaggaagaaatatcaatggcccagataccgtgcacagcccaagaggcattgactgcgcagggattgtcaggagtcgaggaagctctggatgcaaccatagcctgggaggcatccccggcccaggagtcgttggaagttatggcacaggaagcatccctggaggccgagctggaggcagtgtatttgacacagcaggcacagtccacaggcagtgcacctgtggctccggatgagttctcgtcccgggaggaattcgtggttgctgtaagccacagcagcccctctgccctggctcttcaaagcccccttctccctgcttggaggaccctgtctgtttcagagcatgccccgggcctcccgggcctcccctccacggcggccgaggtggaggcccaacgagagcaccaggctgccaagagggcttgcagtgcctgcgcagggacatttggggaggacacatccgcactcccagctcctggtggcggggggtcaggtggagaccctacctgatccccagacctctgtccctgttcccctccactcctcccctcactcccctgctcccccgaccacctcctcctctgcctcaaagactcttgtcctcttgtccctcctgagaaaaaagaaaacgaaaagtggggtttttttctgttttctttttttcccctttccccctgcccccacccacggggcctttttttggaggtgggggctggggaatgaggggctgaggtcccggaagggattttatttttttgaattttaattgtaacatttttagaaaaagaacaaaaaaagaaaaaaaaaagaaagaaacacagcaactgtagatgctcctgttcctggttcccgctttccacttccaaatccctcccctcaccttcccccactgccccccaagttccaggctcagtcttccagccgcctggggagtctctacctgggcccaagcaggtgtggggcctccttctgggcttttcttctgaatttagaggatttctagaacgtggtcaggaatagccattctaggcggggctggggccagggtggggggcagtcactgtgggaggtcccagctccagcccccctctggtttgctgcctcctctcccctctaaaaaagtcttccgcttgattttgcacaatcccggcgatactcctggcgatactgactagaaagtcagggagctgggggagctgttcactttaggatacgggggtggtatggaagggagcgttcacaccgccagcctcgggcctgggatttgaggagggccctagacctcctccactctccatcccctttcccttccactttgggttcactttgaattttctccgttttttggggcagtggctctgatccactcacccccccgccccccgccccacttctagctgcttctcctcttgtttctgccttaataattcccacggccacaggcaagggggttgcagtggccgcctgcaccttggatgaggcagggccaggcgcccagaacccccatcctggccgcacccccctttccagggtcctccggaccccaccttccacactctgatcacagcccccctaccttttgccctaggaggaagcaataatggtgtataccctcattctcattcctgggcagcccttccttccaccctggcaccaaaataatttctcctccatccgtaccttgcctagcctctccctctcccccagctagtccctgagcaatacggcagacagatgcaagaccatttttctccaagccatgggggactgtttggaaggaaagccccctctctccctcctcccctcgccctcggcctggttctgcagctggaccgacctcattcatcgcctgccccctacccaattctgagcacacggtactgtagcccccagttcctccctagccttccatccctctgtccaccccagggggaggtaaccccgcactcacactcccttgatgctgtctgtacagggttcatattttgtagcgaaagtcgtttttgtcccagccggcgatcggagtgggccttttctttctttttgttcattctttacctttttttcttttctttctttcttttttgtacatactgtaaggttggtttgtaaattattctacggaggcaaaaagggaaaataaaaacttgcccttccctggctgacccagtcgggaaggtagggaaggaggtctcccgttgggagagtctctgttcctgctgtattatacaaactgtaccatagtcctgggaaaagggtggactcaccgctgttgttttatgggaagtcgtgtcatcctaggggttggggctgggcagagcctgtcccctccccccttctccaggagccagggggtgactggagagacagacccacccccaagcagggctcctctccccagggtgagcacaggacctctgtaagctgcttgtgtattgtccactttgacgatcagtcattcggtccgttgatcaataatccttcgatcttgtctccaattaaaccgaggctttcaccgatttacctggctga

SEQ ID NO: 447846 - DNA, 973 bp, Homo sapiens
  misc_feature (1)..(1): n is a, c, g, or t
ngctggtgtctggccctcaggacatcctctccaatccaccacacaccaccttacccctctgctggcaagaggggacctgattcatcctcacgctaaacactcattctacccaactgattgagacagaacagaagataaactgaaacttctctgccttcccgctgcaagagtgaatgagcgatccctctcaactgactcaaaatgtttgcctcacccaggagatggagctctcgaaggccttctctggccagcggacactcctatctgccatcctcagcatgctatcactcagcttctccacaacatccctgctcagcaactactggtttgtgggcacacagaaggtgcccaagcccctgtgcgagaaaggtctggcagccaagtgctttgacatgccagtgtccctggatggagataccaacacatccacccaggaggtggtacaatacaactgggagactggggatgaccggttctccttccggagcttccggagtggcatgtggctatcctgtgaggaaactgtggaagaaccagcactgctccatccccagtcctggaaacaatttagagcccttcggtccagtggtacagcggcagcaaaaggggagaggtgccgaagtttcattgaacttacaccaccagccaagagagaaatcctatggttatccctgggaacgcagatcacctacatcggacttcaattcatcagcttcctcctgctactaacagacttgctactcactgggaaccctgcctgtgggctcaaactgagcgcctttgctgctgtttcctctgtcctgtcaggtctcctggggatggtggcccacatgatgtattcacaagtcttccaagcgactgtcaacttgggtccagaagactggagaccacatgtttggaattatggctgggccttctacttggcctgttctcttccccggccgcttggcgtcgctgtccccctcccgtacac

SEQ ID NO: 447847 - DNA, 719 bp, Homo sapiens
  misc_feature (1)..(1): n is a, c, g, or t
ngctggtgtctggccctcaggacatcctctccaatccaccacacaccaccttacccctctgctggcaagaggggacctgattcatcctcacgctaaacactcattctacccaactgattgagacagaacagaagataaactgaaacttctctgccttcccgctgcaagagtgaatgagcgatccctctcaactgactcaaaatgtttgcctcacccaggagatggagctctcgaaggccttctctggccagcggacactcctatctgccatcctcagcatgctatcactcagcttctccacaacatccctgctcagcaactactggtttgtgggcacacagaaggtgcccaagcccctgtgcgagaaaggtctggcagccaagtgctttgacatgccagtgtccctggatggagataccaacacatccacccaggaggtggtacaatacaactgggagactggggatgaccggttctccttccggagcttccggagtggcatgtggctatcctgtgaggaaactgtggaagaaccagcactgctccatccccagtcctggaaacaatttagagcccttcggtccagtggtacagcggcagcaaaagggagaggtgcccaagtttcattgaacttacatcaccacacaagaggtggagaagaggacttataaatattgtttctatgacatttgaaaataaatgttttactccatgctaaa

SEQ ID NO: 447848 - DNA, 2178 bp, Homo sapiens
  misc_feature (1)..(1): n is a, c, g, or t
ngctggtgtctggccctcaggacatcctctccaatccaccacacaccaccttacccctctgctggcaagaggggacctgattcatcctcacgctaaacactcattctacccaactgattgagacagaacagaagataaactgaaacttctctgccttcccgctgcaagagtgaatgagcgatccctctcaactgactcaaaatgtttgcctcacccaggagatggagctctcgaaggccttctctggccagcggacactcctatctgccatcctcagcatgctatcactcagcttctccacaacatccctgctcagcaactactggtttgtgggcacacagaaggtgcccaagcccctgtgcgagaaaggtctggcagccaagtgctttgacatgccagtgtccctggatggagataccaacacatccacccaggaggtggtacaatacaactgggagactggggatgaccggttctccttccggagcttccggagtggcatgtggctatcctgtgaggaaactgtggaagaaccagcactgctccatccccagtcctggaaacaatttagagcccttcggtccagtggtacagcggcagcaaaaggggagaggtgccgaagtttcattgaacttacaccaccagccaagagaggtgagaaaggactactggaatttgccacgttgcaaggcccatgtcaccccactctccgatttggagggaagcggttgatggagaaggcttccctcccctcccctcccttggggctttgtggcaaaaatcctatggttatccctgggaacgcagatcacctacatcggacttcaattcatcagcttcctcctgctactaacagacttgctactcactgggaaccctgcctgtgggctcaaactgagcgcctttgctgctgtttcctctgtcctgtcaggtctcctggggatggtggcccacatgatgtattcacaagtcttccaagcgactgtcaacttgggtccagaagactggagaccacatgtttggaattatggctgggccttctacatggcctggctctccttcacctgctgcatggcgtcggctgtcaccaccttcaacacgtacaccaggatggtgctggagttcaagtgcaagcatagtaagagcttcaaggaaaacccgaactgcctaccacatcaccatcagtgtttccctcggcggctgtcaagtgcagcccccaccgtgggtcctttgaccagctaccaccagtatcataatcagcccatccactctgtctctgagggagtcgacttctactccgagctgcggaacaagggatttcaaagaggggccagccaggagctgaaagaagcagttaggtcatctgtagaggaagagcagtgttaggagttaagcgggtttggggagtaggcttgagccctaccttacacgtctgctgattatcaacatgtgcttaagccaacatccgtctcttgagcatggtttttagaggctacgaataaggctatgaataagggttatctttaagtcctaagggattcctgggtgccactgctctcttttcctctacagctccatcttgtttcacccaccccacatctcacacatccagaattcccttctttactgatagtttctgtgccaggttctgggctaaaccatggagataaaaagaagagtaaaatacacttcccgaccttaaggatctgatacatctagttattggtctggaaattggagaaatggaggtgagcaaattaacggtagtgtgactgtggctcaactttccatggtacgcgcgaattgttctggaagtcacagatgggaagacagaagcgcccctgagtgctttgtcatatagcacagaagtcctccacactgcctgggacagtgtcctgcatccacacagtaggtacccagtaaaagtgttattaaatattgtcccaggagcccttaggagagtggtttaacatgagaaggcgccaacagcacacagggtcagggtcacttctagaaatagcccaccaaggctattcagattggactgtggttcccttctggacagtcacaccagggacttcccagtgaacaagggggcataggctcctctctggatcccaccttttcatcccttctgagaaatgtaccctattatttccttcataaagaatgccaccc

SEQ ID NO: 447849 - DNA, 2054 bp, Homo sapiens
  misc_feature (1)..(1): n is a, c, g, or t
ngctggtgtctggccctcaggacatcctctccaatccaccacacaccaccttacccctctgctggcaagaggggacctgattcatcctcacgctaaacactcattctacccaactgattgagacagaacagaagataaactgaaacttctctgccttcccgctgcaagagtgaatgagcgatccctctcaactgactcaaaatgtttgcctcacccaggagatggagctctcgaaggccttctctggccagcggacactcctatctgccatcctcagcatgctatcactcagcttctccacaacatccctgctcagcaactactggtttgtgggcacacagaaggtgcccaagcccctgtgcgagaaaggtctggcagccaagtgctttgacatgccagtgtccctggatggagataccaacacatccacccaggaggtggtacaatacaactgggagactggggatgaccggttctccttccggagcttccggagtggcatgtggctatcctgtgaggaaactgtggaagaaccagcactgctccatccccagtcctggaaacaatttagagcccttcggtccagtggtacagcggcagcaaaaggggagaggtgccgaagtttcattgaacttacaccaccagccaagagagaaatcctatggttatccctgggaacgcagatcacctacatcggacttcaattcatcagcttcctcctgctactaacagacttgctactcactgggaaccctgcctgtgggctcaaactgagcgcctttgctgctgtttcctctgtcctgtcaggtctcctggggatggtggcccacatgatgtattcacaagtcttccaagcgactgtcaacttgggtccagaagactggagaccacatgtttggaattatggctgggccttctacatggcctggctctccttcacctgctgcatggcgtcggctgtcaccaccttcaacacgtacaccaggatggtgctggagttcaagtgcaagcatagtaagagcttcaaggaaaacccgaactgcctaccacatcaccatcagtgtttccctcggcggctgtcaagtgcagcccccaccgtgggtcctttgaccagctaccaccagtatcataatcagcccatccactctgtctctgagggagtcgacttctactccgagctgcggaacaagggatttcaaagaggggccagccaggagctgaaagaagcagttaggtcatctgtagaggaagagcagtgttaggagttaagcgggtttggggagtaggcttgagccctaccttacacgtctgctgattatcaacatgtgcttaagccaacatccgtctcttgagcatggtttttagaggctacgaataaggctatgaataagggttatctttaagtcctaagggattcctgggtgccactgctctcttttcctctacagctccatcttgtttcacccaccccacatctcacacatccagaattcccttctttactgatagtttctgtgccaggttctgggctaaaccatggagataaaaagaagagtaaaatacacttcccgaccttaaggatctgatacatctagttattggtctggaaattggagaaatggaggtgagcaaattaacggtagtgtgactgtggctcaactttccatggtacgcgcgaattgttctggaagtcacagatgggaagacagaagcgcccctgagtgctttgtcatatagcacagaagtcctccacactgcctgggacagtgtcctgcatccacacagtaggtacccagtaaaagtgttattaaatattgtcccaggagcccttaggagagtggtttaacatgagaaggcgccaacagcacacagggtcagggtcacttctagaaatagcccaccaaggctattcagattggactgtggttcccttctggacagtcacaccagggacttcccagtgaacaagggggcataggctcctctctggatcccaccttttcatcccttctgagaaatgtaccctattatttccttcataaagaatgccaccc

SEQ ID NO: 447850 - DNA, 2250 bp, Homo sapiens
  misc_feature (1)..(1): n is a, c, g, or t
ngctggtgtctggccctcaggacatcctctccaatccaccacacaccaccttacccctctgctggcaagaggggacctgattcatcctcacgctaaacactcattctacccaactgattgagacagaacagaagataaactgaaacttctctgccttcccgctgcaagagtgaatgagcgatccctctcaactgactcaaaatgtttgcctcacccaggagatggagctctcgaaggccttctctggccagcggacactcctatctgccatcctcagcatgctatcactcagcttctccacaacatccctgctcagcaactactggtttgtgggcacacagaaggtgcccaagcccctgtgcgagaaaggtctggcagccaagtgctttgacatgccagtgtccctggatggagataccaacacatccacccaggaggtggtacaatacaactgggagactggggatgaccggttctccttccggagcttccggagtggcatgtggctatcctgtgaggaaactgtggaagaaccagctaaaagcgagatggaagaggaattaaaaaaatgtgtgtatttacatttatatttattattgtgccacttagcactgctccatccccagtcctggaaacaatttagagcccttcggtccagtggtacagcggcagcaaaaggggagaggtgccgaagtttcattgaacttacaccaccagccaagagaggtgagaaaggactactggaatttgccacgttgcaaggcccatgtcaccccactctccgatttggagggaagcggttgatggagaaggcttccctcccctcccctcccttggggctttgtggcaaaaatcctatggttatccctgggaacgcagatcacctacatcggacttcaattcatcagcttcctcctgctactaacagacttgctactcactgggaaccctgcctgtgggctcaaactgagcgcctttgctgctgtttcctctgtcctgtcaggtctcctggggatggtggcccacatgatgtattcacaagtcttccaagcgactgtcaacttgggtccagaagactggagaccacatgtttggaattatggctgggccttctacatggcctggctctccttcacctgctgcatggcgtcggctgtcaccaccttcaacacgtacaccaggatggtgctggagttcaagtgcaagcatagtaagagcttcaaggaaaacccgaactgcctaccacatcaccatcagtgtttccctcggcggctgtcaagtgcagcccccaccgtgggtcctttgaccagctaccaccagtatcataatcagcccatccactctgtctctgagggagtcgacttctactccgagctgcggaacaagggatttcaaagaggggccagccaggagctgaaagaagcagttaggtcatctgtagaggaagagcagtgttaggagttaagcgggtttggggagtaggcttgagccctaccttacacgtctgctgattatcaacatgtgcttaagccaacatccgtctcttgagcatggtttttagaggctacgaataaggctatgaataagggttatctttaagtcctaagggattcctgggtgccactgctctcttttcctctacagctccatcttgtttcacccaccccacatctcacacatccagaattcccttctttactgatagtttctgtgccaggttctgggctaaaccatggagataaaaagaagagtaaaatacacttcccgaccttaaggatctgatacatctagttattggtctggaaattggagaaatggaggtgagcaaattaacggtagtgtgactgtggctcaactttccatggtacgcgcgaattgttctggaagtcacagatgggaagacagaagcgcccctgagtgctttgtcatatagcacagaagtcctccacactgcctgggacagtgtcctgcatccacacagtaggtacccagtaaaagtgttattaaatattgtcccaggagcccttaggagagtggtttaacatgagaaggcgccaacagcacacagggtcagggtcacttctagaaatagcccaccaaggctattcagattggactgtggttcccttctggacagtcacaccagggacttcccagtgaacaagggggcataggctcctctctggatcccaccttttcatcccttctgagaaatgtaccctattatttccttcataaagaatgccaccc

SEQ ID NO: 447851 - DNA, 1968 bp, Homo sapiens
gggctggtactggtccggagtgtagggatcaccttacccctctgctggcaagaggggacctgattcatcctcacgctaaacactcattctacccaactgattgagacagaacagaagataaactgaaacttctctgccttcccgctgcaagagtgaatgagcgatccctctcaactgactcaaaatgtttgcctcacccaggagatggagctctcgaaggccttctctggccagcggacactcctatctgccatcctcagcatgctatcactcagcttctccacaacatccctgctcagcaactactggtttgtgggcacacagaaggtgcccaagcccctgtgcgagaaaggtctggcagccaagtgctttgacatgccagtgtccctggatggagataccaacacatccacccaggaggtggtacaatacaactgggagactggggatgaccggttctccttccggagcttccggagtggcatgtggctatcctgtgaggaaactgtggaagaaccaggggagaggtgccgaagtttcattgaacttacaccaccagccaagagagaaatcctatggttatccctgggaacgcagatcacctacatcggacttcaattcatcagcttcctcctgctactaacagacttgctactcactgggaaccctgcctgtgggctcaaactgagcgcctttgctgctgtttcctctgtcctgtcaggtctcctggggatggtggcccacatgatgtattcacaagtcttccaagcgactgtcaacttgggtccagaagactggagaccacatgtttggaattatggctgggccttctacatggcctggctctccttcacctgctgcatggcgtcggctgtcaccaccttcaacacgtacaccaggatggtgctggagttcaagtgcaagcatagtaagagcttcaaggaaaacccgaactgcctaccacatcaccatcagtgtttccctcggcggctgtcaagtgcagcccccaccgtgggtcctttgaccagctaccaccagtatcataatcagcccatccactctgtctctgagggagtcgacttctactccgagctgcggaacaagggatttcaaagaggggccagccaggagctgaaagaagcagttaggtcatctgtagaggaagagcagtgttaggagttaagcgggtttggggagtaggcttgagccctaccttacacgtctgctgattatcaacatgtgcttaagccaacatccgtctcttgagcatggtttttagaggctacgaataaggctatgaataagggttatctttaagtcctaagggattcctgggtgccactgctctcttttcctctacagctccatcttgtttcacccaccccacatctcacacatccagaattcccttctttactgatagtttctgtgccaggttctgggctaaaccatggagataaaaagaagagtaaaatacacttcccgaccttaaggatctgatacatctagttattggtctggaaattggagaaatggaggtgagcaaattaacggtagtgtgactgtggctcaactttccatggtacgcgcgaattgttctggaagtcacagatgggaagacagaagcgcccctgagtgctttgtcatatagcacagaagtcctccacactgcctgggacagtgtcctgcatccacacagtaggtacccagtaaaagtgttattaaatattgtcccaggagcccttaggagagtggtttaacatgagaaggcgccaacagcacacagggtcagggtcacttctagaaatagcccaccaaggctattcagattggactgtggttcccttctggacagtcacaccagggacttcccagtgaacaagggggcataggctcctctctggatcccaccttttcatcccttctgagaaatgtaccctattatttccttcataaagaatgccaccc

SEQ ID NO: 447852 - DNA, 2126 bp, Homo sapiens
  misc_feature (1)..(1): n is a, c, g, or t
ngctggtgtctggccctcaggacatcctctccaatccaccacacaccaccttacccctctgctggcaagaggggacctgattcatcctcacgctaaacactcattctacccaactgattgagacagaacagaagataaactgaaacttctctgccttcccgctgcaagagtgaatgagcgatccctctcaactgactcaaaatgtttgcctcacccaggagatggagctctcgaaggccttctctggccagcggacactcctatctgccatcctcagcatgctatcactcagcttctccacaacatccctgctcagcaactactggtttgtgggcacacagaaggtgcccaagcccctgtgcgagaaaggtctggcagccaagtgctttgacatgccagtgtccctggatggagataccaacacatccacccaggaggtggtacaatacaactgggagactggggatgaccggttctccttccggagcttccggagtggcatgtggctatcctgtgaggaaactgtggaagaaccagctaaaagcgagatggaagaggaattaaaaaaatgtgtgtatttacatttatatttattattgtgccacttagcactgctccatccccagtcctggaaacaatttagagcccttcggtccagtggtacagcggcagcaaaaggggagaggtgccgaagtttcattgaacttacaccaccagccaagagagaaatcctatggttatccctgggaacgcagatcacctacatcggacttcaattcatcagcttcctcctgctactaacagacttgctactcactgggaaccctgcctgtgggctcaaactgagcgcctttgctgctgtttcctctgtcctgtcaggtctcctggggatggtggcccacatgatgtattcacaagtcttccaagcgactgtcaacttgggtccagaagactggagaccacatgtttggaattatggctgggccttctacatggcctggctctccttcacctgctgcatggcgtcggctgtcaccaccttcaacacgtacaccaggatggtgctggagttcaagtgcaagcatagtaagagcttcaaggaaaacccgaactgcctaccacatcaccatcagtgtttccctcggcggctgtcaagtgcagcccccaccgtgggtcctttgaccagctaccaccagtatcataatcagcccatccactctgtctctgagggagtcgacttctactccgagctgcggaacaagggatttcaaagaggggccagccaggagctgaaagaagcagttaggtcatctgtagaggaagagcagtgttaggagttaagcgggtttggggagtaggcttgagccctaccttacacgtctgctgattatcaacatgtgcttaagccaacatccgtctcttgagcatggtttttagaggctacgaataaggctatgaataagggttatctttaagtcctaagggattcctgggtgccactgctctcttttcctctacagctccatcttgtttcacccaccccacatctcacacatccagaattcccttctttactgatagtttctgtgccaggttctgggctaaaccatggagataaaaagaagagtaaaatacacttcccgaccttaaggatctgatacatctagttattggtctggaaattggagaaatggaggtgagcaaattaacggtagtgtgactgtggctcaactttccatggtacgcgcgaattgttctggaagtcacagatgggaagacagaagcgcccctgagtgctttgtcatatagcacagaagtcctccacactgcctgggacagtgtcctgcatccacacagtaggtacccagtaaaagtgttattaaatattgtcccaggagcccttaggagagtggtttaacatgagaaggcgccaacagcacacagggtcagggtcacttctagaaatagcccaccaaggctattcagattggactgtggttcccttctggacagtcacaccagggacttcccagtgaacaagggggcataggctcctctctggatcccaccttttcatcccttctgagaaatgtaccctattatttccttcataaagaatgccaccc

SEQ ID NO: 447853 - DNA, 1788 bp, Homo sapiens
  misc_feature (19)..(19): n is a, c, g, or t
agcatttaatcatgaggcnctccaaagaatatgagatagaaggggaggggtaggaggagagggaggagggtaggaagacagtttgcattcttgcaacattaaaccaaagggacttggagtgcagatggcatccttcggttcttccagacaagctgcaagacgctgaccatggccaagatggagctctcgaaggccttctctggccagcggacactcctatctgccatcctcagcatgctatcactcagcttctccacaacatccctgctcagcaactactggtttgtgggcacacagaaggtgcccaagcccctgtgcgagaaaggtctggcagccaagtgctttgacatgccagtgtccctggatggagataccaacacatccacccaggaggtggtacaatacaactgggagactggggatgaccggttctccttccggagcttccggagtggcatgtggctatcctgtgaggaaactgtggaagaaccaggggagaggtgccgaagtttcattgaacttacaccaccagccaagagaggtctcctggggatggtggcccacatgatgtattcacaagtcttccaagcgactgtcaacttgggtccagaagactggagaccacatgtttggaattatggctgggccttctacatggcctggctctccttcacctgctgcatggcgtcggctgtcaccaccttcaacacgtacaccaggatggtgctggagttcaagtgcaagcatagtaagagcttcaaggaaaacccgaactgcctaccacatcaccatcagtgtttccctcggcggctgtcaagtgcagcccccaccgtgggtcctttgaccagctaccaccagtatcataatcagcccatccactctgtctctgagggagtcgacttctactccgagctgcggaacaagggatttcaaagaggggccagccaggagctgaaagaagcagttaggtcatctgtagaggaagagcagtgttaggagttaagcgggtttggggagtaggcttgagccctaccttacacgtctgctgattatcaacatgtgcttaagccaacatccgtctcttgagcatggtttttagaggctacgaataaggctatgaataagggttatctttaagtcctaagggattcctgggtgccactgctctcttttcctctacagctccatcttgtttcacccaccccacatctcacacatccagaattcccttctttactgatagtttctgtgccaggttctgggctaaaccatggagataaaaagaagagtaaaatacacttcccgaccttaaggatctgatacatctagttattggtctggaaattggagaaatggaggtgagcaaattaacggtagtgtgactgtggctcaactttccatggtacgcgcgaattgttctggaagtcacagatgggaagacagaagcgcccctgagtgctttgtcatatagcacagaagtcctccacactgcctgggacagtgtcctgcatccacacagtaggtacccagtaaaagtgttattaaatattgtcccaggagcccttaggagagtggtttaacatgagaaggcgccaacagcacacagggtcagggtcacttctagaaatagcccaccaaggctattcagattggactgtggttcccttctggacagtcacaccagggacttcccagtgaacaagggggcataggctcctctctggatcccaccttttcatcccttctgagaaatgtaccctattatttccttcataaagaatgccaccc

SEQ ID NO: 447854 - DNA, 1172 bp, Homo sapiens
  misc_feature (19)..(19): n is a, c, g, or t
agcatttaatcatgaggcnctccaaagaatatgagatagaaggggaggggtaggaggagagggaggagggtaggaagacagtttgcattcttgcaacattaaaccaaagggacttggagtgcagatggcatccttcggttcttccagacaagctgcaagacgctgaccatggccaagatggagctctcgaaggccttctctggccagcggacactcctatctgccatcctcagcatgctatcactcagcttctccacaacatccctgctcagcaactactggtttgtgggcacacagaaggtgcccaagcccctgtgcgagaaaggtctggcagccaagtgctttgacatgccagtgtccctggatggagataccaacacatccacccaggaggtggtacaatacaactgggagactggggatgaccggttctccttccggagcttccggagtggcatgtggctatcctgtgaggaaactgtggaagaaccaggggagaggtgccgaagtttcattgaacttacaccaccagccaagagaggtgagaaaggactactggaatttgccacgttgcaaggcccatgtcaccccactctccgatttggagggaagcggttgatggagaaggcttccctcccctcccctcccttggggctttgtggcaaaacagacttgctactcactgggaaccctgcctgtgggctcaaactgagcgcctttgctgctgtttcctctgtcctgtcaggtctcctggggatggtggcccacatgatgtattcacaagtcttccaagcgactgtcaacttgggtccagaagactggagaccacatgtttggaattatggctgggccttctacatggctggtctccttcaactgtgatgggttggctgtacacttcaagtaatcaggatggtgtgagtcaagtgcaagatagtagagttaggaaaccgaattggctacaattacatagtgttcctaggggtgtaagtgagcccacggggtcttgccaggtccacagttttatggcatcactgttggggtgattcatcgcgtgggaaggttaggggggggctaaagttgttgagaacagtggaaggtgggggggcacatggtatgggcaacacatctcggaagggggcccagggtgtcaagctgtgtagggcggtgta

SEQ ID NO: 447855 - DNA, 2065 bp, Homo sapiens
  misc_feature (19)..(19): n is a, c, g, or t
agcatttaatcatgaggcnctccaaagaatatgagatagaaggggaggggtaggaggagagggaggagggtaggaagacagtttgcattcttgcaacattaaaccaaagggacttggagtgcagatggcatccttcggttcttccagacaagctgcaagacgctgaccatggccaagatggagctctcgaaggccttctctggccagcggacactcctatctgccatcctcagcatgctatcactcagcttctccacaacatccctgctcagcaactactggtttgtgggcacacagaaggtgcccaagcccctgtgcgagaaaggtctggcagccaagtgctttgacatgccagtgtccctggatggagataccaacacatccacccaggaggtggtacaatacaactgggagactggggatgaccggttctccttccggagcttccggagtggcatgtggctatcctgtgaggaaactgtggaagaaccaggggagaggtgccgaagtttcattgaacttacaccaccagccaagagaggtgagaaaggactactggaatttgccacgttgcaaggcccatgtcaccccactctccgatttggagggaagcggttgatggagaaggcttccctcccctcccctcccttggggctttgtggcaaaaatcctatggttatccctgggaacgcagatcacctacatcggacttcaattcatcagcttcctcctgctactaacagacttgctactcactgggaaccctgcctgtgggctcaaactgagcgcctttgctgctgtttcctctgtcctgtcaggtctcctggggatggtggcccacatgatgtattcacaagtcttccaagcgactgtcaacttgggtccagaagactggagaccacatgtttggaattatggctgggccttctacatggcctggctctccttcacctgctgcatggcgtcggctgtcaccaccttcaacacgtacaccaggatggtgctggagttcaagtgcaagcatagtaagagcttcaaggaaaacccgaactgcctaccacatcaccatcagtgtttccctcggcggctgtcaagtgcagcccccaccgtgggtcctttgaccagctaccaccagtatcataatcagcccatccactctgtctctgagggagtcgacttctactccgagctgcggaacaagggatttcaaagaggggccagccaggagctgaaagaagcagttaggtcatctgtagaggaagagcagtgttaggagttaagcgggtttggggagtaggcttgagccctaccttacacgtctgctgattatcaacatgtgcttaagccaacatccgtctcttgagcatggtttttagaggctacgaataaggctatgaataagggttatctttaagtcctaagggattcctgggtgccactgctctcttttcctctacagctccatcttgtttcacccaccccacatctcacacatccagaattcccttctttactgatagtttctgtgccaggttctgggctaaaccatggagataaaaagaagagtaaaatacacttcccgaccttaaggatctgatacatctagttattggtctggaaattggagaaatggaggtgagcaaattaacggtagtgtgactgtggctcaactttccatggtacgcgcgaattgttctggaagtcacagatgggaagacagaagcgcccctgagtgctttgtcatatagcacagaagtcctccacactgcctgggacagtgtcctgcatccacacagtaggtacccagtaaaagtgttattaaatattgtcccaggagcccttaggagagtggtttaacatgagaaggcgccaacagcacacagggtcagggtcacttctagaaatagcccaccaaggctattcagattggactgtggttcccttctggacagtcacaccagggacttcccagtgaacaagggggcataggctcctctctggatcccaccttttcatcccttctgagaaatgtaccctattatttccttcataaagaatgccaccc

SEQ ID NO: 447856 - DNA, 2109 bp, Homo sapiens
  misc_feature (1)..(1): n is a, c, g, or t
ngctggtgtctggccctcaggacatcctctccaatccaccacacaccaccttacccctctgctggcaagaggggacctgattcatcctcacgctaaacactcattctacccaactgattgagacagaacagaagataaactgaaacttctctgccttcccgctgcaagagtgaatgagcgatccctctcaactgactcaaaatgtttgcctcacccaggagatggagctctcgaaggccttctctggccagcggacactcctatctgccatcctcagcatgctatcactcagcttctccacaacatccctgctcagcaactactggtttgtgggcacacagaaggtgcccaagcccctgtgcgagaaaggtctggcagccaagtgctttgacatgccagtgtccctggatggagataccaacacatccacccaggaggtggtacaatacaactgggagactggggatgaccggttctccttccggagcttccggagtggcatgtggctatcctgtgaggaaactgtggaagaaccaggggagaggtgccgaagtttcattgaacttacaccaccagccaagagaggtgagaaaggactactggaatttgccacgttgcaaggcccatgtcaccccactctccgatttggagggaagcggttgatggagaaggcttccctcccctcccctcccttggggctttgtggcaaaaatcctatggttatccctgggaacgcagatcacctacatcggacttcaattcatcagcttcctcctgctactaacagacttgctactcactgggaaccctgcctgtgggctcaaactgagcgcctttgctgctgtttcctctgtcctgtcaggtctcctggggatggtggcccacatgatgtattcacaagtcttccaagcgactgtcaacttgggtccagaagactggagaccacatgtttggaattatggctgggccttctacatggcctggctctccttcacctgctgcatggcgtcggctgtcaccaccttcaacacgtacaccaggatggtgctggagttcaagtgcaagcatagtaagagcttcaaggaaaacccgaactgcctaccacatcaccatcagtgtttccctcggcggctgtcaagtgcagcccccaccgtgggtcctttgaccagctaccaccagtatcataatcagcccatccactctgtctctgagggagtcgacttctactccgagctgcggaacaagggatttcaaagaggggccagccaggagctgaaagaagcagttaggtcatctgtagaggaagagcagtgttaggagttaagcgggtttggggagtaggcttgagccctaccttacacgtctgctgattatcaacatgtgcttaagccaacatccgtctcttgagcatggtttttagaggctacgaataaggctatgaataagggttatctttaagtcctaagggattcctgggtgccactgctctcttttcctctacagctccatcttgtttcacccaccccacatctcacacatccagaattcccttctttactgatagtttctgtgccaggttctgggctaaaccatggagataaaaagaagagtaaaatacacttcccgaccttaaggatctgatacatctagttattggtctggaaattggagaaatggaggtgagcaaattaacggtagtgtgactgtggctcaactttccatggtacgcgcgaattgttctggaagtcacagatgggaagacagaagcgcccctgagtgctttgtcatatagcacagaagtcctccacactgcctgggacagtgtcctgcatccacacagtaggtacccagtaaaagtgttattaaatattgtcccaggagcccttaggagagtggtttaacatgagaaggcgccaacagcacacagggtcagggtcacttctagaaatagcccaccaaggctattcagattggactgtggttcccttctggacagtcacaccagggacttcccagtgaacaagggggcataggctcctctctggatcccaccttttcatcccttctgagaaatgtaccctattatttccttcataaagaatgccaccc

SEQ ID NO: 447857 - DNA, 1941 bp, Homo sapiens
  misc_feature (19)..(19): n is a, c, g, or t
agcatttaatcatgaggcnctccaaagaatatgagatagaaggggaggggtaggaggagagggaggagggtaggaagacagtttgcattcttgcaacattaaaccaaagggacttggagtgcagatggcatccttcggttcttccagacaagctgcaagacgctgaccatggccaagatggagctctcgaaggccttctctggccagcggacactcctatctgccatcctcagcatgctatcactcagcttctccacaacatccctgctcagcaactactggtttgtgggcacacagaaggtgcccaagcccctgtgcgagaaaggtctggcagccaagtgctttgacatgccagtgtccctggatggagataccaacacatccacccaggaggtggtacaatacaactgggagactggggatgaccggttctccttccggagcttccggagtggcatgtggctatcctgtgaggaaactgtggaagaaccaggggagaggtgccgaagtttcattgaacttacaccaccagccaagagagaaatcctatggttatccctgggaacgcagatcacctacatcggacttcaattcatcagcttcctcctgctactaacagacttgctactcactgggaaccctgcctgtgggctcaaactgagcgcctttgctgctgtttcctctgtcctgtcaggtctcctggggatggtggcccacatgatgtattcacaagtcttccaagcgactgtcaacttgggtccagaagactggagaccacatgtttggaattatggctgggccttctacatggcctggctctccttcacctgctgcatggcgtcggctgtcaccaccttcaacacgtacaccaggatggtgctggagttcaagtgcaagcatagtaagagcttcaaggaaaacccgaactgcctaccacatcaccatcagtgtttccctcggcggctgtcaagtgcagcccccaccgtgggtcctttgaccagctaccaccagtatcataatcagcccatccactctgtctctgagggagtcgacttctactccgagctgcggaacaagggatttcaaagaggggccagccaggagctgaaagaagcagttaggtcatctgtagaggaagagcagtgttaggagttaagcgggtttggggagtaggcttgagccctaccttacacgtctgctgattatcaacatgtgcttaagccaacatccgtctcttgagcatggtttttagaggctacgaataaggctatgaataagggttatctttaagtcctaagggattcctgggtgccactgctctcttttcctctacagctccatcttgtttcacccaccccacatctcacacatccagaattcccttctttactgatagtttctgtgccaggttctgggctaaaccatggagataaaaagaagagtaaaatacacttcccgaccttaaggatctgatacatctagttattggtctggaaattggagaaatggaggtgagcaaattaacggtagtgtgactgtggctcaactttccatggtacgcgcgaattgttctggaagtcacagatgggaagacagaagcgcccctgagtgctttgtcatatagcacagaagtcctccacactgcctgggacagtgtcctgcatccacacagtaggtacccagtaaaagtgttattaaatattgtcccaggagcccttaggagagtggtttaacatgagaaggcgccaacagcacacagggtcagggtcacttctagaaatagcccaccaaggctattcagattggactgtggttcccttctggacagtcacaccagggacttcccagtgaacaagggggcataggctcctctctggatcccaccttttcatcccttctgagaaatgtaccctattatttccttcataaagaatgccaccc

SEQ ID NO: 447858 - DNA, 2134 bp, Homo sapiens
  misc_feature (19)..(19): n is a, c, g, or t
agcatttaatcatgaggcnctccaaagaatatgagatagaaggggaggggtaggaggagagggaggagggtaggaagacagtttgcattcttgcaacattaaaccaaagggacttggagtgcagatggcatccttcggttcttccagacaagctgcaagacgctgaccatggccaagatggagctctcgaaggccttctctggccagcggacactcctatctgccatcctcagcatgctatcactcagcttctccacaacatccctgctcagcaactactggtttgtgggcacacagaaggtgcccaagcccctgtgcgagaaaggtctggcagccaagtgctttgacatgccagtgtccctggatggagataccaacacatccacccaggaggtggtacaatacaactgggagactggggatgaccggttctccttccggagcttccggagtggcatgtggctatcctgtgaggaaactgtggaagaaccagcactgctccatccccagtcctggaaacaatttagagcccttcggtccagtggtacagcggcagcaaaaggggagaggtgccgaagtttcattgaacttacaccaccagccaagagaggtgagaaaggactactggaatttgccacgttgcaaggcccatgtcaccccactctccgatttggagggaagcggttgatggagaaggcttccctcccctcccctcccttggggctttgtggcaaaaatcctatggttatccctgggaacgcagatcacctacatcggacttcaattcatcagcttcctcctgctactaacagacttgctactcactgggaaccctgcctgtgggctcaaactgagcgcctttgctgctgtttcctctgtcctgtcaggtctcctggggatggtggcccacatgatgtattcacaagtcttccaagcgactgtcaacttgggtccagaagactggagaccacatgtttggaattatggctgggccttctacatggcctggctctccttcacctgctgcatggcgtcggctgtcaccaccttcaacacgtacaccaggatggtgctggagttcaagtgcaagcatagtaagagcttcaaggaaaacccgaactgcctaccacatcaccatcagtgtttccctcggcggctgtcaagtgcagcccccaccgtgggtcctttgaccagctaccaccagtatcataatcagcccatccactctgtctctgagggagtcgacttctactccgagctgcggaacaagggatttcaaagaggggccagccaggagctgaaagaagcagttaggtcatctgtagaggaagagcagtgttaggagttaagcgggtttggggagtaggcttgagccctaccttacacgtctgctgattatcaacatgtgcttaagccaacatccgtctcttgagcatggtttttagaggctacgaataaggctatgaataagggttatctttaagtcctaagggattcctgggtgccactgctctcttttcctctacagctccatcttgtttcacccaccccacatctcacacatccagaattcccttctttactgatagtttctgtgccaggttctgggctaaaccatggagataaaaagaagagtaaaatacacttcccgaccttaaggatctgatacatctagttattggtctggaaattggagaaatggaggtgagcaaattaacggtagtgtgactgtggctcaactttccatggtacgcgcgaattgttctggaagtcacagatgggaagacagaagcgcccctgagtgctttgtcatatagcacagaagtcctccacactgcctgggacagtgtcctgcatccacacagtaggtacccagtaaaagtgttattaaatattgtcccaggagcccttaggagagtggtttaacatgagaaggcgccaacagcacacagggtcagggtcacttctagaaatagcccaccaaggctattcagattggactgtggttcccttctggacagtcacaccagggacttcccagtgaacaagggggcataggctcctctctggatcccaccttttcatcccttctgagaaatgtaccctattatttccttcataaagaatgccaccc

SEQ ID NO: 447859 - DNA, 2010 bp, Homo sapiens
  misc_feature (19)..(19): n is a, c, g, or t
agcatttaatcatgaggcnctccaaagaatatgagatagaaggggaggggtaggaggagagggaggagggtaggaagacagtttgcattcttgcaacattaaaccaaagggacttggagtgcagatggcatccttcggttcttccagacaagctgcaagacgctgaccatggccaagatggagctctcgaaggccttctctggccagcggacactcctatctgccatcctcagcatgctatcactcagcttctccacaacatccctgctcagcaactactggtttgtgggcacacagaaggtgcccaagcccctgtgcgagaaaggtctggcagccaagtgctttgacatgccagtgtccctggatggagataccaacacatccacccaggaggtggtacaatacaactgggagactggggatgaccggttctccttccggagcttccggagtggcatgtggctatcctgtgaggaaactgtggaagaaccagcactgctccatccccagtcctggaaacaatttagagcccttcggtccagtggtacagcggcagcaaaaggggagaggtgccgaagtttcattgaacttacaccaccagccaagagagaaatcctatggttatccctgggaacgcagatcacctacatcggacttcaattcatcagcttcctcctgctactaacagacttgctactcactgggaaccctgcctgtgggctcaaactgagcgcctttgctgctgtttcctctgtcctgtcaggtctcctggggatggtggcccacatgatgtattcacaagtcttccaagcgactgtcaacttgggtccagaagactggagaccacatgtttggaattatggctgggccttctacatggcctggctctccttcacctgctgcatggcgtcggctgtcaccaccttcaacacgtacaccaggatggtgctggagttcaagtgcaagcatagtaagagcttcaaggaaaacccgaactgcctaccacatcaccatcagtgtttccctcggcggctgtcaagtgcagcccccaccgtgggtcctttgaccagctaccaccagtatcataatcagcccatccactctgtctctgagggagtcgacttctactccgagctgcggaacaagggatttcaaagaggggccagccaggagctgaaagaagcagttaggtcatctgtagaggaagagcagtgttaggagttaagcgggtttggggagtaggcttgagccctaccttacacgtctgctgattatcaacatgtgcttaagccaacatccgtctcttgagcatggtttttagaggctacgaataaggctatgaataagggttatctttaagtcctaagggattcctgggtgccactgctctcttttcctctacagctccatcttgtttcacccaccccacatctcacacatccagaattcccttctttactgatagtttctgtgccaggttctgggctaaaccatggagataaaaagaagagtaaaatacacttcccgaccttaaggatctgatacatctagttattggtctggaaattggagaaatggaggtgagcaaattaacggtagtgtgactgtggctcaactttccatggtacgcgcgaattgttctggaagtcacagatgggaagacagaagcgcccctgagtgctttgtcatatagcacagaagtcctccacactgcctgggacagtgtcctgcatccacacagtaggtacccagtaaaagtgttattaaatattgtcccaggagcccttaggagagtggtttaacatgagaaggcgccaacagcacacagggtcagggtcacttctagaaatagcccaccaaggctattcagattggactgtggttcccttctggacagtcacaccagggacttcccagtgaacaagggggcataggctcctctctggatcccaccttttcatcccttctgagaaatgtaccctattatttccttcataaagaatgccaccc

SEQ ID NO: 447860 - DNA, 2019 bp, Homo sapiens
gcaccaggtaggaagcttcaccaccatctcctcagaatgagtcatggttggtctaagccaaaagtggaaattgacttcctcttggactgatactgctttgggggtagtcatatgatcaacttctgaacaacgagatgaaagaggaaagttgctggagactaccctgttaaaagacaacaaacggagatggagctctcgaaggccttctctggccagcggacactcctatctgccatcctcagcatgctatcactcagcttctccacaacatccctgctcagcaactactggtttgtgggcacacagaaggtgcccaagcccctgtgcgagaaaggtctggcagccaagtgctttgacatgccagtgtccctggatggagataccaacacatccacccaggaggtggtacaatacaactgggagactggggatgaccggttctccttccggagcttccggagtggcatgtggctatcctgtgaggaaactgtggaagaaccagcactgctccatccccagtcctggaaacaatttagagcccttcggtccagtggtacagcggcagcaaaaggggagaggtgccgaagtttcattgaacttacaccaccagccaagagagaaatcctatggttatccctgggaacgcagatcacctacatcggacttcaattcatcagcttcctcctgctactaacagacttgctactcactgggaaccctgcctgtgggctcaaactgagcgcctttgctgctgtttcctctgtcctgtcaggtctcctggggatggtggcccacatgatgtattcacaagtcttccaagcgactgtcaacttgggtccagaagactggagaccacatgtttggaattatggctgggccttctacatggcctggctctccttcacctgctgcatggcgtcggctgtcaccaccttcaacacgtacaccaggatggtgctggagttcaagtgcaagcatagtaagagcttcaaggaaaacccgaactgcctaccacatcaccatcagtgtttccctcggcggctgtcaagtgcagcccccaccgtgggtcctttgaccagctaccaccagtatcataatcagcccatccactctgtctctgagggagtcgacttctactccgagctgcggaacaagggatttcaaagaggggccagccaggagctgaaagaagcagttaggtcatctgtagaggaagagcagtgttaggagttaagcgggtttggggagtaggcttgagccctaccttacacgtctgctgattatcaacatgtgcttaagccaacatccgtctcttgagcatggtttttagaggctacgaataaggctatgaataagggttatctttaagtcctaagggattcctgggtgccactgctctcttttcctctacagctccatcttgtttcacccaccccacatctcacacatccagaattcccttctttactgatagtttctgtgccaggttctgggctaaaccatggagataaaaagaagagtaaaatacacttcccgaccttaaggatctgatacatctagttattggtctggaaattggagaaatggaggtgagcaaattaacggtagtgtgactgtggctcaactttccatggtacgcgcgaattgttctggaagtcacagatgggaagacagaagcgcccctgagtgctttgtcatatagcacagaagtcctccacactgcctgggacagtgtcctgcatccacacagtaggtacccagtaaaagtgttattaaatattgtcccaggagcccttaggagagtggtttaacatgagaaggcgccaacagcacacagggtcagggtcacttctagaaatagcccaccaaggctattcagattggactgtggttcccttctggacagtcacaccagggacttcccagtgaacaagggggcataggctcctctctggatcccaccttttcatcccttctgagaaatgtaccctattatttccttcataaagaatgccaccc

SEQ ID NO: 447861 - DNA, 1607 bp, Homo sapiens
  misc_feature (1)..(1): n is a, c, g, or t
ngctggtgtctggccctcaggacatcctctccaatccaccacacaccaccttacccctctgctggcaagaggggacctgattcatcctcacgctaaacactcattctacccaactgattgagacagaacagaagataaactgaaacttctctgccttcccgctgcaagagtgaatgagcgatccctctcaactgactcaaaatgtttgcctcacccaggagatggagctctcgaaggccttctctggccagcggacactcctatctgccatcctcagcatgctatcactcagcttctccacaacatccctgctcagcaactactggtttgtgggcacacagaaggtgcccaagcccctgtgcgagaaaggtctggcagccaagtgctttgacatgccagtgtccctggatggagataccaacacatccacccaggaggtggtacaatacaactgggagactggggatgaccggttctccttccggagcttccggagtggcatgtggctatcctgtgaggaaactgtggaagaaccagcactgctccatccccagtcctggaaacaatttagaagcttcaaggaaaacccgaactgcctaccacatcaccatcagtgtttccctcggcggctgtcaagtgcagcccccaccgtgggtcctttgaccagctaccaccagtatcataatcagcccatccactctgtctctgagggagtcgacttctactccgagctgcggaacaagggatttcaaagaggggccagccaggagctgaaagaagcagttaggtcatctgtagaggaagagcagtgttaggagttaagcgggtttggggagtaggcttgagccctaccttacacgtctgctgattatcaacatgtgcttaagccaacatccgtctcttgagcatggtttttagaggctacgaataaggctatgaataagggttatctttaagtcctaagggattcctgggtgccactgctctcttttcctctacagctccatcttgtttcacccaccccacatctcacacatccagaattcccttctttactgatagtttctgtgccaggttctgggctaaaccatggagataaaaagaagagtaaaatacacttcccgaccttaaggatctgatacatctagttattggtctggaaattggagaaatggaggtgagcaaattaacggtagtgtgactgtggctcaactttccatggtacgcgcgaattgttctggaagtcacagatgggaagacagaagcgcccctgagtgctttgtcatatagcacagaagtcctccacactgcctgggacagtgtcctgcatccacacagtaggtacccagtaaaagtgttattaaatattgtcccaggagcccttaggagagtggtttaacatgagaaggcgccaacagcacacagggtcagggtcacttctagaaatagcccaccaaggctattcagattggactgtggttcccttctggacagtcacaccagggacttcccagtgaacaagggggcataggctcctctctggatcccaccttttcatcccttctgagaaatgtaccctattatttccttcataaagaatgccaccc

SEQ ID NO: 447862 - DNA, 5088 bp, Homo sapiens
agaaaacgtctgactccagccaccggccttcaaggcacggctttttattccttcggctggtcggcctctcgcccttcagctacctgtgcgtccctccgtcccgtcccgtcccggggtcaccccggagcctgtccgctatgcggctcctgcctctagccccaggtcggctccggcggggcagcccccgccacctgccctcctgcagcccagcgctgctactgctggtgctgggcggctgcctgggggtcttcggggtggctgcgggaacccggaggcccaacgtggtgctgctcctcacggacgaccaggacgaagtgctcggcggcatgacaccgctaaagaaaaccaaagctctcatcggagagatggggatgactttttccagtgcttatgtgccaagtgctctctgctgccccagcagagccagtatcctgacaggaaagtacccacataatcatcacgttgtgaacaacactctggaggggaactgcagtagtaagtcctggcagaagatccaagaaccaaatactttcccagcaattctcagatcaatgtgtggttatcagaccttttttgcagggaaatatttaaatgagtacggagccccagatgcaggtggactagaacacgttcctctgggttggagttactggtatgccttggaaaagaattctaagtattataattacaccctgtctatcaatgggaaggcacggaagcatggtgaaaactatagtgtggactacctgacagatgttttggctaatgtctccttggactttctggactacaagtccaactttgagcccttcttcatgatgatcgccactccagcgcctcattcgccttggacagctgcacctcagtaccagaaggctttccagaatgtctttgcaccaagaaacaagaacttcaacatccatggaacgaacaagcactggttaattaggcaagccaagactccaatgactaattcttcaatacagtttttagataatgcatttaggaaaaggtggcaaactctcctctcagttgatgaccttgtggagaaactggtcaagaggctggagttcactggggagctcaacaacacttacatcttctatacctcagacaatggctatcacacaggacagttttccttgccaatagacaagagacagctgtatgagtttgatatcaaagttccactgttggttcgaggacctgggatcaaaccaaatcagacaagcaagatgctggttgccaacattgacttgggtcctactattttggacattgctggctacgacctaaataagacacagatggatgggatgtccttattgcccattttgagaggtgccagtaacttgacctggcgatcagatgtcctggtggaataccaaggagaaggccgtaacgtcactgacccaacatgcccttccctgagtcctggcgtatctcaatgcttcccagactgtgtatgtgaagatgcttataacaatacctatgcctgtgtgaggacaatgtcagcattgtggaatttgcagtattgcgagtttgatgaccaggaggtgtttgtagaagtctataatctgactgcagacccagaccagatcactaacattgctaaaaccatagacccagagcttttaggaaagatgaactatcggttaatgatgttacagtcctgttctgggccaacctgtcgcactccaggggtttttgaccccggatacaggtttgacccccgtctcatgttcagcaatcgcggcagtgtcaggactcgaagattttccaaacatcttctgtagcgacctcacacagcctctgcagatggatccctgcacgcctctttctgatgaagtgattgtagtaggtgtctgtagctagtcttcaagaccacacctggaagagtttctgggctggctttaagtcctgtttgaaaaagcaacccagtcagctgacttcctcgtgcaatgtgttaaactgtgaactctgcccatgtgtcaggagtggctgtctctggtctcttcctttagctgacaaggacactcctgaggtctttgttctcactgtattctttttatcctggggccacagttcttgattattcctcttgtggttaaagactgaatttgtaaacccattcagataaatggcagtactttaggacacacacaaacacacagacacaccttttgatatgtaagcttgacctaaagtcaaaggacctgtgtagcatttcagattgagcacttcactatcaaaaatactaacatcacatggcttgaagagtaaccatcagagctgaatcatccaagtaagaacaagtaccattgttgattgataagtagagatacattttttatgatgttcatcacagtgtggtaaggttgcaaattcaaaacatgtcacccaagctctgttcatgtttttgtgaattctaggctggtgctgcactgaaatagagcagtaagcttgtgataaaggccaattccaggtagctcttgaaggtgatagccatctactttccagtggctgccaaccacagggagtgccagttaacactggaaggattaaggcaaggtcccttctcttgagactcccctctgagatctgaaaaatgaagtggcttaggaacatcagcagtgaagaactgccaagagttggtgaaggttgtctcttccgagggccttctgaagacagggctcttgaacagacaagtggaagggctgtaccagggataaaggaaagaagtgcctgtccagcagggagcttgaatttaagttccatgtatgaagtcattggctctatctgcatttttctgtcattctcttcatttgttttaaggtggaaaattttcttacagttgatgcaaagtatcaactactttaccctaccttctccccttttagatgggttcttcctgagttttggagtcttgtatgattatcagtattcccctgtcaaaatcaaatctattcaggtttcttcactgttgagaacacctaaatgtttttatttttgagaagtggggacagagtctcactatgtcacccaggctggagtgcaatggcatgatctcagctcactgcaaccttcgcctcctgggttcaagcgattctcctgcctccgcctcctgagtagctgggattataggcacgcaccaccacgcccagctaattttttgtatttttagtagagacagagtttcaccatgttggccaggctggtcttgaactcctgaccttgtgatccacccacctcggcctcccagagtgctgggattacaggcatgagccaccacgcttggctaagaacacctaaatttttatgtttcttggctcaaaaaccagttccatttctaatgttgtcctcacaagaaggctaattggtggtgagacagcaggggaggaggaagagctgtggtttgtaacttgttcaactcaggcaataagcgattttagctttatttaaagtcttctgtccagctttaagcactttgtaagacatggctgaaagtagcttttctatcagaattgcagatagtcatgttgggctaacagtcaattggatatattcctttacctcacatgaccccagcaactgtggtggtatctagaggtgaaacaggcaagtgaaatggacacctctgctgtgaatgttttagagaaggaaattcaaaaaatgttgtaactgaaagcactgttgaatatgggtatcggctttctttttcactttgactcttaacattatcagtcaacttccacattaatgaaagttgaccatagttatttccaaataaaaagaaaccaactcttaccaggtcttggactgtgatgtcatattattcagttttatgcttgttcctgagcagaactcataagagtgacatagtcagctgctgacggcacctcagccacgccactcttactcagttcagtgggtgtgcttgcgtggtaggatgtggtgcagccctctctacgctcttctatttttggtatatttcctatctaaccttcaaatagcttccaattctttttttcttggactggcttcattctgaatttgtgctaaaataatctttcataaagagacctcagtttatagcgtaacagactacacaatgcactgatgttttcataatgtttaagggacccactgcaagaagcttgctgcctccttttaattgtattcatttagattttgattttccatgttaagaaggtgaggtccatgttggtgcccttcagagtagagaaccatgtaaacattaggaatgaacagaggccttaggaatgaatagagagtttgccttatacaatttcctgttacaaagctctccctctcatgcaaagtagggaacaccttttgagcatctttgaatttgacaaatggtgctgttgcaaacactttttttttgagatgaagtctcgcggttgtcacccgggctggagtgcagtggcgtgatctcggctcactgcaacttccacctcctgggttccagcagttctcctgcctcagcctcccaagtagctgagattacaggcgcctgccaccccacctggctgatttttgtaattttagtagagacggggtttcaccatgttggccaggctgattaactcctgacctcaggtgatccacctttctcggcctcccaaagtgctgggattacgggtgtgagccaccgtgcccggcctgcaaacacattttaattgacaacactagggctgttgtacaaaatagtaatgatagccatggaagttttaccttattctgtgagaagtgttcttaaacttattaagtgtctaaactaaggtttagtgcttttttaaaggaaagttgtcccaggattcatcctaaagaaagcaaaagttaattcaactgatccaccaatggaattagatgggtagagttgggttcttgagttttaccaccacttagttcccactgaattttgtaacttcctgtgtttgcatcctctgttcctattctgcccttgctctgtgtcatctcagtcatttgacttagaaagtgcccttcaaaaggaccctgttcactgctgcacttttcaatgaattaaaatttatttctgttcta

SEQ ID NO: 447863 - DNA, 5671 bp, Homo sapiens
agaaaacgtctgactccagccaccggccttcaaggcacggctttttattccttcggctggtcggcctctcgcccttcagctacctgtgcgtccctccgtcccgtcccgtcccggggtcaccccggagcctgtccgctatgcggctcctgcctctagccccaggtcggctccggcggggcagcccccgccacctgccctcctgcagcccagcgctgctactgctggtgctgggcggctgcctgggggtcttcggggtggctgcgggaacccggaggcccaacgtggtgctgctcctcacggacgaccaggacgaagtgctcggcggcatgacaccgctaaagaaaaccaaagctctcatcggagagatggggatgactttttccagtgcttatgtgccaagtgctctctgctgccccagcagagccagtatcctgacaggaaagtacccacataatcatcacgttgtgaacaacactctggaggggaactgcagtagtaagtcctggcagaagatccaagaaccaaatactttcccagcaattctcagatcaatgtgtggttatcagaccttttttgcagggaaatatttaaatgagtacggagccccagatgcaggtggactagaacacgttcctctgggttggagttactggtatgccttggaaaagaattctaagtattataattacaccctgtctatcaatgggaaggcacggaagcatggtgaaaactatagtgtggactacctgacagatgttttggctaatgtctccttggactttctggactacaagtccaactttgagcccttcttcatgatgatcgccactccagcgcctcattcgccttggacagctgcacctcagtaccagaaggctttccagaatgtctttgcaccaagaaacaagaacttcaacatccatggaacgaacaagcactggttaattaggcaagccaagactccaatgactaattcttcaatacagtttttagataatgcatttaggaaaaggtggcaaactctcctctcagttgatgaccttgtggagaaactggtcaagaggctggagttcactggggagctcaacaacacttacatcttctatacctcagacaatggctatcacacaggacagttttccttgccaatagacaagagacagctgtatgagtttgatatcaaagttccactgttggttcgaggacctgggatcaaaccaaatcagacaagcaagatgctggttgccaacattgacttgggtcctactattttggacattgctggctacgacctaaataagacacagatggatgggatgtccttattgcccattttgagaggtgccagtaacttgacctggcgatcagatgtcctggtggaataccaaggagaaggccgtaacgtcactgacccaacatgcccttccctgagtcctggcgtatctcaatgcttcccagactgtgtatgtgaagatgcttataacaatacctatgcctgtgtgaggacaatgtcagcattgtggaatttgcagtattgcgagtttgatgaccaggaggtgtttgtagaagtctataatctgactgcagacccagaccagatcactaacattgctaaaaccatagacccagagcttttaggaaagatgaactatcggttaatgatgttacagtcctgttctgggccaacctgtcgcactccaggggtttttgaccccggatacaggtttgacccccgtctcatgttcagcaatcgcggcagtgtcaggactcgaagattttccaaacatcttctgtagcgacctcacacagcctctgcagatggatccctgcacgcctctttctgatgaagtgattgtagtaggtgtctgtagctagtcttcaagaccacacctggaagagtttctgggctggctttaagtcctgtttgaaaaagcaacccagtcagctgacttcctcgtgcaatgtgttaaactgtgaactctgcccatgtgtcaggagtggctgtctctggtctcttcctttagctgacaaggacactcctgaggtctttgttctcactgtattctttttatcctggggccacagttcttgattattcctcttgtggttaaagactgaatttgtaaacccattcagataaatggcagtactttaggacacacacaaacacacagacacaccttttgatatgtaagcttgacctaaagtcaaaggacctgtgtagcatttcagattgagcacttcactatcaaaaatactaacatcacatggcttgaagagtaaccatcagagctgaatcatccaagtaagaacaagtaccattgttgattgataagtagagatacattttttatgatgttcatcacagtgtggtaaggttgcaaattcaaaacatgtcacccaagctctgttcatgtttttgtgaattctaggctggtgctgcactgaaatagagcagtaagcttgtgataaaggccaattccaggtagctcttgaaggtgatagccatctactttccagtggctgccaaccacagggagtgccagttaacactggaaggattaaggcaaggtcccttctcttgagactcccctctgagatctgaaaaatgaagtggcttaggaacatcagcagtgaagaactgccaagagttggtgaaggttgtctcttccgagggccttctgaagacagggctcttgaacagacaagtggaagggctgtaccagggataaaggaaagaagtgcctgtccagcagggagcttgaatttaagttccatgtatgaagtcattggctctatctgcatttttctgtcattctcttcatttgttttaaggtggaaaattttcttacagttgatgcaaagtatcaactactttaccctaccttctccccttttagatgggttcttcctgagttttggagtcttgtatgattatcagtattcccctgtcaaaatcaaatctattcaggtttcttcactgttgagaacacctaaatgtttttatttttgagaagtggggacagagtctcactatgtcacccaggctggagtgcaatggcatgatctcagctcactgcaaccttcgcctcctgggttcaagcgattctcctgcctccgcctcctgagtagctgggattataggcacgcaccaccacgcccagctaattttttgtatttttagtagagacagagtttcaccatgttggccaggctggtcttgaactcctgaccttgtgatccacccacctcggcctcccagagtgctgggattacaggcatgagccaccacgcttggctaagaacacctaaatttttatgtttcttggctcaaaaaccagttccatttctaatgttgtcctcacaagaaggctaattggtggtgagacagcaggggaggaggaagagctgtggtttgtaacttgttcaactcaggcaataagcgattttagctttatttaaagtcttctgtccagctttaagcactttgtaagacatggctgaaagtagcttttctatcagaattgcagatagtcatgttgggctaacagtcaattggatatattcctttacctcacatgaccccagcaactgtggtggtatctagaggtgaaacaggcaagtgaaatggacacctctgctgtgaatgttttagagaaggaaattcaaaaaatgttgtaactgaaagcactgttgaatatgggtatcggctttctttttcactttgactcttaacattatcagtcaacttccacattaatgaaagttgaccatagttatttccaaataaaaagaaaccaactcttaccaggtcttggactgtgatgtcatattattcagttttatgcttgttcctgagcagaactcataagagtgacatagtcagctgctgacggcacctcagccacgccactcttactcagttcagtgggtgtgcttgcgtggtaggatgtggtgcagccctctctacgctcttctatttttggtatatttcctatctaaccttcaaatagcttccaattctttttttcttggactggcttcattctgaatttgtgctaaaataatctttcataaagagacctcagtttatagcgtaacagactacacaatgcactgatgttttcataatgtttaagggacccactgcaagaagcttgctgcctccttttaattgtattcatttagattttgattttccatgttaagaaggtgaggtccatgttggtgcccttcagagtagagaaccatgtaaacattaggaatgaacagaggccttaggaatgaatagagagtttgccttatacaatttcctgttacaaagctctccctctcatgcaaagtagggaacaccttttgagcatctttgaatttgacaaatggtgctgttgcaaacactttttttttgagatgaagtctcgcggttgtcacccgggctggagtgcagtggcgtgatctcggctcactgcaacttccacctcctgggttccagcagttctcctgcctcagcctcccaagtagctgagattacaggcgcctgccaccccacctggctgatttttgtaattttagtagagacggggtttcaccatgttggccaggctgattaactcctgacctcaggtgatccacctttctcggcctcccaaagtgctgggattacgggtgtgagccaccgtgcccggcctgcaaacacattttaattgacaacactagggctgttgtacaaaatagtaatgatagccatggaagttttaccttattctgtgagaagtgttcttaaacttattaagtgtctaaactaaggtttagtgcttttttaaaggaaagttgtcccaggattcatcctaaagaaagcaaaagttaattcaactgatccaccaatggaattagatgggtagagttgggttcttgagttttaccaccacttagttcccactgaattttgtaacttcctgtgtttgcatcctctgttcctattctgcccttgctctgtgtcatctcagtcatttgacttagaaagtgcccttcaaaaggaccctgttcactgctgcacttttcaatgaattaaaatttatttctgttctaaaaaaaaaaaaaaaaaaaaaaaaaaaaaaaaaaaaaaaaaaaaaaaaaaaaaaaaaaaaaaaaaaaaaaaaaaaaaaaaaaaaaaaaaaaaaaaaaaaaaaaaaaaaaaaaaaaaaaaaaaaaaaaaaaaaaaaaactgagaagagggggtgccgtgcttgtccttctccccacgggcgggcgcagcgcgtgcaccacccccgtggtgttaagttaaaagggggcagcgggcccgctcaggcgggtgtatataagagagagagagaggggcggcttacacacaaaatagatctggcggcagaaggaggcgaataaaaaagttgctttcagaagtcctcatgatacttgggctgaagaagacaagaacatccttttcagaatgcggatgtagagataatatcaatcgaaggagccacaccaccctaagtagaaaattagtcagggtcctcagtccatattgagcagtaaaaatattcaatgattcagaagtcgttacggatctacaacagcaagcatgatgttacttcctgccgcggaagactgagactttgctgctcgagtatctataagacaaataatatcg

SEQ ID NO: 447864 - DNA, 3961 bp, Homo sapiens
tagtgctgttgtctcatgggcggggtggggggaagagaactttagtataggtagaaaaggaaaatgagaccagctgtgttctagattgtttttccctcattctcatagatgctggttgccaacattgacttgggtcctactattttggacattgctggctacgacctaaataagacacagatggatgggatgtccttattgcccattttgagaggtgccagtaacttgacctggcgatcagatgtcctggtggaataccaaggagaaggccgtaacgtcactgacccaacatgcccttccctgagtcctggcgtatctcaatgcttcccagactgtgtatgtgaagatgcttataacaatacctatgcctgtgtgaggacaatgtcagcattgtggaatttgcagtattgcgagtttgatgaccaggaggtgtttgtagaagtctataatctgactgcagacccagaccagatcactaacattgctaaaaccatagacccagagcttttaggaaagatgaactatcggttaatgatgttacagtcctgttctgggccaacctgtcgcactccaggggtttttgaccccggatacaggtttgacccccgtctcatgttcagcaatcgcggcagtgtcaggactcgaagattttccaaacatcttctgtagcgacctcacacagcctctgcagatggatccctgcacgcctctttctgatgaagtgattgtagtaggtgtctgtagctagtcttcaagaccacacctggaagagtttctgggctggctttaagtcctgtttgaaaaagcaacccagtcagctgacttcctcgtgcaatgtgttaaactgtgaactctgcccatgtgtcaggagtggctgtctctggtctcttcctttagctgacaaggacactcctgaggtctttgttctcactgtattctttttatcctggggccacagttcttgattattcctcttgtggttaaagactgaatttgtaaacccattcagataaatggcagtactttaggacacacacaaacacacagacacaccttttgatatgtaagcttgacctaaagtcaaaggacctgtgtagcatttcagattgagcacttcactatcaaaaatactaacatcacatggcttgaagagtaaccatcagagctgaatcatccaagtaagaacaagtaccattgttgattgataagtagagatacattttttatgatgttcatcacagtgtggtaaggttgcaaattcaaaacatgtcacccaagctctgttcatgtttttgtgaattctaggctggtgctgcactgaaatagagcagtaagcttgtgataaaggccaattccaggtagctcttgaaggtgatagccatctactttccagtggctgccaaccacagggagtgccagttaacactggaaggattaaggcaaggtcccttctcttgagactcccctctgagatctgaaaaatgaagtggcttaggaacatcagcagtgaagaactgccaagagttggtgaaggttgtctcttccgagggccttctgaagacagggctcttgaacagacaagtggaagggctgtaccagggataaaggaaagaagtgcctgtccagcagggagcttgaatttaagttccatgtatgaagtcattggctctatctgcatttttctgtcattctcttcatttgttttaaggtggaaaattttcttacagttgatgcaaagtatcaactactttaccctaccttctccccttttagatgggttcttcctgagttttggagtcttgtatgattatcagtattcccctgtcaaaatcaaatctattcaggtttcttcactgttgagaacacctaaatgtttttatttttgagaagtggggacagagtctcactatgtcacccaggctggagtgcaatggcatgatctcagctcactgcaaccttcgcctcctgggttcaagcgattctcctgcctccgcctcctgagtagctgggattataggcacgcaccaccacgcccagctaattttttgtatttttagtagagacagagtttcaccatgttggccaggctggtcttgaactcctgaccttgtgatccacccacctcggcctcccagagtgctgggattacaggcatgagccaccacgcttggctaagaacacctaaatttttatgtttcttggctcaaaaaccagttccatttctaatgttgtcctcacaagaaggctaattggtggtgagacagcaggggaggaggaagagctgtggtttgtaacttgttcaactcaggcaataagcgattttagctttatttaaagtcttctgtccagctttaagcactttgtaagacatggctgaaagtagcttttctatcagaattgcagatagtcatgttgggctaacagtcaattggatatattcctttacctcacatgaccccagcaactgtggtggtatctagaggtgaaacaggcaagtgaaatggacacctctgctgtgaatgttttagagaaggaaattcaaaaaatgttgtaactgaaagcactgttgaatatgggtatcggctttctttttcactttgactcttaacattatcagtcaacttccacattaatgaaagttgaccatagttatttccaaataaaaagaaaccaactcttaccaggtcttggactgtgatgtcatattattcagttttatgcttgttcctgagcagaactcataagagtgacatagtcagctgctgacggcacctcagccacgccactcttactcagttcagtgggtgtgcttgcgtggtaggatgtggtgcagccctctctacgctcttctatttttggtatatttcctatctaaccttcaaatagcttccaattctttttttcttggactggcttcattctgaatttgtgctaaaataatctttcataaagagacctcagtttatagcgtaacagactacacaatgcactgatgttttcataatgtttaagggacccactgcaagaagcttgctgcctccttttaattgtattcatttagattttgattttccatgttaagaaggtgaggtccatgttggtgcccttcagagtagagaaccatgtaaacattaggaatgaacagaggccttaggaatgaatagagagtttgccttatacaatttcctgttacaaagctctccctctcatgcaaagtagggaacaccttttgagcatctttgaatttgacaaatggtgctgttgcaaacactttttttttgagatgaagtctcgcggttgtcacccgggctggagtgcagtggcgtgatctcggctcactgcaacttccacctcctgggttccagcagttctcctgcctcagcctcccaagtagctgagattacaggcgcctgccaccccacctggctgatttttgtaattttagtagagacggggtttcaccatgttggccaggctgattaactcctgacctcaggtgatccacctttctcggcctcccaaagtgctgggattacgggtgtgagccaccgtgcccggcctgcaaacacattttaattgacaacactagggctgttgtacaaaatagtaatgatagccatggaagttttaccttattctgtgagaagtgttcttaaacttattaagtgtctaaactaaggtttagtgcttttttaaaggaaagttgtcccaggattcatcctaaagaaagcaaaagttaattcaactgatccaccaatggaattagatgggtagagttgggttcttgagttttaccaccacttagttcccactgaattttgtaacttcctgtgtttgcatcctctgttcctattctgcccttgctctgtgtcatctcagtcatttgacttagaaagtgcccttcaaaaggaccctgttcactgctgcacttttcaatgaattaaaatttatttctgttcta

SEQ ID NO: 447865 - DNA, 1971 bp, Homo sapiens
caaaccctcaccgtttcgctttgttctgcacgcaccaccacgcccagctaattttttgtatttttagtagagacagagtttcaccatgttggccaggctggtcttgaactcctgaccttgtgatccacccacctcggcctcccagagtgctgggattacaggcatgagccaccacgcttggctaagaacacctaaatttttatgtttcttggctcaaaaaccagttccatttctaatgttgtcctcacaagaaggctaattggtggtgagacagcaggggaggaggaagagctgtggtttgtaacttgttcaactcaggcaataagcgattttagctttatttaaagtcttctgtccagctttaagcactttgtaagacatggctgaaagtagcttttctatcagaattgcagatagtcatgttgggctaacagtcaattggatatattcctttacctcacatgaccccagcaactgtggtggtatctagaggtgaaacaggcaagtgaaatggacacctctgctgtgaatgttttagagaaggaaattcaaaaaatgttgtaactgaaagcactgttgaatatgggtatcggctttctttttcactttgactcttaacattatcagtcaacttccacattaatgaaagttgaccatagttatttccaaataaaaagaaaccaactcttaccaggtcttggactgtgatgtcatattattcagttttatgcttgttcctgagcagaactcataagagtgacatagtcagctgctgacggcacctcagccacgccactcttactcagttcagtgggtgtgcttgcgtggtaggatgtggtgcagccctctctacgctcttctatttttggtatatttcctatctaaccttcaaatagcttccaattctttttttcttggactggcttcattctgaatttgtgctaaaataatctttcataaagagacctcagtttatagcgtaacagactacacaatgcactgatgttttcataatgtttaagggacccactgcaagaagcttgctgcctccttttaattgtattcatttagattttgattttccatgttaagaaggtgaggtccatgttggtgcccttcagagtagagaaccatgtaaacattaggaatgaacagaggccttaggaatgaatagagagtttgccttatacaatttcctgttacaaagctctccctctcatgcaaagtagggaacaccttttgagcatctttgaatttgacaaatggtgctgttgcaaacactttttttttgagatgaagtctcgcggttgtcacccgggctggagtgcagtggcgtgatctcggctcactgcaacttccacctcctgggttccagcagttctcctgcctcagcctcccaagtagctgagattacaggcgcctgccaccccacctggctgatttttgtaattttagtagagacggggtttcaccatgttggccaggctgattaactcctgacctcaggtgatccacctttctcggcctcccaaagtgctgggattacgggtgtgagccaccgtgcccggcctgcaaacacattttaattgacaacactagggctgttgtacaaaatagtaatgatagccatggaagttttaccttattctgtgagaagtgttcttaaacttattaagtgtctaaactaaggtttagtgcttttttaaaggaaagttgtcccaggattcatcctaaagaaagcaaaagttaattcaactgatccaccaatggaattagatgggtagagttgggttcttgagttttaccaccacttagttcccactgaattttgtaacttcctgtgtttgcatcctctgttcctattctgcccttgctctgtgtcatctcagtcatttgacttagaaagtgcccttcaaaaggaccctgttcactgctgcacttttcaatgaattaaaatttatttctgttcta

SEQ ID NO: 447866 - DNA, 1927 bp, Homo sapiens
gcggccgctccaacatcagaatggtaactgttaccattctgatgttggagcggctggtcttgaactcctgaccttgtgatccacccacctcggcctcccagagtgctgggattacaggcatgagccaccacgcttggctaagaacacctaaatttttatgtttcttggctcaaaaaccagttccatttctaatgttgtcctcacaagaaggctaattggtggtgagacagcaggggaggaggaagagctgtggtttgtaacttgttcaactcaggcaataagcgattttagctttatttaaagtcttctgtccagctttaagcactttgtaagacatggctgaaagtagcttttctatcagaattgcagatagtcatgttgggctaacagtcaattggatatattcctttacctcacatgaccccagcaactgtggtggtatctagaggtgaaacaggcaagtgaaatggacacctctgctgtgaatgttttagagaaggaaattcaaaaaatgttgtaactgaaagcactgttgaatatgggtatcggctttctttttcactttgactcttaacattatcagtcaacttccacattaatgaaagttgaccatagttatttccaaataaaaagaaaccaactcttaccaggtcttggactgtgatgtcatattattcagttttatgcttgttcctgagcagaactcataagagtgacatagtcagctgctgacggcacctcagccacgccactcttactcagttcagtgggtgtgcttgcgtggtaggatgtggtgcagccctctctacgctcttctatttttggtatatttcctatctaaccttcaaatagcttccaattctttttttcttggactggcttcattctgaatttgtgctaaaataatctttcataaagagacctcagtttatagcgtaacagactacacaatgcactgatgttttcataatgtttaagggacccactgcaagaagcttgctgcctccttttaattgtattcatttagattttgattttccatgttaagaaggtgaggtccatgttggtgcccttcagagtagagaaccatgtaaacattaggaatgaacagaggccttaggaatgaatagagagtttgccttatacaatttcctgttacaaagctctccctctcatgcaaagtagggaacaccttttgagcatctttgaatttgacaaatggtgctgttgcaaacactttttttttgagatgaagtctcgcggttgtcacccgggctggagtgcagtggcgtgatctcggctcactgcaacttccacctcctgggttccagcagttctcctgcctcagcctcccaagtagctgagattacaggcgcctgccaccccacctggctgatttttgtaattttagtagagacggggtttcaccatgttggccaggctgattaactcctgacctcaggtgatccacctttctcggcctcccaaagtgctgggattacgggtgtgagccaccgtgcccggcctgcaaacacattttaattgacaacactagggctgttgtacaaaatagtaatgatagccatggaagttttaccttattctgtgagaagtgttcttaaacttattaagtgtctaaactaaggtttagtgcttttttaaaggaaagttgtcccaggattcatcctaaagaaagcaaaagttaattcaactgatccaccaatggaattagatgggtagagttgggttcttgagttttaccaccacttagttcccactgaattttgtaacttcctgtgtttgcatcctctgttcctattctgcccttgctctgtgtcatctcagtcatttgacttagaaagtgcccttcaaaaggaccctgttcactgctgcacttttcaatgaattaaaatttatttctgttcta

SEQ ID NO: 447867 - DNA, 4165 bp, Homo sapiens
agaaaacgtctgactccagccaccggccttcaaggcacggctttttattccttcggctggtcggcctctcgcccttcagctacctgtgcgtccctccgtcccgtcccgtcccggggtcaccccggagcctgtccgctatgcggctcctgcctctagccccaggtcggctccggcggggcagcccccgccacctgccctcctgcagcccagcgctgctactgctggtgctgggcggctgcctgggggtcttcggggtggctgcgggaacccggaggcccaacgtggtgctgctcctcacggacgaccaggacgaagtgctcggcggcatgacaccgctaaagaaaaccaaagctctcatcggagagatggggatgactttttccagtgcttatgtgccaagtgctctctgctgccccagcagagccagtatcctgacaggaaagtacccacataatcatcacgttgtgaacaacactctggaggggaactgcagtagtaagtcctggcagaagatccaagaaccaaatactttcccagcaattctcagatcaatgtgtggttatcagaccttttttgcagggaaatatttaaatgagtacggagccccagatgcaggtggactagaacacgttcctctgggttggagttactggtatgccttggaaaagaattctaagtattataattacaccctgtctatcaatgggaaggcacggaagcatggtgaaaactatagtgtggactacctgacagatgttttggctaatgtctccttggactttctggactacaagtccaactttgagcccttcttcatgatgatcgccactccagcgcctcattcgccttggacagctgcacctcagtaccagaaggctttccagaatgtctttgcaccaagaaacaagaacttcaacatccatggaacgaacaagcactggttaattaggcaagccaagactccaatgactaattcttcaatacagtttttagataatgcatttaggaaaaggtggcaaactctcctctcagttgatgaccttgtggagaaactggtcaagaggctggagttcactggggagctcaacaacacttacatcttctatacctcagacaatggctatcacacaggacagttttccttgccaatagacaagagacagctgtatgagtttgatatcaaagttccactgttggttcgaggacctgggatcaaaccaaatcagacaagcaagatgctggttgccaacattgacttgggtcctactattttggacattgctggctacgacctaaataagacacagatggatgggatgtccttattgcccattttgagaggtgccagtaacttgacctggcgatcagatgtcctggtggaataccaaggagaaggccgtaacgtcactgacccaacatgcccttccctgagtcctggcgtatctcaatgcttcccagactgtgtatgtgaagatgcttataacaatacctatgcctgtgtgaggacaatgtcagcattgtggaatttgcagtattgcgagtttgatgaccaggaggtgtttgtagaagtctataatctgactgcagacccagaccagatcactaacattgctaaaaccatagacccagagcttttaggaaagatgaactatcggttaatgatgttacagtcctgttctgggccaacctgtcgcactccaggggtttttgaccccggatacaggtttgacccccgtctcatgttcagcaatcgcggcagtgtcaggactcgaagattttccaaacatcttctgtagcgacctcacacagcctctgcagatggatccctgcacgcctctttctgatgaagtgattgtagtaggtgtctgtagctagtcttcaagaccacacctggaagagtttctgggctggctttaagtcctgtttgaaaaagcaacccagtcagctgacttcctcgtgcaatgtgttaaactgtgaactctgcccatgtgtcaggagtggctgtctctggtctcttcctttagctgacaaggacactcctgaggtctttgttctcactgtattctttttatcctggggccacagttcttgattattcctcttgtggttaaagactgaatttgtaaacccattcagataaatggcagtactttaggacacacacaaacacacagacacaccttttgatatgtaagcttgacctaaagtcaaaggacctgtgtagcatttcagattgagcacttcactatcaaaaatactaacatcacatggcttgaagagtaaccatcagagctgaatcatccaagtaagaacaagtaccattgttgattgataagtagagatacattttttatgatgttcatcacagtgtggtaaggttgcaaattcaaaacatgtcacccaagctctgttcatgtttttgtgaattctaggctggtgctgcactgaaatagagcagtaagcttgtgataaaggccaattccaggtagctcttgaaggtgatagccatctactttccagtggctgccaaccacagggagtgccagttaacactggaaggattaaggcaaggtcccttctcttgagactcccctctgagatctgaaaaatgaagtggcttaggaacatcagcagtgaagaactgccaagagttggtgaaggttgtctcttccgagggccttctgaagacagggctcttgaacagacaagtggaagggctgtaccagggataaaggaaagaagtgcctgtccagcagggagcttgaatttaagttccatgtatgaagtcattggctctatctgcatttttctgtcattctcttcatttgttttaaggtggaaaattttcttacagttgatgcaaagtatcaactactttaccctaccttctccccttttagatgggttcttcctgagttttggagtcttgtatgattatcagtattcccctgtcaaaatcaaatctattcaggtttcttcactgttgagaacacctaaatgtttttatttttgagaagtggggacagagtctcactatgtcacccaggctggagtgcaatggcatgatctcagctcactgcaaccttcgcctcctgggttcaagcgattctcctgcctccgcctcctgagtagctgggattataggcacgcaccaccacgcccagctaattttttgtatttttagtagagacagagtttcaccatgttggccaggctggtcttgaactcctgaccttgtgatccacccacctcggcctcccagagtgctgggattacaggcatgagccaccacgcttggctaagaacacctaaatttttatgtttcttggctcaaaaaccagttccatttctaatgttgtcctcacaagaaggctaattggtggtgagacagcaggggaggaggaagagctgtggtttgtaacttgttcaactcaggcaataagcgattttagctttatttaaagtcttctgtccagctttaagcactttgtaagacatggctgaaagtagcttttctatcagaattgcagatagtcatgttgggctaacagtcaattggatatattcctttacctcacatgaccccagcaactgtggtggtatctagaggtgaaacaggcaagtgaaatggacacctctgctgtgaatgttttagagaaggaaattcaaaaaatgttgtaactgaaagcactgttgaatatgggtatcggctttctttttcactttgactcttaacattatcagtcaacttccacattaatgaaagttgaccatagttatttccaaataaaaagaaaccaactcttaccaggtcttggactgtgatgtcatattattcagttttatgcttgttcctgagcagaactcataagagtgacatagtcagctgctgacggcacctcagccacgccactcttactcagttcagtgggtgtgcttgcgtggtaggatgtggtgcagccctctctacgctcttctatttttggtatatttcctatctaaccttcaaatagcttccaattctttttttcttggactggcttcattctgaatttgtgctaaaataatctttcataaagagacctcagtttatagcgtaacagactacacaatgcactgatgttttcataataaatttagggttgatgtgaatcctctgaacagc

SEQ ID NO: 447868 - DNA, 3860 bp, Homo sapiens
  misc_feature (3831)..(3831): n is a, c, g, or t
  misc_feature (3833)..(3833): n is a, c, g, or t
agaaaacgtctgactccagccaccggccttcaaggcacggctttttattccttcggctggtcggcctctcgcccttcagctacctgtgcgtccctccgtcccgtcccgtcccggggtcaccccggagcctgtccgctatgcggctcctgcctctagccccaggtcggctccggcggggcagcccccgccacctgccctcctgcagcccagcgctgctactgctggtgctgggcggctgcctgggggtcttcggggtggctgcgggaacccggaggcccaacgtggtgctgctcctcacggacgaccaggacgaagtgctcggcggcatgacaccgctaaagaaaaccaaagctctcatcggagagatggggatgactttttccagtgcttatgtgccaagtgctctctgctgccccagcagagccagtatcctgacaggaaagtacccacataatcatcacgttgtgaacaacactctggaggggaactgcagtagtaagtcctggcagaagatccaagaaccaaatactttcccagcaattctcagatcaatgtgtggttatcagaccttttttgcagggaaatatttaaatgagtacggagccccagatgcaggtggactagaacacgttcctctgggttggagttactggtatgccttggaaaagaattctaagtattataattacaccctgtctatcaatgggaaggcacggaagcatggtgaaaactatagtgtggactacctgacagatgttttggctaatgtctccttggactttctggactacaagtccaactttgagcccttcttcatgatgatcgccactccagcgcctcattcgccttggacagctgcacctcagtaccagaaggctttccagaatgtctttgcaccaagaaacaagaacttcaacatccatggaacgaacaagcactggttaattaggcaagccaagactccaatgactaattcttcaatacagtttttagataatgcatttaggaaaaggtggcaaactctcctctcagttgatgaccttgtggagaaactggtcaagaggctggagttcactggggagctcaacaacacttacatcttctatacctcagacaatggctatcacacaggacagttttccttgccaatagacaagagacagctgtatgagtttgatatcaaagttccactgttggttcgaggacctgggatcaaaccaaatcagacaagcaagatgctggttgccaacattgacttgggtcctactattttggacattgctggctacgacctaaataagacacagatggatgggatgtccttattgcccattttgagaggtgccagtaacttgacctggcgatcagatgtcctggtggaataccaaggagaaggccgtaacgtcactgacccaacatgcccttccctgagtcctggcgtatctcaatgcttcccagactgtgtatgtgaagatgcttataacaatacctatgcctgtgtgaggacaatgtcagcattgtggaatttgcagtattgcgagtttgatgaccaggaggtgtttgtagaagtctataatctgactgcagacccagaccagatcactaacattgctaaaaccatagacccagagcttttaggaaagatgaactatcggttaatgatgttacagtcctgttctgggccaacctgtcgcactccaggggtttttgaccccggatacaggtttgacccccgtctcatgttcagcaatcgcggcagtgtcaggactcgaagattttccaaacatcttctgtagcgacctcacacagcctctgcagatggatccctgcacgcctctttctgatgaagtgattgtagtaggtgtctgtagctagtcttcaagaccacacctggaagagtttctgggctggctttaagtcctgtttgaaaaagcaacccagtcagctgacttcctcgtgcaatgtgttaaactgtgaactctgcccatgtgtcaggagtggctgtctctggtctcttcctttagctgacaaggacactcctgaggtctttgttctcactgtattctttttatcctggggccacagttcttgattattcctcttgtggttaaagactgaatttgtaaacccattcagataaatggcagtactttaggacacacacaaacacacagacacaccttttgatatgtaagcttgacctaaagtcaaaggacctgtgtagcatttcagattgagcacttcactatcaaaaatactaacatcacatggcttgaagagtaaccatcagagctgaatcatccaagtaagaacaagtaccattgttgattgataagtagagatacattttttatgatgttcatcacagtgtggtaaggttgcaaattcaaaacatgtcacccaagctctgttcatgtttttgtgaattctaggctggtgctgcactgaaatagagcagtaagcttgtgataaaggccaattccaggtagctcttgaaggtgatagccatctactttccagtggctgccaaccacagggagtgccagttaacactggaaggattaaggcaaggtcccttctcttgagactcccctctgagatctgaaaaatgaagtggcttaggaacatcagcagtgaagaactgccaagagttggtgaaggttgtctcttccgagggccttctgaagacagggctcttgaacagacaagtggaagggctgtaccagggataaaggaaagaagtgcctgtccagcagggagcttgaatttaagttccatgtatgaagtcattggctctatctgcatttttctgtcattctcttcatttgttttaaggtggaaaattttcttacagttgatgcaaagtatcaactactttaccctaccttctccccttttagatgggttcttcctgagttttggagtcttgtatgattatcagtattcccctgtcaaaatcaaatctattcaggtttcttcactgttgagaacacctaaatgtttttatttttgagaagtggggacagagtctcactatgtcacccaggctggagtgcaatggcatgatctcagctcactgcaaccttcgcctcctgggttcaagcgattctcctgcctccgcctcctgagtagctgggattataggcacgcaccaccacgcccagctaattttttgtatttttagtagagacagagtttcaccatgttggccaggctggtcttgaactcctgaccttgtgatccacccacctcggcctcccagagtgctgggattacaggcatgagccaccacgcttggctaagaacacctaaatttttatgtttcttggctcaaaaaccagttccatttctaatgttgtcctcacaagaaggctaattggtggtgagacagcaggggaggaggaagagctgtggtttgtaacttgttcaactcaggcaataagcgattttagctttatttaaagtcttctgtccagctttaagcactttgtaagacatggctgaaagtagcttttctatcagaattgcagatagtcatgttgggctaacagtcaattggatatattcctttacctcacatgaccccagcaactgtggtggtatctagaggtgaaacaggcaagtgaaatggacacctctgctgtgaatgttttagagaaggaaattcaaaaaatgttgtaactgaaagcactgttgaatatgggtatcggctttctttttcactttgactcttaacattatcagtcaacttccacattaatgaaagttgaccatagttatttccaaataaaaagaaaccaactcttaccaggaaaaaaaaaaacccccccnanaaagaaaaaaaggggggggcctcgtgc

SEQ ID NO: 447869 - DNA, 431 bp, Homo sapiens
cctcccttcccctttagaaataagtcacgttaagagtatttcttcacggctaacctttgctcttttctttcctccattctttcatgtcctctaggtgtttgtagaagtctataatctgactgcagacccagaccagatcactaacattgctaaaaccatagacccagagcttttaggaaagatgaactatcggttaatgatgttacagtcctgttctgggccaacctgtcgcactccaggggtttttgaccccgggtaagtttcctttctcttcatttacttggccaagttttttctagtagacatgctgttcttgaaggcaaagggagccctttttgctgtgagatgatgattcttctgctttagagggaatactgtgttctaattgcatcagcccgttgtgctgggaaaatcaagcttttgaaactttt

SEQ ID NO: 447870 - DNA, 5028 bp, Homo sapiens
agaaaacgtctgactccagccaccggccttcaaggcacggctttttattccttcggctggtcggcctctcgcccttcagctacctgtgcgtccctccgtcccgtcccgtcccggggtcaccccggagcctgtccgctatgcggctcctgcctctagccccaggtcggctccggcggggcagcccccgccacctgccctcctgcagcccagcgctgctactgctggtgctgggcggctgcctgggggtcttcggggtggctgcgggaacccggaggcccaacgtggtgctgctcctcacggacgaccaggacgaagtgctcggcggcatgtatgtgccaagtgctctctgctgccccagcagagccagtatcctgacaggaaagtacccacataatcatcacgttgtgaacaacactctggaggggaactgcagtagtaagtcctggcagaagatccaagaaccaaatactttcccagcaattctcagatcaatgtgtggttatcagaccttttttgcagggaaatatttaaatgagtacggagccccagatgcaggtggactagaacacgttcctctgggttggagttactggtatgccttggaaaagaattctaagtattataattacaccctgtctatcaatgggaaggcacggaagcatggtgaaaactatagtgtggactacctgacagatgttttggctaatgtctccttggactttctggactacaagtccaactttgagcccttcttcatgatgatcgccactccagcgcctcattcgccttggacagctgcacctcagtaccagaaggctttccagaatgtctttgcaccaagaaacaagaacttcaacatccatggaacgaacaagcactggttaattaggcaagccaagactccaatgactaattcttcaatacagtttttagataatgcatttaggaaaaggtggcaaactctcctctcagttgatgaccttgtggagaaactggtcaagaggctggagttcactggggagctcaacaacacttacatcttctatacctcagacaatggctatcacacaggacagttttccttgccaatagacaagagacagctgtatgagtttgatatcaaagttccactgttggttcgaggacctgggatcaaaccaaatcagacaagcaagatgctggttgccaacattgacttgggtcctactattttggacattgctggctacgacctaaataagacacagatggatgggatgtccttattgcccattttgagaggtgccagtaacttgacctggcgatcagatgtcctggtggaataccaaggagaaggccgtaacgtcactgacccaacatgcccttccctgagtcctggcgtatctcaatgcttcccagactgtgtatgtgaagatgcttataacaatacctatgcctgtgtgaggacaatgtcagcattgtggaatttgcagtattgcgagtttgatgaccaggaggtgtttgtagaagtctataatctgactgcagacccagaccagatcactaacattgctaaaaccatagacccagagcttttaggaaagatgaactatcggttaatgatgttacagtcctgttctgggccaacctgtcgcactccaggggtttttgaccccggatacaggtttgacccccgtctcatgttcagcaatcgcggcagtgtcaggactcgaagattttccaaacatcttctgtagcgacctcacacagcctctgcagatggatccctgcacgcctctttctgatgaagtgattgtagtaggtgtctgtagctagtcttcaagaccacacctggaagagtttctgggctggctttaagtcctgtttgaaaaagcaacccagtcagctgacttcctcgtgcaatgtgttaaactgtgaactctgcccatgtgtcaggagtggctgtctctggtctcttcctttagctgacaaggacactcctgaggtctttgttctcactgtattctttttatcctggggccacagttcttgattattcctcttgtggttaaagactgaatttgtaaacccattcagataaatggcagtactttaggacacacacaaacacacagacacaccttttgatatgtaagcttgacctaaagtcaaaggacctgtgtagcatttcagattgagcacttcactatcaaaaatactaacatcacatggcttgaagagtaaccatcagagctgaatcatccaagtaagaacaagtaccattgttgattgataagtagagatacattttttatgatgttcatcacagtgtggtaaggttgcaaattcaaaacatgtcacccaagctctgttcatgtttttgtgaattctaggctggtgctgcactgaaatagagcagtaagcttgtgataaaggccaattccaggtagctcttgaaggtgatagccatctactttccagtggctgccaaccacagggagtgccagttaacactggaaggattaaggcaaggtcccttctcttgagactcccctctgagatctgaaaaatgaagtggcttaggaacatcagcagtgaagaactgccaagagttggtgaaggttgtctcttccgagggccttctgaagacagggctcttgaacagacaagtggaagggctgtaccagggataaaggaaagaagtgcctgtccagcagggagcttgaatttaagttccatgtatgaagtcattggctctatctgcatttttctgtcattctcttcatttgttttaaggtggaaaattttcttacagttgatgcaaagtatcaactactttaccctaccttctccccttttagatgggttcttcctgagttttggagtcttgtatgattatcagtattcccctgtcaaaatcaaatctattcaggtttcttcactgttgagaacacctaaatgtttttatttttgagaagtggggacagagtctcactatgtcacccaggctggagtgcaatggcatgatctcagctcactgcaaccttcgcctcctgggttcaagcgattctcctgcctccgcctcctgagtagctgggattataggcacgcaccaccacgcccagctaattttttgtatttttagtagagacagagtttcaccatgttggccaggctggtcttgaactcctgaccttgtgatccacccacctcggcctcccagagtgctgggattacaggcatgagccaccacgcttggctaagaacacctaaatttttatgtttcttggctcaaaaaccagttccatttctaatgttgtcctcacaagaaggctaattggtggtgagacagcaggggaggaggaagagctgtggtttgtaacttgttcaactcaggcaataagcgattttagctttatttaaagtcttctgtccagctttaagcactttgtaagacatggctgaaagtagcttttctatcagaattgcagatagtcatgttgggctaacagtcaattggatatattcctttacctcacatgaccccagcaactgtggtggtatctagaggtgaaacaggcaagtgaaatggacacctctgctgtgaatgttttagagaaggaaattcaaaaaatgttgtaactgaaagcactgttgaatatgggtatcggctttctttttcactttgactcttaacattatcagtcaacttccacattaatgaaagttgaccatagttatttccaaataaaaagaaaccaactcttaccaggtcttggactgtgatgtcatattattcagttttatgcttgttcctgagcagaactcataagagtgacatagtcagctgctgacggcacctcagccacgccactcttactcagttcagtgggtgtgcttgcgtggtaggatgtggtgcagccctctctacgctcttctatttttggtatatttcctatctaaccttcaaatagcttccaattctttttttcttggactggcttcattctgaatttgtgctaaaataatctttcataaagagacctcagtttatagcgtaacagactacacaatgcactgatgttttcataatgtttaagggacccactgcaagaagcttgctgcctccttttaattgtattcatttagattttgattttccatgttaagaaggtgaggtccatgttggtgcccttcagagtagagaaccatgtaaacattaggaatgaacagaggccttaggaatgaatagagagtttgccttatacaatttcctgttacaaagctctccctctcatgcaaagtagggaacaccttttgagcatctttgaatttgacaaatggtgctgttgcaaacactttttttttgagatgaagtctcgcggttgtcacccgggctggagtgcagtggcgtgatctcggctcactgcaacttccacctcctgggttccagcagttctcctgcctcagcctcccaagtagctgagattacaggcgcctgccaccccacctggctgatttttgtaattttagtagagacggggtttcaccatgttggccaggctgattaactcctgacctcaggtgatccacctttctcggcctcccaaagtgctgggattacgggtgtgagccaccgtgcccggcctgcaaacacattttaattgacaacactagggctgttgtacaaaatagtaatgatagccatggaagttttaccttattctgtgagaagtgttcttaaacttattaagtgtctaaactaaggtttagtgcttttttaaaggaaagttgtcccaggattcatcctaaagaaagcaaaagttaattcaactgatccaccaatggaattagatgggtagagttgggttcttgagttttaccaccacttagttcccactgaattttgtaacttcctgtgtttgcatcctctgttcctattctgcccttgctctgtgtcatctcagtcatttgacttagaaagtgcccttcaaaaggaccctgttcactgctgcacttttcaatgaattaaaatttatttctgttcta

SEQ ID NO: 447871 - DNA, 5034 bp, Homo sapiens
agaaaacgtctgactccagccaccggccttcaaggcacggctttttattccttcggctggtcggcctctcgcccttcagctacctgtgcgtccctccgtcccgtcccgtcccggggtcaccccggagcctgtccgctatgcggctcctgcctctagccccaggtcggctccggcggggcagcccccgccacctgccctcctgcagcccagcgctgctactgctggtgctgggcggctgcctgggggtcttcggggtggctgcgggaacccggaggcccaacgtggtgctgctcctcacggacgaccaggacgaagtgctcggcggcatgacaccgctaaagaaaaccaaagctctcatcggagagatggggatgactttttccagtgcttatgtgccaagtgctctctgctgccccagcagagccagtatcctgacaggaaagtacccacataatcatcacgttgtgaacaacactctggaggggaactgcagtagtaagtcctggcagaagatccaagaaccaaatactttcccagcaattctcagatcaatgtgtggttatcagaccttttttgcagggaaatatttaaatgagtacggagccccagatgcaggtggactagaacacgttcctctgggttggagttactggtatgccttggaaaagaattctaagtattataattacaccctgtctatcaatgggaaggcacggaagcatggtgaaaactatagtgtggactacctgacagatgttttggctaatgtctccttggactttctggactacaagtccaactttgagcccttcttcatgatgatcgccactccagcgcctcattcgccttggacagctgcacctcagtaccagaaggctttccagaatgtctttgcaccaagaaacaagaacttcaacatccatggaacgaacaagcactggttaattaggcaagccaagactccaatgactaattcttcaatacagtttttagataatgcatttaggaaaaggtggcaaactctcctctcagttgatgaccttgtggagaaactggtcaagaggctggagttcactggggagctcaacaacacttacatcttctatacctcagacaatggctatcacacaggacagttttccttgccaatagacaagagacagctgtatgagtttgatatcaaagttccactgttggttcgaggacctgggatcaaaccaaatcagacaagcaagatgctggttgccaacattgacttgggtcctactattttggacattgctggctacgacctaaataagacacagatggatgggatgtccttattgcccattttgagaggtgccagtaacttgacctggcgatcagatgtcctggtggaataccaaggagaaggccgtaacgtcactgacccaacatgcccttccctgagtcctggcgtatctcaatgcttcccagactgtgtatgtgaagatgcttataacaatacctatgcctgtgtgaggacaatgtcagcattgtggaatttgcagtattgcgagtttgatgaccaggaggtgtttgtagaagtctataatctgactgcagacccagaccagatcactaacattgctaaaaccatagacccagagcttttaggaaagatgaactatcggttaatgatgttacagtcctgttctgggccaacctgtcgcactccaggggtttttgaccccggatacaggtttgacccccgtctcatgttcagcaatcgcggcagtgtcaggactcgaagattttccaaacatcttctgtagcgacctcacacagcctctgcagatggatccctgcacgcctctttctgatgaagtgattgtagtaggtgtctgtagctagtcttcaagaccacacctggaagagtttctgggctggctttaagtcctgtttgaaaaagcaacccagtcagctgacttcctcgtgcaatgtgttaaactgtgaactctgcccatgtgtcaggagtggctgtctctggtctcttcctttagctgacaaggacactcctgaggtctttgttctcactgtattctttttatcctggggccacagttcttgattattcctcttgtggttaaagactgaatttgtaaacccattcagataaatggcagtactttaggacacacacaaacacacagacacaccttttgatatgtaagcttgacctaaagtcaaaggacctgtgtagcatttcagattgagcacttcactatcaaaaatactaacatcacatggcttgaagagtaaccatcagagctgaatcatccaagtaagaacaagtaccattgttgattgataagtagagatacattttttatgatgttcatcacagtgtggtaaggttgcaaattcaaaacatgtcacccaagctctgttcatgtttttgtgaattctaggctggtgctgcactgaaatagagcagtaagcttgtgataaaggccaattccaggtagctcttgaaggtgatagccatctactttccagtggctgccaaccacagggagtgccagttaacactggaaggattaaggcaaggtcccttctcttgagactcccctctgagatctgaaaaatgaagtggcttaggaacatcagcagtgaagaactgccaagagttggtgaaggttgtctcttccgagggccttctgaagacagggctcttgaacagacaagtggaagggctgtaccagggataaaggaaagaagtgcctgtccagcagggagcttgaatttaagttccatgtatgaagtcattggctctatctgcatttttctgtcattctcttcatttgttttaaggtggaaaattttcttacagttgatgcaaagtatcaactactttaccctaccttctccccttttagatgggttcttcctgagttttggagtcttgtatgattatcagtattcccctgtcaaaatcaaatctattcaggtttcttcactgttgagaacacctaaatgtttttatttttgagaagtggggacagagtctcactatgtcacccaggctggagtgcaatggcatgatctcagctcactgcaaccttcgcctcctgggttcaagcgattctcctgcctccgcctcctgagtagctgggattataggcacgcaccaccacgcccagctaattttttgtatttttagtagagacagagtttcaccatgttggccaggctggtcttgaactcctgaccttgtgatccacccacctcggcctcccagagtgctgggattacaggcatgagccaccacgcttggctaagaacacctaaatttttatgtttcttggctcaaaaaccagttccatttctaatgttgtcctcacaagaaggctaattggtggtgagacagcaggggaggaggaagagctgtggtttgtaacttgttcaactcaggcaataagcgattttagctttatttaaagtcttctgtccagctttaagcactttgtaagacatggctgaaagtagcttttctatcagaattgcagatagtcatgttgggctaacagtcaattggatatattcctttacctcacatgaccccagcaactgtggtggtatctagaggtgaaacaggcaagtgaaatggacacctctgctgtgaatgttttagagaaggaaattcaaaaaatgttgtaactgaaagcactgttgaatatgggtatcggctttctttttcactttgactcttaacattatcagtcaacttccacattaatgaaagttgaccatagttatttccaaatatatgcttgttcctgagcagaactcataagagtgacatagtcagctgctgacggcacctcagccacgccactcttactcagttcagtgggtgtgcttgcgtggtaggatgtggtgcagccctctctacgctcttctatttttggtatatttcctatctaaccttcaaatagcttccaattctttttttcttggactggcttcattctgaatttgtgctaaaataatctttcataaagagacctcagtttatagcgtaacagactacacaatgcactgatgttttcataatgtttaagggacccactgcaagaagcttgctgcctccttttaattgtattcatttagattttgattttccatgttaagaaggtgaggtccatgttggtgcccttcagagtagagaaccatgtaaacattaggaatgaacagaggccttaggaatgaatagagagtttgccttatacaatttcctgttacaaagctctccctctcatgcaaagtagggaacaccttttgagcatctttgaatttgacaaatggtgctgttgcaaacactttttttttgagatgaagtctcgcggttgtcacccgggctggagtgcagtggcgtgatctcggctcactgcaacttccacctcctgggttccagcagttctcctgcctcagcctcccaagtagctgagattacaggcgcctgccaccccacctggctgatttttgtaattttagtagagacggggtttcaccatgttggccaggctgattaactcctgacctcaggtgatccacctttctcggcctcccaaagtgctgggattacgggtgtgagccaccgtgcccggcctgcaaacacattttaattgacaacactagggctgttgtacaaaatagtaatgatagccatggaagttttaccttattctgtgagaagtgttcttaaacttattaagtgtctaaactaaggtttagtgcttttttaaaggaaagttgtcccaggattcatcctaaagaaagcaaaagttaattcaactgatccaccaatggaattagatgggtagagttgggttcttgagttttaccaccacttagttcccactgaattttgtaacttcctgtgtttgcatcctctgttcctattctgcccttgctctgtgtcatctcagtcatttgacttagaaagtgcccttcaaaaggaccctgttcactgctgcacttttcaatgaattaaaatttatttctgttcta

SEQ ID NO: 447872 - DNA, 3708 bp, Homo sapiens
agaaaacgtctgactccagccaccggccttcaaggcacggctttttattccttcggctggtcggcctctcgcccttcagctacctgtgcgtccctccgtcccgtcccgtcccggggtcaccccggagcctgtccgctatgcggctcctgcctctagccccaggtcggctccggcggggcagcccccgccacctgccctcctgcagcccagcgctgctactgctggtgctgggcggctgcctgggggtcttcggggtggctgcgggaacccggaggcccaacgtggtgctgctcctcacggacgaccaggacgaagtgctcggcggcatgacaccgctaaagaaaaccaaagctctcatcggagagatggggatgactttttccagtgcttatgtgccaagtgctctctgctgccccagcagagccagtatcctgacaggaaagtacccacataatcatcacgttgtgaacaacactctggaggggaactgcagtagtaagtcctggcagaagatccaagaaccaaatactttcccagcaattctcagatcaatgtgtggttatcagaccttttttgcagggaaatatttaaatgagtacggagccccagatgcaggtggactagaacacgttcctctgggttggagttactggtatgccttggaaaagaattctaagtattataattacaccctgtctatcaatgggaaggcacggaagcatggtgaaaactatagtgtggactacctgacagatgttttggctaatgtctccttggactttctggactacaagtccaactttgagcccttcttcatgatgatcgccactccagcgcctcattcgccttggacagctgcacctcagtaccagaaggctttccagaatgtctttgcaccaagaaacaagaacttcaacatccatggaacgaacaagcactggttaattaggcaagccaagactccaatgactaattcttcaatacagtttttagataatgcatttaggaaaaggtggcaaactctcctctcagttgatgaccttgtggagaaactggtcaagaggctggagttcactggggagctcaacaacacttacatcttctatacctcagacaatggctatcacacaggacagttttccttgccaatagacaagagacagctgtatgagtttgatatcaaagttccactgttggttcgaggacctgggatcaaaccaaatcagacaagcaagatgctggttgccaacattgacttgggtcctactattttggacattgctggctacgacctaaataagacacagatggatgggatgtccttattgcccattttgagaggtgccagtaacttgacctggcgatcagatgtcctggtggaataccaaggagaaggccgtaacgtcactgacccaacatgcccttccctgagtcctggcgtatctcaatgcttcccagactgtgtatgtgaagatgcttataacaatacctatgcctgtgtgaggacaatgtcagcattgtggaatttgcagtattgcgagtttgatgaccaggaggtgtttgtagaagtctataatctgactgcagacccagaccagatcactaacattgctaaaaccatagacccagagcttttaggaaagatgaactatcggttaatgatgttacagtcctgttctgggccaacctgtcgcactccaggggtttttgaccccggatacaggtttgacccccgtctcatgttcagcaatcgcggcagtgtcaggactcgaagattttccaaacatcttctgtagcgacctcacacagcctctgcagatggatccctgcacgcctctttctgatgaagtgattgtagtaggtgtctgtagctagtcttcaagaccacacctggaagagtttctgggctggctttaagtcctgtttgaaaaagcaacccagtcagctgacttcctcgtgcaatgtgttaaactgtgaactctgcccatgtgtcaggagtggctgtctctggtctcttcctttagctgacaaggacactcctgaggtctttgttctcactgtattctttttatcctggggccacagttcttgattattcctcttgtggttaaagactgaatttgtaaacccattcagataaatggcagtactttaggacacacacaaacacacagacacaccttttgatatgtaagcttgacctaaagtcaaaggacctgtgtagcatttcagattgagcacttcactatcaaaaatactaacatcacatggcttgaagagtaaccatcagagctgaatcatccaagtaagaacaagtaccattgttgattgataagtagagatacattttttatgatgttcatcacagtgtggtaaggttgcaaattcaaaacatgtcacccaagctctgttcatgtttttgtgaattctaggctggtgctgcactgaaatagagcagtaagcttgtgataaaggccaattccaggtagctcttgaaggtgatagccatctactttccagtggctgccaaccacagggagtgccagttaacactggaaggattaaggcaaggtcccttctcttgagactcccctctgagatctgaaaaatgaagtggcttaggaacatcagcagtgaagaactgccaagagttggtgaaggttgtctcttccgagggccttctgaagacagggctcttgaacagacaagtggaagggctgtaccagggataaaggaaagaagtgcctgtccagcagggagcttgaatttaagttccatgtatgaagtcattggctctatctgcatttttctgtcattctcttcatttgttttaaggtggaaaattttcttacagttgatgcaaagtatcaactactttaccctaccttctccccttttagatgggttcttcctgagttttggagtcttgtatgattatcagtattcccctgtcaaaatcaaatctattcaggtttcttcactgttgagaacacctaaatgtttttatttttgagaagtggggacagagtctcactatgtcacccaggctggagtgcaatggcatgatctcagctcactgcaaccttcgcctcctgggttcaagcgattctcctgcctccgcctcctgagtagctgggattatagagattacaggcgcctgccaccccacctggctgatttttgtaattttagtagagacggggtttcaccatgttggccaggctgattaactcctgacctcaggtgatccacctttctcggcctcccaaagtgctgggattacgggtgtgagccaccgtgcccggcctgcaaacacattttaattgacaacactagggctgttgtacaaaatagtaatgatagccatggaagttttaccttattctgtgagaagtgttcttaaacttattaagtgtctaaactaaggtttagtgcttttttaaaggaaagttgtcccaggattcatcctaaagaaagcaaaagttaattcaactgatccaccaatggaattagatgggtagagttgggttcttgagttttaccaccacttagttcccactgaattttgtaacttcctgtgtttgcatcctctgttcctattctgcccttgctctgtgtcatctcagtcatttgacttagaaagtgcccttcaaaaggaccctgttcactgctgcacttttcaatgaattaaaatttatttctgttcta

SEQ ID NO: 447873 - DNA, 2130 bp, Homo sapiens
caaggatgaggcggggtttcgccgtggcgcgcatgcgtgcagcaaagaatggaggagtcggaacccgaacggaagcgggctcgcaccgacgaggtgcctgccggaggaagccgctccgaggcggaagatgaggacgacgaggactacgtgccctatgtgccgttacggcagcgccggcagctactgctccagaagctgctgcagcgaagacgcaagggagctgcggaggaagagcagcaggacagcggtagtgaaccccggggagatgaggacgacatcccgctaggccctcagtccaacgtcagcctcctggatcagcaccagcaccttaaagagaaggctgaagcgcgcaaagagtctgccaaggagaagcagctgaaggaagaagagaagatcctggagagtgttgccgagggccgagcattgatgtcagtgaaggagatggctaagggcattacgtatgatgaccccatcaaaaccagctggactccaccccgttatgttctgagcatgtctgaagagcgacatgagcgcgtgcggaagaaataccacatcctggtggagggagacggtatcccaccacccatcaagagcttcaaggaaatgaagtttcctgcagccatcctgagaggcctgaagaagaaaggcattcaccacccaacacccattcagatccagggcatccccaccattctatctggccgtgacatgataggcatcgctttcacgggttcaggcaagacactggtgttcacgttgcccgtcatcatgttctgcctggaacaagagaagaggttacccttctcaaagcgcgaggggccctatggactcatcatctgcccctcgcgggagctggcccggcagacccatggcatcctggagtactactgccgcctgctgcaggaggacagctcaccactcctgcgctgcgccctctgcattgggggcatgtccgtgaaagagcagatggagaccatccgacacggtgtacacatgatggtggccaccccggggcgcctcatggatttgctgcagaagaagatggtcagcctagacatctgtcgctacctggccctggacgaggctgaccgcatgatcgacatgggcttcgagggtgacatccgtaccatcttctcctacttcaagggccagcgacagaccctgctcttcagtgccaccatgccgaagaagattcagaactttgctaagagtgcccttgtaaagcctgtgaccatcaatgtggggcgcgctggggctgccagcctggatgtcatccaggaggtagaatatgtgaaggaggaggccaagatggtgtacctgctcgagtgcctgcagaagacacccccgcctgtactcatctttgcagagaagaaggcagacgtggacgccatccacgagtacctgctgctcaagggggttgaggccgtagccatccatgggggcaaagaccaggaggaacggactaaggccatcgaggcattccgggagggcaagaaggatgtcctagtagccacagacgttgcctccaagggcctggacttccctgccatccagcacgtcatcaattatgacatgccagaggagattgagaactatgtacaccggattggccgcaccgggcgctcgggaaacacaggcatcgccactaccttcatcaacaaagcgtgtgatgagtcagtgctgatggacctcaaagcgctgctgctagaagccaagcagaaggtgccgcccgtgctgcaggtgctgcattgcggggatgagtccatgctggacattggaggagagcgcggctgtgccttctgcgggggcctgggtcatcggatcactgactgccccaaactcgaggctatgcagaccaagcaggtcagcaacatcggtcgcaaggactacctggcccacagctccatggacttctgagccgacagtcttcccttctctccaagaggcctcagtccccaagactgccaccagtctacacatacagcagccccctggacagaatcagcatttcagctcagctggcctggaatgggccaggctggtcctggctgcctgttccctgtgctcttcagaattactgtttttgtttccttttaccccagctgccattaaagcccaaacctctagcca

SEQ ID NO: 447874 - DNA, 280 bp, Homo sapiens
ccccgactagcccgacagtccccgactagcccgacagccccccactagcccgacagtccccgactagcccgacagcccagccctgtgtgcccttggtcgcagcccccctcttcctcagggccagcgacagaccctgctcttcagtgccaccatgccgaagaagattcagaactttgctaagagtgcccttgtaaagcctgtgaccatcaatgtggggcgcgctggggctgccagcctggatgtcatccaggtgggcaggtgctcctgatgggcggtctct

SEQ ID NO: 447875 - DNA, 2265 bp, Homo sapiens
  misc_feature (29)..(29): n is a, c, g, or t
  misc_feature (31)..(32): n is a, c, g, or t
ggtcgactactactaaattcgcggccgcntnnacgaatggaggagtcggaacccgaacggaagcgggctcgcaccgacgaggtgcctgccggaggaagccgctccgaggcggaagatgaggacgacgaggactacgtgccctatgtgccgttacggcagcgccggcagctactgctccagaagctgctgcagcgaagacgcaagggagctgcggaggaagagcagcaggacagcggtagtgaaccccggggagatgaggacgacatcccgctaggccctcagtccaacgtcagcctcctggatcagcaccagcaccttaaagagaaggctgaagcgcgcaaagagtctgccaaggagaagcagctgaaggaagaagagaagatcctggagagtgttgccgagggccgagcattgatgtcagtgaaggagatggctaagggcattacgtatgatgaccccatcaaaaccagctggactccaccccgttatgttctgagcatgtctgaagagcgacatgagcgcgtgcggaagaaataccacatcctggtggagggagacggtatcccaccacccatcaagagcttcaaggaaatgaagtttcctgcagccatcctgagaggcctgaagaagaaaggcattcaccacccaacacccattcagatccagggcatccccaccattctatctggccgtgacatgataggcatcgctttcacgggttcaggcaagacactggtgttcacgttgcccgtcatcatgttctgcctggaacaagagaagaggttacccttctcaaagcgcgaggggccctatggactcatcatctgcccctcgcgggagctggcccggcagacccatggcatcctggagtactactgccgcctgctgcaggaggacagctcaccactcctgcgctgcgccctctgcattgggggcatgtccgtgaaagagcagatggagaccatccgacagtgagtgctggcgctccctgccccccacctctgccacctgcgagtctgtggaaaagctaaaggaccctttaccttagccactccacagatcttcacagagggctgctgtgagtgcgaccctcaaggagctcccagtctaatggggagcggtgtacacatgatggtggccaccccggggcgcctcatggatttgctgcagaagaagatggtcagcctagacatctgtcgctacctggccctggacgaggctgaccgcatgatcgacatgggcttcgagggtgacatccgtaccatcttctcctacttcaagggccagcgacagaccctgctcttcagtgccaccatgccgaagaagattcagaactttgctaagagtgcccttgtaaagcctgtgaccatcaatgtggggcgcgctggggctgccagcctggatgtcatccaggaggtagaatatgtgaaggaggaggccaagatggtgtacctgctcgagtgcctgcagaagacacccccgcctgtactcatctttgcagagaagaaggcagacgtggacgccatccacgagtacctgctgctcaagggggttgaggccgtagccatccatgggggcaaagaccaggaggaacggactaaggccatcgaggcattccgggagggcaagaaggatgtcctagtagccacagacgttgcctccaagggcctggacttccctgccatccagcacgtcatcaattatgacatgccagaggagattgagaactatgtacaccggattggccgcaccgggcgctcgggaaacacaggcatcgccactaccttcatcaacaaagcgtgtgatgagtcagtgctgatggacctcaaagcgctgctgctagaagccaagcagaaggtgccgcccgtgctgcaggtgctgcattgcggggatgagtccatgctggacattggaggagagcgcggctgtgccttctgcgggggcctgggtcatcggatcactgactgccccaaactcgaggctatgcagaccaagcaggtcagcaacatcggtcgcaaggactacctggcccacagctccatggacttctgagccgacagtcttcccttctctccaagaggcctcagtccccaagactgccaccagtctacacatacagcagccccctggacagaatcagcatttcagctcagctggcctggaatgggccaggctggtcctggctgcctgttccctgtgctcttcagaattactgtttttgtttccttttaccccagctgccattaaagcccaaacctctagcca

SEQ ID NO: 447876 - DNA, 2251 bp, Homo sapiens
  misc_feature (29)..(29): n is a, c, g, or t
  misc_feature (31)..(32): n is a, c, g, or t
ggtcgactactactaaattcgcggccgcntnnacgaatggaggagtcggaacccgaacggaagcgggctcgcaccgacgaggtgcctgccggaggaagccgctccgaggcggaagatgaggacgacgaggactacgtgccctatgtgccgttacggcagcgccggcagctactgctccagaagctgctgcagcgaagacgcaagggagctgcggaggaagagcagcaggacagcggtagtgaaccccggggagatgaggacgacatcccgctaggccctcagtccaacgtcagcctcctggatcagcaccagcaccttaaagagaaggctgaagcgcgcaaagagtctgccaaggagaagcagctgaaggaagaagagaagatcctggagagtgttgccgagggccgagcattgatgtcagtgaaggagatggctaagggcattacgtatgatgaccccatcaaaaccagctggactccaccccgttatgttctgagcatgtctgaagagcgacatgagcgcgtgcggaagaaataccacatcctggtggagggagacggtatcccaccacccatcaagagcttcaaggaaatgaagtttcctgcagccatcctgagaggcctgaagaagaaaggcattcaccacccaacacccattcagatccagggcatccccaccattctatctggccgtgacatgataggcatcgctttcacgggttcaggcaagacactggtgttcacgttgcccgtcatcatgttctgcctggaacaagagaagaggttacccttctcaaagcgcgaggggccctatggactcatcatctgcccctcgcgggagctggcccggcagacccatggcatcctggagtactactgccgcctgctgcaggaggacagctcaccactcctgcgctgcgccctctgcattgggggcatgtccgtgaaagagcagatggagaccatccgacacggtgtacacatgatggtggccaccccggggcgcctcatggatttgctgcagaagaagatggtcagcctagacatctgtcgctacctggccctggacgaggctgaccgcatgatcgacatgggcttcgagggtgacatccgtaccatcttctcctacttcaagggccagcgacagaccctgctcttcagtgccaccatgccgaagaagattcagaactttgctaagagtgcccttgtaaagcctgtgaccatcaatgtggggcgcgctggggctgccagcctggatgtcatccaggaggtagaatatgtgaaggaggaggccaagatggtgtacctgctcgagtgcctgcagaagacacccccgcctgtactcatctttgcagagaagaaggcagacgtggacgccatccacgagtacctgctgctcaagggggttgaggccgtagccatccatgggggcaaaggtcagggtggtgcaagcactggcttggaccctgctgcagtagcagcgctttacctaatgccttcccctgctggttggcctgccactcccctatcccatggtggctctgacagtgtctgcctgaccctccccagaccaggaggaacggactaaggccatcgaggcattccgggagggcaagaaggatgtcctagtagccacagacgttgcctccaagggcctggacttccctgccatccagcacgtcatcaattatgacatgccagaggagattgagaactatgtacaccggattggccgcaccgggcgctcgggaaacacaggcatcgccactaccttcatcaacaaagcgtgtgatgagtcagtgctgatggacctcaaagcgctgctgctagaagccaagcagaaggtgccgcccgtgctgcaggtgctgcattgcggggatgagtccatgctggacattggaggagagcgcggctgtgccttctgcgggggcctgggtcatcggatcactgactgccccaaactcgaggctatgcagaccaagcaggtcagcaacatcggtcgcaaggactacctggcccacagctccatggacttctgagccgacagtcttcccttctctccaagaggcctcagtccccaagactgccaccagtctacacatacagcagccccctggacagaatcagcatttcagctcagctggcctggaatgggccaggctggtcctggctgcctgttccctgtgctcttcagaattactgtttttgtttccttttaccccagctgccattaaagcccaaacctctagcca

SEQ ID NO: 447877 - DNA, 2213 bp, Homo sapiens
caaggatgaggcggggtttcgccgtggcgcgcatgcgtgcagcaaagaatggaggagtcggaacccgaacggaaggtaggagagaggcgagaccccgcgcgtgtgggagcgggcgtgaagaggggagcaggccgtgcctgactggcgtgtgcttgcagcgggctcgcaccgacgaggtgcctgccggaggaagccgctccgaggcggaagatgaggacgacgaggactacgtgccctatgtgccgttacggcagcgccggcagctactgctccagaagctgctgcagcgaagacgcaagggagctgcggaggaagagcagcaggacagcggtagtgaaccccggggagatgaggacgacatcccgctaggccctcagtccaacgtcagcctcctggatcagcaccagcaccttaaagagaaggctgaagcgcgcaaagagtctgccaaggagaagcagctgaaggaagaagagaagatcctggagagtgttgccgagggccgagcattgatgtcagtgaaggagatggctaagggcattacgtatgatgaccccatcaaaaccagctggactccaccccgttatgttctgagcatgtctgaagagcgacatgagcgcgtgcggaagaaataccacatcctggtggagggagacggtatcccaccacccatcaagagcttcaaggaaatgaagtttcctgcagccatcctgagaggcctgaagaagaaaggcattcaccacccaacacccattcagatccagggcatccccaccattctatctggccgtgacatgataggcatcgctttcacgggttcaggcaagacactggtgttcacgttgcccgtcatcatgttctgcctggaacaagagaagaggttacccttctcaaagcgcgaggggccctatggactcatcatctgcccctcgcgggagctggcccggcagacccatggcatcctggagtactactgccgcctgctgcaggaggacagctcaccactcctgcgctgcgccctctgcattgggggcatgtccgtgaaagagcagatggagaccatccgacacggtgtacacatgatggtggccaccccggggcgcctcatggatttgctgcagaagaagatggtcagcctagacatctgtcgctacctggccctggacgaggctgaccgcatgatcgacatgggcttcgagggtgacatccgtaccatcttctcctacttcaagggccagcgacagaccctgctcttcagtgccaccatgccgaagaagattcagaactttgctaagagtgcccttgtaaagcctgtgaccatcaatgtggggcgcgctggggctgccagcctggatgtcatccaggaggtagaatatgtgaaggaggaggccaagatggtgtacctgctcgagtgcctgcagaagacacccccgcctgtactcatctttgcagagaagaaggcagacgtggacgccatccacgagtacctgctgctcaagggggttgaggccgtagccatccatgggggcaaagaccaggaggaacggactaaggccatcgaggcattccgggagggcaagaaggatgtcctagtagccacagacgttgcctccaagggcctggacttccctgccatccagcacgtcatcaattatgacatgccagaggagattgagaactatgtacaccggattggccgcaccgggcgctcgggaaacacaggcatcgccactaccttcatcaacaaagcgtgtgatgagtcagtgctgatggacctcaaagcgctgctgctagaagccaagcagaaggtgccgcccgtgctgcaggtgctgcattgcggggatgagtccatgctggacattggaggagagcgcggctgtgccttctgcgggggcctgggtcatcggatcactgactgccccaaactcgaggctatgcagaccaagcaggtcagcaacatcggtcgcaaggactacctggcccacagctccatggacttctgagccgacagtcttcccttctctccaagaggcctcagtccccaagactgccaccagtctacacatacagcagccccctggacagaatcagcatttcagctcagctggcctggaatgggccaggctggtcctggctgcctgttccctgtgctcttcagaattactgtttttgtttccttttaccccagctgccattaaagcccaaacctctagcca

SEQ ID NO: 447878 - DNA, 1965 bp, Homo sapiens
  misc_feature (29)..(29): n is a, c, g, or t
  misc_feature (31)..(32): n is a, c, g, or t
ggtcgactactactaaattcgcggccgcntnnacgaatggaggagtcggaacccgaacggaagcgggctcgcaccgacgaggtgcctgccggaggaagccgctccgaggcggaagatgaggacgacgaggactacgtgccctatgtgccgttacggcagcgccggcagctactgctccagaagctgctgcagcgaagacgcaagggagctgcggaggaagagcagcaggacagcggtagtgaaccccggggagatgaggacgacatcccgctaggccctcagtccaacgtcagcctcctggatcagcaccagcaccttaaagagaaggctgaagcgcgcaaagagtctgccaaggagaagcagctgaaggaagaagagaagatcctggagagtgttgccgagggccgagcattgatgtcagtgaaggagatggctaagggcattacgtatgatgaccccatcaaaaccagctggactccaccccgttatgttctgagcatgtctgaagagcgacatgagcgcgtgcggaagaaataccacatcctggtggagggagacggtatcccaccacccatcaagagcttcaaggaaatgaagtttcctgcagccatcctgagaggcctgaagaagaaaggcattcaccacccaacacccattcagatccagggcatccccaccattctatctggccgtgacatgataggcatcgctttcacgggttcaggcaagacactggtgttcacgttgcccgtcatcatgttctgcctggaacaagagaagaggttacccttctcaaagcgcgaggggccctatggactcatcatctgcccctcgcgggagctggcccggcagacccatggcatcctggagtactactgccgcctgctgcaggaggacagctcaccactcctgcgctgcgccctctgcattgggggcatgtccgtgaaagagcagatggagaccatccgacacggtgtacacatgatggtggccaccccggggcgcctcatggatttgctgcagaagaagatggtcagcctagacatctgtcgctacctggccctggacgaggctgaccgcatgatcgacatgggcttcgagggtgacatccgtaccatcttctcctacttcaagggccagcgacagaccctgctcttcagtgccaccatgccgaagaagattcagaactttgctaagagtgcccttgtaaagcctgtgaccatcaatgtggggcgcgctggggctgccagcctggatgtcatccaggaggtagaatatgtgaaggaggaggccaagatggtgtacctgctcgagtgcctgcagaagacacccccgcctgtactcatctttgcagagaagaaggcagacgtggacgccatccacgagtacctgctgctcaagggggttgaggccgtagccatccatgggggcaaagaccaggaggaacggactaaggccatcgaggcattccgggagggcaagaaggatgtcctagtagccacagacgttgcctccaagggcctggacttccctgccatccagcacgtcatcaattatgacatgccagaggagattgagaactatgtacaccggattggccgcaccgggcgctcgggaaacacaggcatcgccactaccttcatcaacaaagcgtgtgatgagtcagtgctgatggacctcaaagcgctgctgctagaagccaagcagaaggtgccgcccgtgctgcaggtgctgcattgcggggatgagtccatgctggacattggaggagagcgcggctgtgccttctgcgggggcctgggtcatcggatcactgactgccccaaactcgaggctatgcagaccaagcaggtcagcaacatcggtcgcaaggatggtcctggctgcctgttccctgtgctcttcagaattactgtttttgtttccttttaccccagctgccattaaagcccaaacctctagcca

SEQ ID NO: 447879 - DNA, 2490 bp, Homo sapiens
caaggatgaggcggggtttcgccgtggcgcgcatgcgtgcagcaaagaatggaggagtcggaacccgaacggaaggtaggagagaggcgagaccccgcgcgtgtgggagcgggcgtgaagaggggagcaggccgtgcctgactggcgtgtgcttgcagcgggctcgcaccgacgaggtgcctgccggaggaagccgctccgaggcggaagatgaggacgacgaggactacgtgccctatgtgccgttacggcagcgccggcagctactggtgaggggcacgcgtccggggagggatggggccgtgaccgcggggtcgcagggggcgggcgtggcctcggcctccgtggggaggagggcagtctgaggagtgagcttcagtacaccagggcgcggcccccagacaaacgagggaccgacggcttgatctgaggggtagggcagctttgcgcctcgggcacaggatcctcgccccaaagccaggatcctgacgctgaccttgtggactccatgcccatcctatctgtggatcccgggtggaacctcagctccagaagctgctgcagcgaagacgcaagggagctgcggaggaagagcagcaggacagcggtagtgaaccccggggagatgaggacgacatcccgctaggccctcagtccaacgtcagcctcctggatcagcaccagcaccttaaagagaaggctgaagcgcgcaaagagtctgccaaggagaagcagctgaaggaagaagagaagatcctggagagtgttgccgagggccgagcattgatgtcagtgaaggagatggctaagggcattacgtatgatgaccccatcaaaaccagctggactccaccccgttatgttctgagcatgtctgaagagcgacatgagcgcgtgcggaagaaataccacatcctggtggagggagacggtatcccaccacccatcaagagcttcaaggaaatgaagtttcctgcagccatcctgagaggcctgaagaagaaaggcattcaccacccaacacccattcagatccagggcatccccaccattctatctggccgtgacatgataggcatcgctttcacgggttcaggcaagacactggtgttcacgttgcccgtcatcatgttctgcctggaacaagagaagaggttacccttctcaaagcgcgaggggccctatggactcatcatctgcccctcgcgggagctggcccggcagacccatggcatcctggagtactactgccgcctgctgcaggaggacagctcaccactcctgcgctgcgccctctgcattgggggcatgtccgtgaaagagcagatggagaccatccgacacggtgtacacatgatggtggccaccccggggcgcctcatggatttgctgcagaagaagatggtcagcctagacatctgtcgctacctggccctggacgaggctgaccgcatgatcgacatgggcttcgagggtgacatccgtaccatcttctcctacttcaagggccagcgacagaccctgctcttcagtgccaccatgccgaagaagattcagaactttgctaagagtgcccttgtaaagcctgtgaccatcaatgtggggcgcgctggggctgccagcctggatgtcatccaggaggtagaatatgtgaaggaggaggccaagatggtgtacctgctcgagtgcctgcagaagacacccccgcctgtactcatctttgcagagaagaaggcagacgtggacgccatccacgagtacctgctgctcaagggggttgaggccgtagccatccatgggggcaaagaccaggaggaacggactaaggccatcgaggcattccgggagggcaagaaggatgtcctagtagccacagacgttgcctccaagggcctggacttccctgccatccagcacgtcatcaattatgacatgccagaggagattgagaactatgtacaccggattggccgcaccgggcgctcgggaaacacaggcatcgccactaccttcatcaacaaagcgtgtgatgagtcagtgctgatggacctcaaagcgctgctgctagaagccaagcagaaggtgccgcccgtgctgcaggtgctgcattgcggggatgagtccatgctggacattggaggagagcgcggctgtgccttctgcgggggcctgggtcatcggatcactgactgccccaaactcgaggctatgcagaccaagcaggtcagcaacatcggtcgcaaggactacctggcccacagctccatggacttctgagccgacagtcttcccttctctccaagaggcctcagtccccaagactgccaccagtctacacatacagcagccccctggacagaatcagcatttcagctcagctggcctggaatgggccaggctggtcctggctgcctgttccctgtgctcttcagaattactgtttttgtttccttttaccccagctgccattaaagcccaaacctctagcca

SEQ ID NO: 447880 - DNA, 1691 bp, Homo sapiens
  misc_feature (29)..(29): n is a, c, g, or t
  misc_feature (31)..(32): n is a, c, g, or t
ggtcgactactactaaattcgcggccgcntnnacgaatggaggagtcggaacccgaacggaagcgggctcgcaccgacgaggtgcctgccggaggaagccgctccgaggcggaagatgaggacgacgaggactacgtgccctatgtgccgttacggcagcgccggcagctactgctccagaagctgctgcagcgaagacgcaagggagctgcggaggaagagcagcaggacagcggtagtgaaccccggggagatgaggacgacatcccgctaggccctcagtccaacgtcagcctcctggatcagcaccagcaccttaaagagaaggctgaagcgcgcaaagagtctgccaaggagaagcagctgaaggaagaagagaagatcctggagagtgttgccgagggccgagcattgatgtcagtgaaggagatggctaagggcattacgtatgatgaccccatcaaaaccagctggactccaccccgttatgttctgagcatgtctgaagagcgacatgagcgcgtgcggaagaaataccacatcctggtggagggagacggtatcccaccacccatcaagagcttcaaggaaatgaagtttcctgcagccatcctgagaggcctgaagaagaaaggcattcaccacccaacacccattcagatccagggcatccccaccattctatctggccgtgacatgataggcatcgctttcacgggttcaggcaagacactggtgttcacgttgcccgtcatcatgttctgcctggaacaagagaagaggttacccttctcaaagcgcgaggggccctatggactcatcatctgcccctcgcgggagctggcccggcagacccatggcatcctggagtactactgccgcctgctgcaggaggacagctcaccactcctgcgctgcgccctctgcattgggggcatgtccgtgaaagagcagatggagaccatccgacacggtgtacacatgatggtggccaccccggggcgcctcatggatttgctgcagaagaagatggtcagcctagacatctgtcgctacctggccctggacgaggctgaccgcatgatcgacatgggcttcgagggtgacatccgtaccatcttctcctacttcaagggccagcgacagaccctgctcttcagtgccaccatgccgaagaagattcagaactttgctaagagtgcccttgtaaagcctgtgaccatcaatgtggggcgcgctggggctgccagcctggatgtcatccaggaggtagaatatgtgaaggaggaggccaagatggtgtacctgctcgagtgcctgcagaagacacccccgcctgtactcatctttgcagagaagaaggcagacgtggacgccatccacgagtacctgctgctcaagggggttgaggccgtagccatccatgggggcaaagaccaggaggaacggactaaggccatcgaggcattccgggagggcaagaaggatgtcccttctctccaagaggcctcagtccccaagactgccaccagtctacacatacagcagccccctggacagaatcagcatttcagctcagctggcctggaatgggccaggctggtcctggctgcctgttccctgtgctcttcagaattactgtttttgtttccttttaccccagctgccattaaagcccaaacctctagcca

SEQ ID NO: 447881 - DNA, 1481 bp, Homo sapiens
  misc_feature (29)..(29): n is a, c, g, or t
  misc_feature (31)..(32): n is a, c, g, or t
ggtcgactactactaaattcgcggccgcntnnacgaatggaggagtcggaacccgaacggaagcgggctcgcaccgacgaggtgcctgccggaggaagccgctccgaggcggaagatgaggacgacgaggactacgtgccctatgtgccgttacggcagcgccggcagctactgctccagaagctgctgcagcgaagacgcaagggagctgcggaggaagagcagcaggacagcggtagtgaaccccggggagatgaggacgacatcccgctaggccctcagtccaacgtcagcctcctggatcagcaccagcaccttaaagagaaggctgaagcgcgcaaagagtctgccaaggagaagcagctgaaggaagaagagaagatcctggagagtgttgccgagggccgagcattgatgtcagtgaaggagatggctaagggcattacgtatgatgaccccatcaaaaccagctggactccaccccgttatgttctgagcatgtctgaagagcgacatgagcgcgtgcggaagaaataccacatcctggtggagggagacggtatcccaccacccatcaagagcttcaaggaaatgaagtttcctgcagccatcctgagaggcctgaagaagaaaggcattcaccacccaacacccattcagatccagggcatccccaccattctatctggccgtgacatgataggcatcgctttcacgggttcaggcaagacactggtgttcacgttgcccgtcatcatgttctgcctggaacaagagaagaggttacccttctcaaagcgcgaggggccctatggactcatcatctgcccctcgcgggagctggcccggcagacccatggcatcctggagtactactgccgcctgctgcaggaggacagctcaccactcctgcgctgcgccctctgcattgggggcatgtccgtgaaagagcagatggagaccatccgacacggtgtacacatgatggtggccaccccggggcgcctcatggatttgctgcagaagaagatggtcagcctagacatctgtcgctacctggccctggacgaggctgaccgcatgatcgacatgggcttcgagggtgacatccgtaccatcttctcctacttcaagggccagcgacagaccctgctcttcagtgccaccatgccgaagaagattcagaactttgctaagagtgcccttgtaaagcctgtgaccatcaatgtggggcgcgctggggataacatcatgttatcgcccaacactagatatgaatccattaacactgacatacaattgaccagctgttatagagccattcttgtatccctgaaaggctgaaatgggggaaaagagagaaacagactggctagaatacacagctcctctagtggcattcctgttaaaacaacctcataggtcagagatgccactgatcagtcctagatttcagtaatatataatgacagtgtatcact

SEQ ID NO: 447882 - DNA, 1441 bp, Homo sapiens
  misc_feature (29)..(29): n is a, c, g, or t
  misc_feature (31)..(32): n is a, c, g, or t
ggtcgactactactaaattcgcggccgcntnnacgaatggaggagtcggaacccgaacggaagcgggctcgcaccgacgaggtgcctgccggaggaagccgctccgaggcggaagatgaggacgacgaggactacgtgccctatgtgccgttacggcagcgccggcagctactgctccagaagctgctgcagcgaagacgcaagggagctgcggaggaagagcagcaggacagcggtagtgaaccccggggagatgaggacgacatcccgctaggccctcagtccaacgtcagcctcctggatcagcaccagcaccttaaagagaaggctgaagcgcgcaaagagtctgccaaggagaagcagctgaaggaagaagagaagatccctggacgaggctgaccgcatgatcgacatgggcttcgagggtgacatccgtaccatcttctcctacttcaagggccagcgacagaccctgctcttcagtgccaccatgccgaagaagattcagaactttgctaagagtgcccttgtaaagcctgtgaccatcaatgtggggcgcgctggggctgccagcctggatgtcatccaggaggtagaatatgtgaaggaggaggccaagatggtgtacctgctcgagtgcctgcagaagacacccccgcctgtactcatctttgcagagaagaaggcagacgtggacgccatccacgagtacctgctgctcaagggggttgaggccgtagccatccatgggggcaaagaccaggaggaacggactaaggccatcgaggcattccgggagggcaagaaggatgtcctagtagccacagacgttgcctccaagggcctggacttccctgccatccagcacgtcatcaattatgacatgccagaggagattgagaactatgtacaccggattggccgcaccgggcgctcgggaaacacaggcatcgccactaccttcatcaacaaagcgtgtgatgagtcagtgctgatggacctcaaagcgctgctgctagaagccaagcagaaggtgccgcccgtgctgcaggtgctgcattgcggggatgagtccatgctggacattggaggagagcgcggctgtgccttctgcgggggcctgggtcatcggatcactgactgccccaaactcgaggctatgcagaccaagcaggtcagcaacatcggtcgcaaggactacctggcccacagctccatggacttctgagccgacagtcttcccttctctccaagaggcctcagtccccaagactgccaccagtctacacatacagcagccccctggacagaatcagcatttcagctcagctggcctggaatgggccaggctggtcctggctgcctgttccctgtgctcttcagaattactgtttttgtttccttttaccccagctgccattaaagcccaaacctctagcca

SEQ ID NO: 447883 - DNA, 947 bp, Homo sapiens
caaggatgaggcggggtttcgccgtggcgcgcatgcgtgcagcaaagaatggaggagtcggaacccgaacggaagcgggctcgcaccgacgaggtgcctgccggaggaagccgctccgaggcggaagatgaggacgacgaggactacgtgccctatgtgccgttacggcagcgccggcagctactgctccagaagctgctgcagcgaagacgcaagggaggctgctcaagggggttgaggccgtagccatccatgggggcaaagaccaggaggaacggactaaggccatcgaggcattccgggagggcaagaaggatgtcctagtagccacagacgttgcctccaagggcctggacttccctgccatccagcacgtcatcaattatgacatgccagaggagattgagaactatgtacaccggattggccgcaccgggcgctcgggaaacacaggcatcgccactaccttcatcaacaaagcgtgtgatgagtcagtgctgatggacctcaaagcgctgctgctagaagccaagcagaaggtgccgcccgtgctgcaggtgctgcattgcggggatgagtccatgctggacattggaggagagcgcggctgtgccttctgcgggggcctgggtcatcggatcactgactgccccaaactcgaggctatgcagaccaagcaggtcagcaacatcggtcgcaaggactacctggcccacagctccatggacttctgagccgacagtcttcccttctctccaagaggcctcagtccccaagactgccaccagtctacacatacagcagccccctggacagaatcagcatttcagctcagctggcctggaatgggccaggctggtcctggctgcctgttccctgtgctcttcagaattactgtttttgtttccttttaccccagctgccattaaagcccaaacctctagcca

SEQ ID NO: 447884 - DNA, 331 bp, Homo sapiens
  misc_feature (21)..(21): n is a, c, g, or t
gcgtcgacggcagtcagtganccgatgacccaggcccaaactcgaggctatgcagaccaagcaggtcagcaacatcggtcgcaaggactacctggcccacagctccatggacttctgagccgacagtcttcccttctctccaagaggcctcagtccccaagactgccaccagtctacacatacagcagccccctggacagaatcagcatttcagctcagctggcctggaatgggccaggctggtcctggctgcctgttccctgtgctcttcagaattactgtttttgtttccttttaccccagctgccattaaagcccaaacctctagcca

SEQ ID NO: 447885 - DNA, 255 bp, Homo sapiens
agtctgccaaggagaagcagctgaaggaagaagagaagatcctggagagtgttgccgagggccgaggtatggttgtagccaggatagtgagaaggtggactgagtcttctcctcccagccccaggcatgttatatctcaagggatctggcttctcagaagcaggagccagccctgagccatgtctctctcttcagcattgatgtcagtgaaggagatggctaagggcattacgtatgatgaccccatcaaaacca

SEQ ID NO: 447886 - DNA, 370 bp, Homo sapiens
ctctctctctctctctgagcctcagtttcatcatctgcaacttgtaggggtagtgccagttttacaggctttggggctctgagaaagtacctgtgagtcatgaagacgatgtcggttggttttcatagccatcctgagaggcctgaagaagaaaggcattcaccacccaacacccattcagatccagggcatccccaccatgtgagtgtggactgtggacctggggtccttgaggagggctggaacagggaggagcaatggctaggtgtccttcatcttctgttgaaattggccctcgggtcatcctctcccaacagtctatctggccgtgacatgataggcatcgctttcacgggttcaggcaagacac

SEQ ID NO: 447887 - DNA, 694 bp, Homo sapiens
ctgcagatgtgactgtggagggctgcaccggagcactgcacatcctcgcccgggaccccatgaaccgcatggagatcttccggctcaacaccattcccctgtttgtgcagctcctgtactcgtcggtggagaacatccagcgcgtggctgccggggtgctgtgtgagctggcccaggacaaggaggcggccgacgccattgatgcagagggggcctcggccccactcatggagttgctgcactcccgcaacgagggcactgccacctacgctgctgccgtcctgttccgcatctccgaggacaagaacccagactaccggaagcgcgtgtccgtggagctcaccaactccctcttcaagcatgacccggctgcctgggtcatcggatcactgactgccccaaactcgaggctatgcagaccaagcaggtcagcaacatcggtcgcaaggactacctggcccacagctccatggacttctgagccgacagtcttcccttctctccaagaggcctcagtccccaagactgccaccagtctacacatacagcagccccctggacagaatcagcatttcagctcagctggcctggaatgggccaggctggtcctggctgcctgttccctgtgctcttcagaattactgtttttgtttccttttaccccagctgccattaaagcccaaacctctagcca

SEQ ID NO: 447888 - DNA, 2118 bp, Homo sapiens
  misc_feature (29)..(29): n is a, c, g, or t
  misc_feature (31)..(32): n is a, c, g, or t
ggtcgactactactaaattcgcggccgcntnnacgaatggaggagtcggaacccgaacggaagcgggctcgcaccgacgaggtgcctgccggaggaagccgctccgaggcggaagatgaggacgacgaggactacgtgccctatgtgccgttacggcagcgccggcagctactgctccagaagctgctgcagcgaagacgcaagggagctgcggaggaagagcagcaggacagcggtagtgaaccccggggagatgaggacgacatcccgctaggccctcagtccaacgtcagcctcctggatcagcaccagcaccttaaagagaaggctgaagcgcgcaaagagtctgccaaggagaagcagctgaaggaagaagagaagatcctggagagtgttgccgagggccgagcattgatgtcagtgaaggagatggctaagggcattacgtatgatgaccccatcaaaaccagctggactccaccccgttatgttctgagcatgtctgaagagcgacatgagcgcgtgcggaagaaataccacatcctggtggagggagacggtatcccaccacccatcaagagcttcaaggaaatgaagtttcctgcagccatcctgagaggcctgaagaagaaaggcattcaccacccaacacccattcagatccagggcatccccaccattctatctggccgtgacatgataggcatcgctttcacgggttcaggcaagacactggtgttcacgttgcccgtcatcatgttctgcctggaacaagagaagaggttacccttctcaaagcgcgaggggccctatggactcatcatctgcccctcgcgggagctggcccggcagacccatggcatcctggagtactactgccgcctgctgcaggaggacagctcaccactcctgcgctgcgccctctgcattgggggcatgtccgtgaaagagcagatggagaccatccgacacggtgtacacatgatggtggccaccccggggcgcctcatggatttgctgcagaagaagatggtcagcctagacatctgtcgctacctggccctggacgaggctgaccgcatgatcgacatgggcttcgagggtgacatccgtaccatcttctcctacttcaagggccagcgacagaccctgctcttcagtgccaccatgccgaagaagattcagaactttgctaagagtgcccttgtaaagcctgtgaccatcaatgtggggcgcgctggggctgccagcctggatgtcatccaggaggtagaatatgtgaaggaggaggccaagatggtgtacctgctcgagtgcctgcagaagacacccccgcctgtactcatctttgcagagaagaaggcagacgtggacgccatccacgagtacctgctgctcaagggggttgaggccgtagccatccatgggggcaaagaccaggaggaacggactaaggccatcgaggcattccgggagggcaagaaggatgtcctagtagccacagacgttgcctccaagggcctggacttccctgccatccagcacgtcatcaattatgacatgccagaggagattgagaactatgtacaccggattggccgcaccgggcgctcgggaaacacaggcatcgccactaccttcatcaacaaagcgtgtgatgagtcagtgctgatggacctcaaagcgctgctgctagaagccaagcagaaggtgccgcccgtgctgcaggtgctgcattgcggggatgagtccatgctggacattggaggagagcgcggctgtgccttctgcgggggcctgggtcatcggatcactgactgccccaaactcgaggctatgcagaccaagcaggtcagcaacatcggtcgcaaggactacctggcccacagctccatggacttctgagccgacagtcttcccttctctccaagaggcctcagtccccaagactgccaccagtctacacatacagcagccccctggacagaatcagcatttcagctcagctggcctggaatgggccaggctggtcctggctgcctgttccctgtgctcttcagaattactgtttttgtttccttttaccccagctgccattaaagcccaaacctctagcca

SEQ ID NO: 447889 - DNA, 2234 bp, Homo sapiens
  misc_feature (29)..(29): n is a, c, g, or t
  misc_feature (31)..(32): n is a, c, g, or t
ggtcgactactactaaattcgcggccgcntnnacgaatggaggagtcggaacccgaacggaagcgggctcgcaccgacgaggtgcctgccggaggaagccgctccgaggcggaagatgaggacgacgaggactacgtgccctatgtgccgttacggcagcgccggcagctactgctccagaagctgctgcagcgaagacgcaagggagctgcggaggaagagcagcaggacagcggtagtgaaccccggggagatgaggacgacatcccgctaggccctcagtccaacgtcagcctcctggatcagcaccagcaccttaaagagaaggctgaagcgcgcaaagagtctgccaaggagaagcagctgaaggaagaagagaagatcctggagagtgttgccgagggccgagcattgatgtcagtgaaggagatggctaagggcattacgtatgatgaccccatcaaaaccagctggactccaccccgttatgttctgagcatgtctgaagagcgacatgagcgcgtgcggaagaaataccacatcctggtggagggagacggtatcccaccacccatcaagagcttcaaggaaatgaagtttcctgcagccatcctgagaggcctgaagaagaaaggcattcaccacccaacacccattcagatccagggcatccccaccattctatctggccgtgacatgataggcatcgctttcacgggttcaggcaagacactggtgttcacgttgcccgtcatcatgttctgcctggaacaagagaagaggttacccttctcaaagcgcgaggggccctatggactcatcatctgcccctcgcgggagctggcccggcagacccatggcatcctggagtactactgccgcctgctgcaggaggacagctcaccactcctgcgctgcgccctctgcattgggggcatgtccgtgaaagagcagatggagaccatccgacatgctgtgcagtcctctgcagaccaccagaggccctggaccaggccctctgttcacagatgggccagaccccatcccggaggccttcctccacggacttctgagtattagggagatgcggtgtacacatgatggtggccaccccggggcgcctcatggatttgctgcagaagaagatggtcagcctagacatctgtcgctacctggccctggacgaggctgaccgcatgatcgacatgggcttcgagggtgacatccgtaccatcttctcctacttcaagggccagcgacagaccctgctcttcagtgccaccatgccgaagaagattcagaactttgctaagagtgcccttgtaaagcctgtgaccatcaatgtggggcgcgctggggctgccagcctggatgtcatccaggaggtagaatatgtgaaggaggaggccaagatggtgtacctgctcgagtgcctgcagaagacacccccgcctgtactcatctttgcagagaagaaggcagacgtggacgccatccacgagtacctgctgctcaagggggttgaggccgtagccatccatgggggcaaagaccaggaggaacggactaaggccatcgaggcattccgggagggcaagaaggatgtcctagtagccacagacgttgcctccaagggcctggacttccctgccatccagcacgtcatcaattatgacatgccagaggagattgagaactatgtacaccggattggccgcaccgggcgctcgggaaacacaggcatcgccactaccttcatcaacaaagcgtgtgatgagtcagtgctgatggacctcaaagcgctgctgctagaagccaagcagaaggtgccgcccgtgctgcaggtgctgcattgcggggatgagtccatgctggacattggaggagagcgcggctgtgccttctgcgggggcctgggtcatcggatcactgactgccccaaactcgaggctatgcagaccaagcaggtcagcaacatcggtcgcaaggactacctggcccacagctccatggacttctgagccgacagtcttcccttctctccaagaggcctcagtccccaagactgccaccagtctacacatacagcagccccctggacagaatcagcatttcagctcagctggcctggaatgggccaggctggtcctggctgcctgttccctgtgctcttcagaattactgtttttgtttccttttaccccagctgccattaaagcccaaacctctagcca

SEQ ID NO: 447890 - DNA, 2534 bp, Homo sapiens
  misc_feature (29)..(29): n is a, c, g, or t
  misc_feature (31)..(32): n is a, c, g, or t
ggtcgactactactaaattcgcggccgcntnnacgaatggaggagtcggaacccgaacggaagcgggctcgcaccgacgaggtgcctgccggaggaagccgctccgaggcggaagatgaggacgacgaggactacgtgccctatgtgccgttacggcagcgccggcagctactgctccagaagctgctgcagcgaagacgcaagggagctgcggaggaagagcagcaggacagcggtagtgaaccccggggagatgaggacgacatcccgctaggccctcagtccaacgtcagcctcctggatcagcaccagcaccttaaagagaaggctgaagcgcgcaaagagtctgccaaggagaagcagctgaaggaagaagagaagatcctggagagtgttgccgagggccgagcattgatgtcagtgaaggagatggctaagggcattacgtatgatgaccccatcaaaaccagctggactccaccccgttatgttctgagcatgtctgaagagcgacatgagcgcgtgcggaagaaataccacatcctggtggagggagacggtatcccaccacccatcaagagcttcaaggaaatgaagtttcctgcagccatcctgagaggcctgaagaagaaaggcattcaccacccaacacccattcagatccagggcatccccaccattctatctggccgtgacatgataggcatcgctttcacgggttcaggcaagacactggtgttcacgttgcccgtcatcatgttctgcctggaacaagagaagaggttacccttctcaaagcgcgaggggccctatggactcatcatctgcccctcgcgggagctggcccggcagacccatggcatcctggagtactactgccgcctgctgcaggaggacagctcaccactcctgcgctgcgccctctgcattgggggcatgtccgtgaaagagcagatggagaccatccgacacggtgtacacatgatggtggccaccccggggcgcctcatggatttgctgcagaagaagatggtcagcctagacatctgtcgctacctggccctggacgaggctgaccgcatgatcgacatgggcttcgagggtgacatccgtaccatcttctcctacttcaagggccagcgacagaccctgctcttcagtgccaccatgccgaagaagattcagaactttgctaagagtgcccttgtaaagcctgtgaccatcaatgtggggcgcgctggggctgccagcctggatgtcatccaggaggtagaatatgtgaaggaggaggccaagatggtgtacctgctcgagtgcctgcagaagacacccccgcctgtactcatctttgcagagaagaaggcagacgtggacgccatccacgagtacctgctgctcaagggggttgaggccgtagccatccatgggggcaaagaccaggaggaacggactaaggccatcgaggcattccgggagggcaagaaggatgtcctagtagccacagacgttgcctccaagggcctggacttccctgccatccagcacgtcatcaattatgacatgccagaggagattgagaactatgtacaccggattggccgcaccgggcgctcgggaaacacaggcatcgccactaccttcatcaacaaagcgtgtgatgagtcagtgctgatggacctcaaagcgctgctgctagaagccaagcagaaggtgccgcccgtgctgcaggtgctgcattgcggggatgagtccatgctggacattggaggagagcgcggctgtgccttctgcgggggcctgggtcatcggatcactgactgccccaaactcgaggctatgcagaccaagcaggtcagcaacatcggtcgcaaggactacctggcccacagctccatggacttctgagccgacagtcttcccttctctccaagaggcctcagtccccaagactgccaccagtctacacatacagcagccccctggacagaatcagcatttcagctcagctggcctggaatgggccaggctggtcctggctgcctgttccctgtgctcttcagaattactgtttttgtttccttttaccccagctgccattaaagcccaaacctctagccaaaaaaaaaaagaaaaaaaaagaaaaaaaaaaaaaaaaaaaaaagggggggggggggcaaagaggatccccggggggggccaaagtatgggggtaccagggtctctggtgggcaacaagggggccccataagggggacacgattctacacacgaagcacgggcgccgagataacaaaggctagaaggggaacaatggaaaggggaacactggggggagagaaccccaaaaaataggacggcgggggacacacaagcggggcgcacacaccacccagccggagaatataaagcgcgccaggagggacaataatgaacactgaggcgcgccagcaggggggctacacacacgacgacaagatactcgcgctgcggaagaaaatgcgccaggcgaaaatcaatgcgcaccacatatcgga

SEQ ID NO: 447891 - DNA, 1696 bp, Homo sapiens
ctgcacctagcctgtgggccttggacaagtctctttttttctttttttttttccactctctctctctctctctgagcctcagtttcatcatctgcaacttgtaggggtagtgccagttttacaggctttggggctctgagaaagtacctgtgagtcatgaagacgatgtcggttggttttcatagccatcctgagaggcctgaagaagaaaggcattcaccacccaacacccattcagatccagggcatccccaccattctatctggccgtgacatgataggcatcgctttcacgggttcaggcaagacactggtgttcacgttgcccgtcatcatgttctgcctggaacaagagaagaggttacccttctcaaagcgcgaggggccctatggactcatcatctgcccctcgcgggagctggcccggcagacccatggcatcctggagtactactgccgcctgctgcaggaggacagctcaccactcctgcgctgcgccctctgcattgggggcatgtccgtgaaagagcagatggagaccatccgacacggtgtacacatgatggtggccaccccggggcgcctcatggatttgctgcagaagaagatggtcagcctagacatctgtcgctacctggccctggacgaggctgaccgcatgatcgacatgggcttcgagggtgacatccgtaccatcttctcctacttcaagggccagcgacagaccctgctcttcagtgccaccatgccgaagaagattcagaactttgctaagagtgcccttgtaaagcctgtgaccatcaatgtggggcgcgctggggctgccagcctggatgtcatccaggaggtagaatatgtgaaggaggaggccaagatggtgtacctgctcgagtgcctgcagaagacacccccgcctgtactcatctttgcagagaagaaggcagacgtggacgccatccacgagtacctgctgctcaagggggttgaggccgtagccatccatgggggcaaagaccaggaggaacggactaaggccatcgaggcattccgggagggcaagaaggatgtcctagtagccacagacgttgcctccaagggcctggacttccctgccatccagcacgtcatcaattatgacatgccagaggagattgagaactatgtacaccggattggccgcaccgggcgctcgggaaacacaggcatcgccactaccttcatcaacaaagcgtgtgatgagtcagtgctgatggacctcaaagcgctgctgctagaagccaagcagaaggtgccgcccgtgctgcaggtgctgcattgcggggatgagtccatgctggacattggaggagagcgcggctgtgccttctgcgggggcctgggtcatcggatcactgactgccccaaactcgaggctatgcagaccaagcaggtcagcaacatcggtcgcaaggactacctggcccacagctccatggacttctgagccgacagtcttcccttctctccaagaggcctcagtccccaagactgccaccagtctacacatacagcagccccctggacagaatcagcatttcagctcagctggcctggaatgggccaggctggtcctggctgcctgttccctgtgctcttcagaattactgtttttgtttccttttaccccagctgccattaaagcccaaacctctagcca

SEQ ID NO: 447892 - DNA, 1652 bp, Homo sapiens
ctgcacctagcctgtgggccttggacaagtctctttttttctttttttttttccactctctctctctctctctgagcctcagtttcatcatctgcaacttgtaggggtagtgccagttttacaggctttggggctctgagaaagtacctgtgagtcatgaagacgatgtcggttggttttcatagccatcctgagaggcctgaagaagaaaggcattcaccacccaacacccattcagatccagggcatccccaccatgcaagacactggtgttcacgttgcccgtcatcatgttctgcctggaacaagagaagaggttacccttctcaaagcgcgaggggccctatggactcatcatctgcccctcgcgggagctggcccggcagacccatggcatcctggagtactactgccgcctgctgcaggaggacagctcaccactcctgcgctgcgccctctgcattgggggcatgtccgtgaaagagcagatggagaccatccgacacggtgtacacatgatggtggccaccccggggcgcctcatggatttgctgcagaagaagatggtcagcctagacatctgtcgctacctggccctggacgaggctgaccgcatgatcgacatgggcttcgagggtgacatccgtaccatcttctcctacttcaagggccagcgacagaccctgctcttcagtgccaccatgccgaagaagattcagaactttgctaagagtgcccttgtaaagcctgtgaccatcaatgtggggcgcgctggggctgccagcctggatgtcatccaggaggtagaatatgtgaaggaggaggccaagatggtgtacctgctcgagtgcctgcagaagacacccccgcctgtactcatctttgcagagaagaaggcagacgtggacgccatccacgagtacctgctgctcaagggggttgaggccgtagccatccatgggggcaaagaccaggaggaacggactaaggccatcgaggcattccgggagggcaagaaggatgtcctagtagccacagacgttgcctccaagggcctggacttccctgccatccagcacgtcatcaattatgacatgccagaggagattgagaactatgtacaccggattggccgcaccgggcgctcgggaaacacaggcatcgccactaccttcatcaacaaagcgtgtgatgagtcagtgctgatggacctcaaagcgctgctgctagaagccaagcagaaggtgccgcccgtgctgcaggtgctgcattgcggggatgagtccatgctggacattggaggagagcgcggctgtgccttctgcgggggcctgggtcatcggatcactgactgccccaaactcgaggctatgcagaccaagcaggtcagcaacatcggtcgcaaggactacctggcccacagctccatggacttctgagccgacagtcttcccttctctccaagaggcctcagtccccaagactgccaccagtctacacatacagcagccccctggacagaatcagcatttcagctcagctggcctggaatgggccaggctggtcctggctgcctgttccctgtgctcttcagaattactgtttttgtttccttttaccccagctgccattaaagcccaaacctctagcca

SEQ ID NO: 447893 - DNA, 775 bp, Homo sapiens
  misc_feature (29)..(29): n is a, c, g, or t
  misc_feature (31)..(32): n is a, c, g, or t
ggtcgactactactaaattcgcggccgcntnnacgaatggaggagtcggaacccgaacggaagcgggctcgcaccgacgaggtgcctgccggaggaagccgctccgaggcggaagatgaggacgacgaggactacgtgccctatgtgccgttacggcagcgccggcagctactgctccagaagctgctgcagcgaagacgcaagggagctgcggaggaagagcagcaggacagcggtagtgaaccccggggagatgaggacgacatcccgctaggccctcagtccaacgtcagcctcctggatcagcaccagcaccttaaagagaaggctgaagcgcgcaaagagtctgccaaggagaagcagctgaaggaagaagagaagatcctggagagtgttgccgagggccgagcattgatgtcagtgaaggagatggctaagggcattacgtatgatgaccccatcaaaaccaggtatgtctgtacagtctgcagttgcccttgcttaggatggtacatgcagggatgctcccaggccagctattcccagggctctcttgatccctgttacccatccacagctggactccaccccgttatgttctgagcatgtctgaagagcgacatgagcgcgtgcggaagaaataccacatcctggtggagggagacggtatcccaccacccatcaagagcttcaaggaaatgaagtttcctgcaggtagtcaggggctggagagagataccaaattttataatcaaatgcctgtgaggttatgtcc

SEQ ID NO: 447894 - DNA, 3834 bp, Homo sapiens
gcgcagcgccggcttcttcccagcgcgagttgctgctaacgctcctcctccagcttcccacccccgccgcccgccgcggcccggtaccaacgggtggtctcgccgagggagctgtcgtgcctcgtggtcccgggactgcagtggtgtgcgctctcggcgcgtggcgctaggcatggcgatggatcaagtaaacgcgctgtgcgagcagctggtgaaagcggtgacggtcatgatggaccccaactccacccagcgctaccggctggaagccctcaagttttgtgaggagtttaaagaaaagtgtcctatctgtgtcccctgtggcttgaggttggctgagaaaacacaagttgccatcgtcagacattttggccttcagatcctggaacacgttgtcaagtttcggtggaacggcatgtctcgattggagaaggtgtatctgaagaacagtgtcatggagctgattgcaaatggaacattgaacattttggaagaggagaaccatattaaagatgctctgtctcgaattgtagtggaaatgatcaagcgagagtggccacagcattggcctgacatgctaatagaattggacactctttccaaacaaggggaaacacagacagaattggtgatgtttatccttttgcgactggcagaggatgtagtgacttttcagacacttccccctcaaagaagaagggacatccagcaaacattaacccagaacatggaaaggatcttcagttttctgcttaacacacttcaagaaaatgtaaacaagtatcagcaagtgaagacagatacttctcaggagtcaaaggcgcaagcaaactgtcgagtaggagttgcagcactgaatactctagcaggctatattgactgggtgtctatgagtcacatcactgctgaaaactgtaaactcctggagatactgtgtttgctgttgaatgaacaggaacttcagttgggagccgctgagtgtcttctcattgcagtcagcagaaaaggcaagttggaagaccggaagcccttgatggtcttatttggagatgttgccatgcattatatactctccgccgcacagactgctgatggaggaggtttggtagaaaaacactacgtctttctgaagaggctctgtcaggtgttgtgtgcgctgggcaatcagctgtgtgcattgctgggtgcagattctgatgtagaaacaccatcaaactttggaaaatacctggaatcttttcttgctttcacaacccatccaagtcagtttctacgctcttcaactcagatgacttggggagccctcttcaggcatgaaatcctgtcccgtgatcctttgctattagcaataataccaaaatatcttcgtgcttccatgactaacttggtcaagatgggctttccttctaaaacagacagccctagctgtgaatattctcggtttgattttgatagcgatgaggacttcaatgctttcttcaactcctcccgagcacaacaaggagaggtgatgaggttggcatgtcgtttggatcccaaaactagcttccagatggctggggagtggctaaagtatcaactatcaacttttcttgatgctggttctgtgaattcttgttctgcagttggaactggagaaggaagcctctgttccgtcttctcaccttcattcgtgcagtgggaagccatgactctttttttggaaagtgttatcacccagatgtttcgaacactaaatagagaagaaattcctgttaatgatggaatagagctattgcagatggttctgaactttgataccaaggatcccctcatcctgtcctgcgtccttactaatgtctctgcactctttccatttgtcacctacagaccagagttcctgccccaggtcttctctaagctattttcatctgtcacttttgaaactgttgaagaaagtaaggcccccagaacccgggcagtgaggaatgtgaggaggcatgcttgttcctccatcatcaagatgtgtcgtgactacccccagcttgtgctgcccaattttgacatgctttataaccatgtgaagcaactcctctccaatgagctactcctgacacaaatggagaagtgtgccctcatggaagccctggttctcattagcaaccaatttaagaactacgagcgtcagaaggtgttcctagaggagctgatggcaccagtggccagcatctggctttctcaagacatgcacagagtgctgtcagatgttgatgctttcattgcgtatgtgggtacagatcagaagagctgtgacccaggcctggaggatccgtgtggcttaaaccgtgcacgaatgagcttttgtgtatacagcattctgggtgtggtgaaacgaacttgctggcccactgacctagaagaggccaaagctgggggatttgtggtgggttatacatccagtggaaatccaatcttccgtaacccctgcacagagcagattctgaaacttcttgacaatttgcttgcgcttataagaacccacaatacattatatgcaccagaaatgctagccaaaatggcagagcctttcaccaaggctctggatatgcttgacgcggaaaaatctgctatattaggattacctcaacctctcttggaactcaatgactctcctgtcttcaaaaccgtcttggaaagaatgcagcgtttcttctctaccctctatgaaaactgttttcatatcctagggaaggcaggcccttccatgcagcaagacttctatactgtggaggaccttgctacccagcttctcagctcagcctttgtcaacttgaacaatattcctgactaccgactcagacccatgcttcgggtctttgtaaagcctctggtgctcttctgtcccccagagcactatgaagccctggtatcccccatcctcggacctcttttcacctacctccatatgaggctttctcagaaatggcaagttatcaaccaaaggagcctgctgtgtggagaagatgaggctgcagatgaaaacccagagtctcaagagatgctggaggagcaactggtgaggatgttaacccgagaagtcatggacctaatcacggtttgctgtgtttcaaagaagggtgctgaccacagtagtgctcccccagcagatggagacgatgaagaaatgatggccacagaggtcaccccctcagctatggcagagcttacagacctgggcaaatgtctgatgaagcatgaggatgtttgtacagcgctattaattacagccttcaattccctggcctggaaagatactctgtcctgccagaggacaacctcacagctctgctggcctctcctcaaacaagtgctgtcagggacactgctcgcagatgcagttacgtggcttttcaccagtgtgctgaaaggcttacagatgcacgggcagcacgacgggtgcatggcttccctggtccatctggccttccagatatacgaggcactgcgccccaggtacctggagataagagctgtaatggagcaaatccctgaaatacagaaggactcactggaccagtttgactgcaagcttttaaacccctccctgcagaaagtggctgacaagcgccgaaaggaccaattcaaacgcctcattgctggttgcattgggaaacccttgggagagcagttccgaaaagaagttcacattaagaatcttccctcacttttcaaaaaaacaaagccaatgctggagacggaggtgctggacaatgatgggggtggcctggccaccatctttgaaccctgaatcaagcttttgggcatccttcctcggcctttcttgtcatctcttct

SEQ ID NO: 447895 - DNA, 785 bp, Homo sapiens
gtagagactgggtctcactgtattgcccaaactggttttgaactcttgggcacaagcagtctgcccaccttggcctcctaaagtgctaggatttcaggcgtgagctactgtgcccaatcctgatttccttttaattcaaacagaaatgggagactaagtttagtttgccacttacaggatctagctggtaatacagtttccagagatcatttattttcaaaaacttctggattcgttaataaagttttattgagtgattattacatgcaaagcacaagtctgcaaaacagttcctttgaatgcttttcccctagggtggtaaattaataaacattaagtacttattttataccagttattgattcctgtccttcccttggcattttctcttggcagcctcccgagcacaacaaggagaggtgatgaggttggcatgtcgtttggatcccaaaactagcttccagatggctggggagtggctaaagtatcaactatcaacttttcttgatgctggttctgtgaattgtaagtttttttcattactgaatgttagtgaaatgttaggacagtatcaaaactatatataggaaatgagcctgagctatacacacatcagaacgatatacttatactattcaaaaatagctttgctcatcctggagagggagcgttttcattggctgacacaaagaaagcagatgacacattttaaatttgttttaaattagggtaaaaccatgtccttatcagttttgccatcattttccatttctaacagaatcaac

SEQ ID NO: 447896 - DNA, 5029 bp, Homo sapiens
caagagtagtgtcctcttcagtctacccgctggcttgagtttgtgctgacagaacgtatttgccatcgtcgtaacttgggagaaccctgacgctggaacacgttgtcacgtttcggtggaacggcatgtctcgattggagaaggtgtatctgaagaacagtgtcatggagctgattgcaaatggaacattgaacattttggaagaggagaaccatattaaagatgctctgtctcgaattgtagtggaaatgatcaagcgagagtggccacagcattggcctgacatgctaatagaattggacactctttccaaacaaggggaaacacagacagaattggtgatgtttatccttttgcgactggcagaggatgtagtgacttttcagacacttccccctcaaagaagaagggacatccagcaaacattaacccagaacatggaaaggatcttcagttttctgcttaacacacttcaagaaaatgtaaacaagtatcagcaagtgaagacagatacttctcaggagtcaaaggcgcaagcaaactgtcgagtaggagttgcagcactgaatactctagcaggctatattgactgggtgtctatgagtcacatcactgctgaaaactgtaaactcctggagatactgtgtttgctgttgaatgaacaggaacttcagttgggagccgctgagtgtcttctcattgcagtcagcagaaaaggcaagttggaagaccggaagcccttgatggtcttatttggagatgttgccatgcattatatactctccgccgcacagactgctgatggaggaggtttggtagaaaaacactacgtctttctgaagaggctctgtcaggtgttgtgtgcgctgggcaatcagctgtgtgcattgctgggtgcagattctgatgtagaaacaccatcaaactttggaaaatacctggaatcttttcttgctttcacaacccatccaagtcagtttctacgctcttcaactcagatgacttggggagccctcttcaggcatgaaatcctgtcccgtgatcctttgctattagcaataataccaaaatatcttcgtgcttccatgactaacttggtcaagatgggctttccttctaaaacagacagccctagctgtgaatattctcggtttgattttgatagcgatgaggacttcaatgctttcttcaactcctcccgagcacaacaaggagaggtgatgaggttggcatgtcgtttggatcccaaaactagcttccagatggctggggagtggctaaagtatcaactatcaacttttcttgatgctggttctgtgaattcttgttctgcagttggaactggagaaggaagcctctgttccgtcttctcaccttcattcgtgcagtgggaagccatgactctttttttggaaagtgttatcacccagatgtttcgaacactaaatagagaagaaattcctgttaatgatggaatagagctattgcagatggttctgaactttgataccaaggatcccctcatcctgtcctgcgtccttactaatgtctctgcactctttccatttgtcacctacagaccagagttcctgccccaggtcttctctaagctattttcatctgtcacttttgaaactgttgaagaaagtaaggcccccagaacccgggcagtgaggaatgtgaggaggcatgcttgttcctccatcatcaagatgtgtcgtgactacccccagcttgtgctgcccaattttgacatgctttataaccatgtgaagcaactcctctccaatgagctactcctgacacaaatggagaagtgtgccctcatggaagccctggttctcattagcaaccaatttaagaactacgagcgtcagaaggtgttcctagaggagctgatggcaccagtggccagcatctggctttctcaagacatgcacagagtgctgtcagatgttgatgctttcattgcgtatgtgggtacagatcagaagagctgtgacccaggcctggaggatccgtgtggcttaaaccgtgcacgaatgagcttttgtgtatacagcattctgggtgtggtgaaacgaacttgctggcccactgacctagaagaggccaaagctgggggatttgtggtgggttatacatccagtggaaatccaatcttccgtaacccctgcacagagcagattctgaaacttcttgacaatttgcttgcgcttataagaacccacaatacattatatgcaccagaaatgctagccaaaatggcagagcctttcaccaaggctctggatatgcttgacgcggaaaaatctgctatattaggattacctcaacctctcttggaactcaatgactctcctgtcttcaaaaccgtcttggaaagaatgcagcgtttcttctctaccctctatgaaaactgttttcatatcctagggaaggcaggcccttccatgcagcaagacttctatactgtggaggaccttgctacccagcttctcagctcagcctttgtcaacttgaacaatattcctgactaccgactcagacccatgcttcgggtctttgtaaagcctctggtgctcttctgtcccccagagcactatgaagccctggtatcccccatcctcggacctcttttcacctacctccatatgaggctttctcagaaatggcaagttatcaaccaaaggagcctgctgtgtggagaagatgaggctgcagatgaaaacccagagtctcaagagatgctggaggagcaactggtgaggatgttaacccgagaagtcatggacctaatcacggtttgctgtgtttcaaagaagggtgctgaccacagtagtgctcccccagcagatggagacgatgaagaaatgatggccacagaggtcaccccctcagctatggcagagcttacagacctgggcaaatgtctgatgaagcatgaggatgtttgtacagcgctattaattacagccttcaattccctggcctggaaagatactctgtcctgccagaggacaacctcacagctctgctggcctctcctcaaacaagtgctgtcagggacactgctcgcagatgcagttacgtggcttttcaccagtgtgctgaaaggcttacagatgcacgggcagcacgacgggtgcatggcttccctggtccatctggccttccagatatacgaggcactgcgccccaggtacctggagataagagctgtaatggagcaaatccctgaaatacagaaggactcactggaccagtttgactgcaagcttttaaacccctccctgcagaaagtggctgacaagcgccgaaaggaccaattcaaacgcctcattgctggttgcattgggaaacccttgggagagcagttccgaaaagaagttcacattaagaatcttccctcacttttcaaaaaaacaaagccaatgctggagacggaggtgctggacaatgatgggggtggcctggccaccatctttgaaccctgaatcaagcttttgggcatccttcctcggcctttcttgtcatctcttctttccctttgtagccgatctctaggcccttcttgcactgccacctcactttccaccactgtcagcctggaaagagatccaggtctggagctggagagaacaggccctgtgcaggaccagaagtaattatactaaagtatcaagaaagggagttagggcttaaactattctgtctagatgtcccagatagttcccattctacttggagatttggcttttccaagaaaagctagagcagagcagcccttctcccacaagccctcccacccccgtgcagccacatacctgtacagaatggtaactaagggtgctgtgcccaaccctgcgactagcaaggctcgcagcaagagcacagccctcaactacttgtgccagagtttctcttggaccactccaactcccactgagcccttttgctgctgggctggcaggaaactttccccactccctaaggggcatgtctgggttaggtgctaagtgctgaagagaacttggtcagttctctcaactttgctttgggcaagaatctggtcacctgatgggatccatggtacaggctactgctaaacttggcacagtatcaagtatagtacctccaaggaccagggctgggcagtctttagtgctaacatcccctttagagttcacacatcttgcccttccatgaatgacccctcagtctggcctccccagcctcaaggtccactcaggcacaagagccacagtaccctagatagtgtcacatgacaccgttgtcatccaaggataatacagaccaactaggctacatctgtgatgagcagctagcaaagccgctggtcttctcctaggactaagtccaggtgccttccacaatctcatggtctttcaggtccctggttacttttctcaaaggccatttccaaaagaatacatgccttcacatcacaacctgtactgtgagtccattctagaggtcactgaaaggccctgtaaagagaggacatggatacgggacctggccctgaggttattactggccgtaaggcagagttaatccatacagaaaccagtgtgtccatgtgctctgcacaaaaacagacctgttgtccatccagtccactgacaagagggtttccccgagagccgaagtggactgaagctacagtttttagctggtgcgggccacaggcagggtcagattgagaagaagcaaagctggggaagcagaagttgggagtcttgtgttgctccctcttcctgtgtggtgctctgggtttctgtggatcgtgaaggcgatctcaagagtgtttccctccaaacctgatagctgcctattcctgtctggttggggctgtggaggatgtagttgtatttattgcattgtaatatttttaacatcctgtgacttcatgctagaaattttctattgtttatagaaactttttgtagaaacattaactctaaagcacatctgcatgtcagtaaaaatctcagtttcgtacaga

SEQ ID NO: 447897 - DNA, 3086 bp, Homo sapiens
gtcttttctatgaagtcattattttggctttaaggatctctaaatagctctgaagactgaaggtgtaatgaggaagtaggtcagaacttggtcagcaggatgagcttttgtgtatacagcattctgggtgtggtgaaacgaacttgctggcccactgacctagaagaggccaaagctgggggatttgtggtgggttatacatccagtggaaatccaatcttccgtaacccctgcacagagcagattctgaaacttcttgacaatttgcttgcgcttataagaacccacaatacattatatgcaccagaaatgctagccaaaatggcagagcctttcaccaaggctctggatatgcttgacgcggaaaaatctgctatattaggattacctcaacctctcttggaactcaatgactctcctgtcttcaaaaccgtcttggaaagaatgcagcgtttcttctctaccctctatgaaaactgttttcatatcctagggaaggcaggcccttccatgcagcaagacttctatactgtggaggaccttgctacccagcttctcagctcagcctttgtcaacttgaacaatattcctgactaccgactcagacccatgcttcgggtctttgtaaagcctctggtgctcttctgtcccccagagcactatgaagccctggtatcccccatcctcggacctcttttcacctacctccatatgaggctttctcagaaatggcaagttatcaaccaaaggagcctgctgtgtggagaagatgaggctgcagatgaaaacccagagtctcaagagatgctggaggagcaactggtgaggatgttaacccgagaagtcatggacctaatcacggtttgctgtgtttcaaagaagggtgctgaccacagtagtgctcccccagcagatggagacgatgaagaaatgatggccacagaggtcaccccctcagctatggcagagcttacagacctgggcaaatgtctgatgaagcatgaggatgtttgtacagcgctattaattacagccttcaattccctggcctggaaagatactctgtcctgccagaggacaacctcacagctctgctggcctctcctcaaacaagtgctgtcagggacactgctcgcagatgcagttacgtggcttttcaccagtgtgctgaaaggcttacagatgcacgggcagcacgacgggtgcatggcttccctggtccatctggccttccagatatacgaggcactgcgccccaggtacctggagataagagctgtaatggagcaaatccctgaaatacagaaggactcactggaccagtttgactgcaagcttttaaacccctccctgcagaaagtggctgacaagcgccgaaaggaccaattcaaacgcctcattgctggttgcattgggaaacccttgggagagcagttccgaaaagaagttcacattaagaatcttccctcacttttcaaaaaaacaaagccaatgctggagacggaggtgctggacaatgatgggggtggcctggccaccatctttgaaccctgaatcaagcttttgggcatccttcctcggcctttcttgtcatctcttctttccctttgtagccgatctctaggcccttcttgcactgccacctcactttccaccactgtcagcctggaaagagatccaggtctggagctggagagaacaggccctgtgcaggaccagaagtaattatactaaagtatcaagaaagggagttagggcttaaactattctgtctagatgtcccagatagttcccattctacttggagatttggcttttccaagaaaagctagagcagagcagcccttctcccacaagccctcccacccccgtgcagccacatacctgtacagaatggtaactaagggtgctgtgcccaaccctgcgactagcaaggctcgcagcaagagcacagccctcaactacttgtgccagagtttctcttggaccactccaactcccactgagcccttttgctgctgggctggcaggaaactttccccactccctaaggggcatgtctgggttaggtgctaagtgctgaagagaacttggtcagttctctcaactttgctttgggcaagaatctggtcacctgatgggatccatggtacaggctactgctaaacttggcacagtatcaagtatagtacctccaaggaccagggctgggcagtctttagtgctaacatcccctttagagttcacacatcttgcccttccatgaatgacccctcagtctggcctccccagcctcaaggtccactcaggcacaagagccacagtaccctagatagtgtcacatgacaccgttgtcatccaaggataatacagaccaactaggctacatctgtgatgagcagctagcaaagccgctggtcttctcctaggactaagtccaggtgccttccacaatctcatggtctttcaggtccctggttacttttctcaaaggccatttccaaaagaatacatgccttcacatcacaacctgtactgtgagtccattctagaggtcactgaaaggccctgtaaagagaggacatggatacgggacctggccctgaggttattactggccgtaaggcagagttaatccatacagaaaccagtgtgtccatgtgctctgcacaaaaacagacctgttgtccatccagtccactgacaagagggtttccccgagagccgaagtggactgaagctacagtttttagctggtgcgggccacaggcagggtcagattgagaagaagcaaagctggggaagcagaagttgggagtcttgtgttgctccctcttcctgtgtggtgctctgggtttctgtggatcgtgaaggcgatctcaagagtgtttccctccaaacctgatagctgcctattcctgtctggttggggctgtggaggatgtagttgtatttattgcattgtaatatttttaacatcctgtgacttcatgctagaaattttctattgtttatagaaactttttgtagaaacattaactctaaagcacatctgcatgtcagtaaaaatctcagtttcgtacaga

SEQ ID NO: 447898 - DNA, 5457 bp, Homo sapiens
gcgcagcgccggcttcttcccagcgcgagttgctgctaacgctcctcctccagcttcccacccccgccgcccgccgcggcccggtaccaacgggtggtctcgccgagggagctgtcgtgcctcgtggtcccgggactgcagtggtgtgcgctctcggcgcgtggcgctaggcatggcgatggatcaagtaaacgcgctgtgcgagcagctggtgaaagcggtgacggtcatgatggaccccaactccacccagcgctaccggctggaagccctcaagttttgtgaggagtttaaagaaaagtgtcctatctgtgtcccctgtggcttgaggttggctgagaaaacacaagttgccatcgtcagacattttggccttcagatcctggaacacgttgtcaagtttcggtggaacggcatgtctcgattggagaaggtgtatctgaagaacagtgtcatggagctgattgcaaatggaacattgaacattttggaagaggagaaccatattaaagatgctctgtctcgaattgtagtggaaatgatcaagcgagagtggccacagcattggcctgacatgctaatagaattggacactctttccaaacaaggggaaacacagacagaattggtgatgtttatccttttgcgactggcagaggatgtagtgacttttcagacacttccccctcaaagaagaagggacatccagcaaacattaacccagaacatggaaaggatcttcagttttctgcttaacacacttcaagaaaatgtaaacaagtatcagcaagtgaagacagatacttctcaggagtcaaaggcgcaagcaaactgtcgagtaggagttgcagcactgaatactctagcaggctatattgactgggtgtctatgagtcacatcactgctgaaaactgtaaactcctggagatactgtgtttgctgttgaatgaacaggaacttcagttgggagccgctgagtgtcttctcattgcagtcagcagaaaaggcaagttggaagaccggaagcccttgatggtcttatttggagatgttgccatgcattatatactctccgccgcacagactgctgatggaggaggtttggtagaaaaacactacgtctttctgaagaggctctgtcaggtgttgtgtgcgctgggcaatcagctgtgtgcattgctgggtgcagattctgatgtagaaacaccatcaaactttggaaaatacctggaatcttttcttgctttcacaacccatccaagtcagtttctacgctcttcaactcagatgacttggggagccctcttcaggcatgaaatcctgtcccgtgatcctttgctattagcaataataccaaaatatcttcgtgcttccatgactaacttggtcaagatgggctttccttctaaaacagacagccctagctgtgaatattctcggtttgattttgatagcgatgaggacttcaatgctttcttcaactcctcccgagcacaacaaggagaggtgatgaggttggcatgtcgtttggatcccaaaactagcttccagatggctggggagtggctaaagtatcaactatcaacttttcttgatgctggttctgtgaattcttgttctgcagttggaactggagaaggaagcctctgttccgtcttctcaccttcattcgtgcagtgggaagccatgactctttttttggaaagtgttatcacccagatgtttcgaacactaaatagagaagaaattcctgttaatgatggaatagagctattgcagatggttctgaactttgataccaaggatcccctcatcctgtcctgcgtccttactaatgtctctgcactctttccatttgtcacctacagaccagagttcctgccccaggtcttctctaagctattttcatctgtcacttttgaaactgttgaagaaagtaaggcccccagaacccgggcagtgaggaatgtgaggaggcatgcttgttcctccatcatcaagatgtgtcgtgactacccccagcttgtgctgcccaattttgacatgctttataaccatgtgaagcaactcctctccaatgagctactcctgacacaaatggagaagtgtgccctcatggaagccctggttctcattagcaaccaatttaagaactacgagcgtcagaaggtgttcctagaggagctgatggcaccagtggccagcatctggctttctcaagacatgcacagagtgctgtcagatgttgatgctttcattgcgtatgtgggtacagatcagaagagctgtgacccaggcctggaggatccgtgtggcttaaaccgtgcacgaatgagcttttgtgtatacagcattctgggtgtggtgaaacgaacttgctggcccactgacctagaagaggccaaagctgggggatttgtggtgggttatacatccagtggaaatccaatcttccgtaacccctgcacagagcagattctgaaacttcttgacaatttgcttgcgcttataagaacccacaatacattatatgcaccagaaatgctagccaaaatggcagagcctttcaccaaggctctggatatgcttgacgcggaaaaatctgctatattaggattacctcaacctctcttggaactcaatgactctcctgtcttcaaaaccgtcttggaaagaatgcagcgtttcttctctaccctctatgaaaactgttttcatatcctagggaaggcaggcccttccatgcagcaagacttctatactgtggaggaccttgctacccagcttctcagctcagcctttgtcaacttgaacaatattcctgactaccgactcagacccatgcttcgggtctttgtaaagcctctggtgctcttctgtcccccagagcactatgaagccctggtatcccccatcctcggacctcttttcacctacctccatatgaggctttctcagaaatggcaagttatcaaccaaaggagcctgctgtgtggagaagatgaggctgcagatgaaaacccagagtctcaagagatgctggaggagcaactggtgaggatgttaacccgagaagtcatggacctaatcacggtttgctgtgtttcaaagaagggtgctgaccacagtagtgctcccccagcagatggagacgatgaagaaatgatggccacagaggtcaccccctcagctatggcagagcttacagacctgggcaaatgtctgatgaagcatgaggatgtttgtacagcgctattaattacagccttcaattccctggcctggaaagatactctgtcctgccagaggacaacctcacagctctgctggcctctcctcaaacaagtatggttattcaccccttttccctgcccctcatggaaggtttgggtcatgcagactgactaaatcattcagaagaactggggtgctgaggccttgagagaggccccctgtggccctaaagcacagttgtctccccaggtgctgtcagggacactgctcgcagatgcagttacgtggcttttcaccagtgtgctgaaaggcttacagatgcacgggcagcacgacgggtgcatggcttccctggtccatctggccttccagatatacgaggcactgcgccccaggtacctggagataagagctgtaatggagcaaatccctgaaatacagaaggactcactggaccagtttgactgcaagcttttaaacccctccctgcagaaagtggctgacaagcgccgaaaggaccaattcaaacgcctcattgctggttgcattgggaaacccttgggagagcagttccgaaaagaagttcacattaagaatcttccctcacttttcaaaaaaacaaagccaatgctggagacggaggtgctggacaatgatgggggtggcctggccaccatctttgaaccctgaatcaagcttttgggcatccttcctcggcctttcttgtcatctcttctttccctttgtagccgatctctaggcccttcttgcactgccacctcactttccaccactgtcagcctggaaagagatccaggtctggagctggagagaacaggccctgtgcaggaccagaagtaattatactaaagtatcaagaaagggagttagggcttaaactattctgtctagatgtcccagatagttcccattctacttggagatttggcttttccaagaaaagctagagcagagcagcccttctcccacaagccctcccacccccgtgcagccacatacctgtacagaatggtaactaagggtgctgtgcccaaccctgcgactagcaaggctcgcagcaagagcacagccctcaactacttgtgccagagtttctcttggaccactccaactcccactgagcccttttgctgctgggctggcaggaaactttccccactccctaaggggcatgtctgggttaggtgctaagtgctgaagagaacttggtcagttctctcaactttgctttgggcaagaatctggtcacctgatgggatccatggtacaggctactgctaaacttggcacagtatcaagtatagtacctccaaggaccagggctgggcagtctttagtgctaacatcccctttagagttcacacatcttgcccttccatgaatgacccctcagtctggcctccccagcctcaaggtccactcaggcacaagagccacagtaccctagatagtgtcacatgacaccgttgtcatccaaggataatacagaccaactaggctacatctgtgatgagcagctagcaaagccgctggtcttctcctaggactaagtccaggtgccttccacaatctcatggtctttcaggtccctggttacttttctcaaaggccatttccaaaagaatacatgccttcacatcacaacctgtactgtgagtccattctagaggtcactgaaaggccctgtaaagagaggacatggatacgggacctggccctgaggttattactggccgtaaggcagagttaatccatacagaaaccagtgtgtccatgtgctctgcacaaaaacagacctgttgtccatccagtccactgacaagagggtttccccgagagccgaagtggactgaagctacagtttttagctggtgcgggccacaggcagggtcagattgagaagaagcaaagctggggaagcagaagttgggagtcttgtgttgctccctcttcctgtgtggtgctctgggtttctgtggatcgtgaaggcgatctcaagagtgtttccctccaaacctgatagctgcctattcctgtctggttggggctgtggaggatgtagttgtatttattgcattgtaatatttttaacatcctgtgacttcatgctagaaattttctattgtttatagaaactttttgtagaaacattaactctaaagcacatctgcatgtcagtaaaaatctcagtttcgtacaga

SEQ ID NO: 447899 - DNA, 5929 bp, Homo sapiens
gcgcagcgccggcttcttcccagcgcgagttgctgctaacgctcctcctccagcttcccacccccgccgcccgccgcggcccggtaccaacgggtggtctcgccgagggagctgtcgtgcctcgtggtcccgggactgcagtggtgtgcgctctcggcgcgtggcgctaggcatggcgatggatcaagtaaacgcgctgtgcgagcagctggtgaaagcggtgacggtcatgatggaccccaactccacccagcgctaccggctggaagccctcaagttttgtgaggagtttaaagaaaagtgtcctatctgtgtcccctgtggcttgaggttggctgagaaaacacaagttgccatcgtcagacattttggccttcagatcctggaacacgttgtcaagtttcggtggaacggcatgtctcgattggagaaggtgtatctgaagaacagtgtcatggagctgattgcaaatggaacattgaacattttggaagaggagaaccatattaaagatgctctgtctcgaattgtagtggaaatgatcaagcgagagtggccacagcattggcctgacatgctaatagaattggacactctttccaaacaaggggaaacacagacagaattggtgatgtttatccttttgcgactggcagaggatgtagtgacttttcagacacttccccctcaaagaagaagggacatccagcaaacattaacccagaacatggaaaggatcttcagttttctgcttaacacacttcaagaaaatgtaaacaagtatcagcaagtgaagacagatacttctcaggagtcaaaggcgcaagcaaactgtcgagtaggagttgcagcactgaatactctagcaggctatattgactgggtgtctatgagtcacatcactgctgaaaactgtaaactcctggagatactgtgtttgctgttgaatgaacaggaacttcagttgggagccgctgagtgtcttctcattgcagtcagcagaaaaggcaagttggaagaccggaagcccttgatggtcttatttggagatgttgccatgcattatatactctccgccgcacagactgctgatggaggaggtttggtagaaaaacactacgtctttctgaagaggctctgtcaggtgttgtgtgcgctgggcaatcagctgtgtgcattgctgggtgcagattctgatgtagaaacaccatcaaactttggaaaatacctggaatcttttcttgctttcacaacccatccaagtcagtttctacgctcttcaactcagatgacttggggagccctcttcaggcatgaaatcctgtcccgtgatcctttgctattagcaataataccaaaatatcttcgtgcttccatgactaacttggtcaagatgggctttccttctaaaacagacagccctagctgtgaatattctcggtttgattttgatagcgatgaggacttcaatgctttcttcaactcctcccgagcacaacaaggagaggtgatgaggttggcatgtcgtttggatcccaaaactagcttccagatggctggggagtggctaaagtatcaactatcaacttttcttgatgctggttctgtgaattcttgttctgcagttggaactggagaaggaagcctctgttccgtcttctcaccttcattcgtgcagtgggaagccatgactctttttttggaaagtgttatcacccagatgtttcgaacactaaatagagaagaaattcctgttaatgatggaatagagctattgcagatggttctgaactttgataccaaggatcccctcatcctgtcctgcgtccttactaatgtctctgcactctttccatttgtcacctacagaccagagttcctgccccaggtcttctctaagctattttcatctgtcacttttgaaactgttgaagaaagtaaggcccccagaacccgggcagtgaggaatgtgaggaggcatgcttgttcctccatcatcaagatgtgtcgtgactacccccagcttgtgctgcccaattttgacatgctttataaccatgtgaagcaactcctctccaatgagctactcctgacacaaatggagaagtgtgccctcatggaagccctggttctcattagcaaccaatttaagaactacgagcgtcagaaggtgttcctagaggagctgatggcaccagtggccagcatctggctttctcaagacatgcacagagtgctgtcagatgttgatgctttcattgcgtatgtgggtacagatcagaagagctgtgacccaggcctggaggatccgtgtggcttaaaccgtgcacgaatgagcttttgtgtatacagcattctgggtgtggtgaaacgaacttgctggcccactgacctagaagaggccaaagctgggggatttgtggtgggttatacatccagtggaaatccaatcttccgtaacccctgcacagagcagattctgaaacttcttgacaatttgcttgcgcttataagaacccacaatacattatatgcaccagaaatgctagccaaaatggcagagcctttcaccaaggctctggatatgcttgacgcggaaaaatctgctatattaggattacctcaacctctcttggaactcaatgactctcctgtcttcaaaaccgtcttggaaagaatgcagcgtttcttctctaccctctatgaaaactgttttcatatcctagggaaggcaggcccttccatgcagcaagacttctatactgtggaggaccttgctacccagcttctcagctcagcctttgtcaacttgaacaatattcctgactaccgactcagacccatgcttcgggtctttgtaaagcctctggtgctcttctgtcccccagagcactatgaagccctggtatcccccatcctcggacctcttttcacctacctccatatgaggctttctcagaaatggcaagttatcaaccaaaggagcctgctgtgtggagaagatgaggctgcagatgaaaacccagagtctcaagagatgctggaggagcaactggtgaggatgttaacccgagaagtcatggacctaatcacggtttgctgtgtttcaaagaagggtgctgaccacagtagtgctcccccagcagatggagacgatgaagaaatgatggccacagaggtcaccccctcagctatggcagagcttacagacctgggcaaatgtctgatgaagcatgaggatgtttgtacagcgctattaattacagccttcaattccctggcctggaaagatactctgtcctgccagaggacaacctcacagctctgctggcctctcctcaaacaagtgctgtcagggacactgctcgcagatgcagttacgtggcttttcaccagtgtgctgaaaggcttacagatgcacgggcagcacgacgggtgcatggcttccctggtccatctggccttccagatatacgaggcactgcgccccaggtacctggagataagagctgtaatggagcaaatccctgaaatacagaaggactcactggaccagtttgactgcaagcttttaaacccctccctgcagaaagtggctgacaagcgccgaaaggaccaattcaaacgcctcattgctggttgcattgggaaacccttgggagagcagttccgaaaagaagttcacattaagaatcttccctcacttttcaaaaaaacaaagccaatgctggagacggaggtgctggacaatgatgggggtggcctggccaccatctttgaaccctgaatcaagcttttgggcatccttcctcggcctttcttgtcatctcttctttccctttgtagccgatctctaggcccttcttgcactgccacctcactttccaccactgtcagcctggaaagagatccaggtctggagctggagagaacaggccctgtgcaggaccagaagtaattatactaaagtatcaagaaagggagttagggcttaaactattctgtctagatgtcccagatagttcccattctacttggagatttggcttttccaagaaaagctagagcagagcagcccttctcccacaagccctcccacccccgtgcagccacatacctgtacagaatggtaactaagggtgctgtgcccaaccctgcgactagcaaggctcgcagcaagagcacagccctcaactacttgtgccagagtttctcttggaccactccaactcccactgagcccttttgctgctgggctggcaggaaactttccccactccctaaggggcatgtctgggttaggtgctaagtgctgaagagaacttggtcagttctctcaactttgctttgggcaagaatctggtcacctgatgggatccatggtacaggctactgctaaacttggcacagtatcaagtatagtacctccaaggaccagggctgggcagtctttagtgctaacatcccctttagagttcacacatcttgcccttccatgaatgacccctcagtctggcctccccagcctcaaggtccactcaggcacaagagccacagtaccctagatagtgtcacatgacaccgttgtcatccaaggataatacagaccaactaggctacatctgtgatgagcagctagcaaagccgctggtcttctcctaggactaagtccaggtgccttccacaatctcatggtctttcaggtccctggttacttttctcaaaggccatttccaaaagaatacatgccttcacatcacaacctgtactgtgagtccattctagaggtcactgaaaggccctgtaaagagaggacatggatacgggacctggccctgaggttattactggccgtaaggcagagttaatccatacagaaaccagtgtgtccatgtgctctgcacaaaaacagacctgttgtccatccagtccactgacaagagggtttccccgagagccgaagtggactgaagctacagtttttagctggtgcgggccacaggcagggtcagattgagaagaagcaaagctggggaagcagaagttgggagtcttgtgttgctccctcttcctgtgtggtgctctgggtttctgtggatcgtgaaggcgatctcaagagtgtttccctccaaacctgatagctgcctattcctgtctggttggggctgtggaggatgtagttgtatttattgcattgtaatatttttaacatcctgtgacttcatgctagaaattttctattgtttatagaaactttttgtagaaacattaactctaaagcacatctgcatgtcagtaaaaatctcagtttcgtacagaaagggacccatctgcctttttcaacctagtcttaaaaccagtgacatactccagggttacttcatgagcacccgggactaaaacaggaagaaatgtgactgatgattctggtctttcaagctttctgaaatggtgtgccagttagaaaaggatttctattcctgacatacccagactaggcagcccataccattctcacagtgtctttcgtgtgtggctgctgggcctggcccacaggaattgctactgttctttgttggagctgtcaatagcaacatgaacttccctggtaaaccaggagataggtgaagtggcacattcactctagcttgaatgtttttctagggtttggctgtgctcccagaaaccaccttaatttgccaattctcaggaggtgttctttctgttgtttttgaaacagggtctcactgttacccgggctggagtgcacatctgatgttcttaattggtaaatgctaaaccagttctgaagtgaggccccctgtttttcgcggtggctcacacctgtaatcccaacactttgggaggccccaaggcaggcgtatcacttgaggtcaggagtttgacaccagcctgaccaacatggtga

SEQ ID NO: 447900 - DNA, 2491 bp, Homo sapiens
tagtaggcacactgatgcagatccctggtgtttagcctccccaagccaggcctgagctttgtctccatcctacacatacaggttttctcacattttgattttttctttttgactggcaatacacaaaaatagaggaagtaaactccttttatttttcctgcttagctatttaaaactccagctcctaagccaggcatggtggcacacacctgtagtcccagctattcgggaggcttagatgggagaatagcttgagcccaggagttcaggaccagcctgggcaacaaaacaaacccatctttagagggggggaggaaaaaaaaaaaaccctccggctcctgatgtgtaataatcatcagagaaaactgtgcttctttttccattgtaactcttcatcttttcctgttcaggatgtttgtacagcgctattaattacagccttcaattccctggcctggaaagatactctgtcctgccagaggacaacctcacagctctgctggcctctcctcaaacaagtgctgtcagggacactgctcgcagatgcagttacgtggcttttcaccagtgtgctgaaaggcttacagatgcacgggcagcacgacgggtgcatggcttccctggtccatctggccttccagatatacgaggcactgcgccccaggtacctggagataagagctgtaatggagcaaatccctgaaatacagaaggactcactggaccagtttgactgcaagcttttaaacccctccctgcagaaagtggctgacaagcgccgaaaggaccaattcaaacgcctcattgctggttgcattgggaaacccttgggagagcagttccgaaaagaagttcacattaagaatcttccctcacttttcaaaaaaacaaagccaatgctggagacggaggtgctggacaatgatgggggtggcctggccaccatctttgaaccctgaatcaagcttttgggcatccttcctcggcctttcttgtcatctcttctttccctttgtagccgatctctaggcccttcttgcactgccacctcactttccaccactgtcagcctggaaagagatccaggtctggagctggagagaacaggccctgtgcaggaccagaagtaattatactaaagtatcaagaaagggagttagggcttaaactattctgtctagatgtcccagatagttcccattctacttggagatttggcttttccaagaaaagctagagcagagcagcccttctcccacaagccctcccacccccgtgcagccacatacctgtacagaatggtaactaagggtgctgtgcccaaccctgcgactagcaaggctcgcagcaagagcacagccctcaactacttgtgccagagtttctcttggaccactccaactcccactgagcccttttgctgctgggctggcaggaaactttccccactccctaaggggcatgtctgggttaggtgctaagtgctgaagagaacttggtcagttctctcaactttgctttgggcaagaatctggtcacctgatgggatccatggtacaggctactgctaaacttggcacagtatcaagtatagtacctccaaggaccagggctgggcagtctttagtgctaacatcccctttagagttcacacatcttgcccttccatgaatgacccctcagtctggcctccccagcctcaaggtccactcaggcacaagagccacagtaccctagatagtgtcacatgacaccgttgtcatccaaggataatacagaccaactaggctacatctgtgatgagcagctagcaaagccgctggtcttctcctaggactaagtccaggtgccttccacaatctcatggtctttcaggtccctggttacttttctcaaaggccatttccaaaagaatacatgccttcacatcacaacctgtactgtgagtccattctagaggtcactgaaaggccctgtaaagagaggacatggatacgggacctggccctgaggttattactggccgtaaggcagagttaatccatacagaaaccagtgtgtccatgtgctctgcacaaaaacagacctgttgtccatccagtccactgacaagagggtttccccgagagccgaagtggactgaagctacagtttttagctggtgcgggccacaggcagggtcagattgagaagaagcaaagctggggaagcagaagttgggagtcttgtgttgctccctcttcctgtgtggtgctctgggtttctgtggatcgtgaaggcgatctcaagagtgtttccctccaaacctgatagctgcctattcctgtctggttggggctgtggaggatgtagttgtatttattgcattgtaatatttttaacatcctgtgacttcatgctagaaattttctattgtttatagaaactttttgtagaaacattaactctaaagcacatctgcatgtcagtaaaaatctcagtttcgtacaga

SEQ ID NO: 447901 - DNA, 4619 bp, Homo sapiens
gcgcagcgccggcttcttcccagcgcgagttgctgctaacgctcctcctccagcttcccacccccgccgcccgccgcggcccggtaccaacgggtggtctcgccgagggagctgtcgtgcctcgtggtcccgggactgcagtggtgtgcgctctcggcgcgtggcgctaggcatggcgatggatcaagtaaacgcgctgtgcgagcagctggtgaaagcggtgacggtcatgatggaccccaactccacccagcgctaccggctggaagccctcaagttttgtgaggagtttaaagaaaagtgtcctatctgtgtcccctgtggcttgaggttggctgagaaaacacaagttgccatcgtcagacattttggccttcagatcctggaacacgttgtcaagtttcggtggaacggcatgtctcgattggagaaggtgtatctgaagaacagtgtcatggagctgattgcaaatggaacattgaacattttggaagaggagaaccatattaaagatgctctgtctcgaattgtagtggaaatgatcaagcgagagtggccacagcattggcctgacatgctaatagaattggacactctttccaaacaaggggaaacacagacagaattggtgatgtttatccttttgcgactggcagaggatgtagtgacttttcagacacttccccctcaaagaagaagggacatccagcaaacattaacccagaacatggaaaggatcttcagttttctgcttaacacacttcaagaaaatgtaaacaagtatcagcaagtgaagacagatacttctcaggagtcaaaggcgcaagcaaactgtcgagtaggagttgcagcactgaatactctagcaggctatattgactgggtgtctatgagtcacatcactgctgaaaactgtaaactcctggagatactgtgtttgctgttgaatgaacaggaacttcagttgggagccgctgagtgtcttctcattgcagtcagcagaaaaggcaagttggaagaccggaagcccttgatggtcttatttggagatgttgccatgcattatatactctccgccgcacagactgctgatggaggaggtttggtagaaaaacactacgtctttctgaagaggctctgtcaggtgttgtgtgcgctgggcaatcagctgtgtgcattgctgggtgcagattctgatgtagaaacaccatcaaactttggaaaatacctggaatcttttcttgctttcacaacccatccaagtcagtttctacgctcttcaactcagatgacttggggagccctcttcaggcatgaaatcctgtcccgtgatcctttgctattagcaataataccaaaatatcttcgtgcttccatgactaacttggtcaagatgggctttccttctaaaacagacagccctagctgtgaatattctcggtttgattttgatagcgatgaggacttcaatgctttcttcaactcctcccgagcacaacaaggagaggtgatgaggttggcatgtcgtttggatcccaaaactagcttccagatggctggggagtggctaaagtatcaactatcaacttttcttgatgctggttctgtgaattcttgttctgcagttggaactggagaaggaagcctctgttccgtcttctcaccttcattcgtgcagtgggaagccatgactctttttttggaaagtgttatcacccagatgtttcgaacactaaatagagaagaaattcctgttaatgatggaatagagctattgcagatggttctgaactttgataccaaggatcccctcatcctgtcctgcgtccttactaatgtctctgcactctttccatttgtcacctacagaccagagttcctgccccaggtcttctctaagctattttcatctgtcacttttgaaactgttgaagaaagtaaggcccccagaacccgggcagtgaggaatgtgaggaggcatgcttgttcctccatcatcaagatgtgtcgtgactacccccagcttgtgctgcccaattttgacatgctttataaccatgtgaagcaactcctctccaatgagctactcctgacacaaatggagaagtgtgccctcatggaagccctggttctcattagcaaccaatttaagaactacgagcgtcagaaggtgttcctagaggagctgatggcaccagtggccagcatctggctttctcaagacatgcacagagtgctgtcagatgttgatgctttcattgcgtatgtgggtacagatcagaagagctgtgacccaggcctggaggatccgtgtggcttaaaccgtgcacgaatgagcttttgtgtatacagcattctgggtgtggtgaaacgaacttgctggcccactgacctagaagaggccaaagctgggggatttgtggtgggttatacatccagtggaaatccaatcttccgtaacccctgcacagagcagattctgaaacttcttgacaatttgcttgcgcttataagaacccacaatacattatatgcaccagaaatgctagccaaaatggcagagcctttcaccaaggctctggatatgcttgacgcggaaaaatctgctatattaggattacctcaacctctcttggaactcaatgactctcctgtcttcaaaaccgtcttggaaagaatgcagcgtttcttctctaccctctatgaaaactgttttcatatcctagggaaggcaggcccttccatgcagcaagacttctatactgtggaggaccttgctacccagcttctcagctcagcctttgtcaacttgaacaatattcctgactaccgactcagacccatgcttcgggtctttgtaaagcctctggtgctcttctgtcccccagagcactatgaagccctggtatcccccatcctcggacctcttttcacctacctccatatgaggctttctcagaaatggcaagttatcaaccaaaggagcctgctgtgtggagaagatgaggctgcagatgaaaacccagagtctcaagagatgctggaggagcaactggtgaggatgttaacccgagaagtcatggacctaatcacggtttgctgtgtttcaaagaagggtgctgaccacagtagtgctcccccagcagatggagacgatgaagaaatgatggccacagaggtcaccccctcagctatggcagagcttacagacctgggcaaatgtctgatgaagcatgaggatgtttgtacagcgctattaattacagccttcaattccctggcctggaaagatactctgtcctgccagaggacaacctcacagctctgctggcctctcctcaaacaagtgctgtcagggacactgctcgcagatgcagttacgtggcttttcaccagtgtgctgaaaggcttacagatgcacgggcagcacgacgggtgcatggcttccctggtccatctggccttccagatatacgaggcactgcgccccaggtacctggagataagagctgtaatggagcaaatccctgaaatacagaaggactcactggaccagtttgactgcaagcttttaaacccctccctgcagaaagtggctgacaagcgccgaaaggaccaattcaaacgcctcattgctggttgcattgggaaacccttgggagagcagttccgaaaagaagttcacattaagaatcttccctttgtagccgatctctaggcccttcttgcactgccacctcactttccaccactgtcagcctggaaagagatccaggtctggagctggagagaacaggccctgtgcaggaccagaagtaattatactaaagtatcaagaaagggagttagggcttaaactattctgtctagatgtcccagatagttcccattctacttggagatttggcttttccaagaaaagctagagcagagcagcccttctcccacaagccctcccacccccgtgcagccacatacctgtacagaatggtaactaagggtgctgtgcccaaccctgcgactagcaaggctcgcagcaagagcacagccctcaactacttgtgccagagtttctcttggaccactccaactcccactgagcccttttgctgctgggctggcaggaaactttccccactccctaaggggcatgtctgggttaggtgctaagtgctgaagagaacttggtcagttctctcaactttgctttgggcaagaatctggtcacctgatgggatccatggtacaggctactgctaaacttggcacagtatcaagtatagtacctccaaggaccagggctgggcagtctttagtgctaacatcccctttagagttcacacatcttgcccttccatgaatgacccctcagtctggcctccccagcctcaaggtccactcaggcacaagagccacagtaccctagatagtgtcacatgacaccgttgtcatccaaggataatacagaccaactaggctacatctgtgatgagcagctagcaaagccgctggtcttctcctaggactaagtccaggtgccttccacaatctcatggtctttcaggtccctggttacttttctcaaaggccatttccaaaagaatacatgccttcacatc

SEQ ID NO: 447902 - DNA, 1792 bp, Homo sapiens
tgtgtaccacgggctgcacgaatacagcacgagcatcctcggacctcttttcacctacctccatatgaggctttctcagaaatggcaagttatcaaccaaaggagcctgctgtgtggagaagatgaggctgcagatggagaagtcatggacctaatcacggtttgctgtgtttcaaagaagggtgctgaccacagtagtgctcccccagcagatggagacgaatgatgggggtggcctggccaccatctttgaaccctgaatcaagcttttgggcatccttcctcggcctttcttgtcatctcttctttccctttgtagccgatctctaggcccttcttgcactgccacctcactttccaccactgtcagcctggaaagagatccaggtctggagctggagagaacaggccctgtgcaggaccagaagtaattatactaaagtatcaagaaagggagttagggcttaaactattctgtctagatgtcccagatagttcccattctacttggagatttggcttttccaagaaaagctagagcagagcagcccttctcccacaagccctcccacccccgtgcagccacatacctgtacagaatggtaactaagggtgctgtgcccaaccctgcgactagcaaggctcgcagcaagagcacagccctcaactacttgtgccagagtttctcttggaccactccaactcccactgagcccttttgctgctgggctggcaggaaactttccccactccctaaggggcatgtctgggttaggtgctaagtgctgaagagaacttggtcagttctctcaactttgctttgggcaagaatctggtcacctgatgggatccatggtacaggctactgctaaacttggcacagtatcaagtatagtacctccaaggaccagggctgggcagtctttagtgctaacatcccctttagagttcacacatcttgcccttccatgaatgacccctcagtctggcctccccagcctcaaggtccactcaggcacaagagccacagtaccctagatagtgtcacatgacaccgttgtcatccaaggataatacagaccaactaggctacatctgtgatgagcagctagcaaagccgctggtcttctcctaggactaagtccaggtgccttccacaatctcatggtctttcaggtccctggttacttttctcaaaggccatttccaaaagaatacatgccttcacatcacaacctgtactgtgagtccattctagaggtcactgaaaggccctgtaaagagaggacatggatacgggacctggccctgaggttattactggccgtaaggcagagttaatccatacagaaaccagtgtgtccatgtgctctgcacaaaaacagacctgttgtccatccagtccactgacaagagggtttccccgagagccgaagtggactgaagctacagtttttagctggtgcgggccacaggcagggtcagattgagaagaagcaaagctggggaagcagaagttgggagtcttgtgttgctccctcttcctgtgtggtgctctgggtttctgtggatcgtgaaggcgatctcaagagtgtttccctccaaacctgatagctgcctattcctgtctggttggggctgtggaggatgtagttgtatttattgcattgtaatatttttaacatcctgtgacttcatgctagaaattttctattgtttatagaaactttttgtagaaacattaactctaaagcacatctgcatgtcagtaaaaatctcagtttcgtacaga

SEQ ID NO: 447903 - DNA, 1792 bp, Homo sapiens
  misc_feature (43)..(43): n is a, c, g, or t
tcagatgttgatgctttcattgcgtatgtgggtacagatcagnaagagctgtgacccagggcctggaggatccgtgcagtgggaagccatgactctttttttggaaagtgttatcacccagatgtttcgaacactaaatagagaagaaattcctgttaatgatggaatagagctattgcagatggttctgaactttgataccaaggatcccctcatcctgtcctgcgtccttactaatgtctctgcactctttccatttgtcacctacagaccagagttcctgccccaggtcttctctaagctattttcatctgtcacttttgaaactgttgaagaaagtaagtgccacctcactttccaccactgtcagcctggaaagagatccaggtctggagctggagagaacaggccctgtgcaggaccagaagtaattatactaaagtatcaagaaagggagttagggcttaaactattctgtctagatgtcccagatagttcccattctacttggagatttggcttttccaagaaaagctagagcagagcagcccttctcccacaagccctcccacccccgtgcagccacatacctgtacagaatggtaactaagggtgctgtgcccaaccctgcgactagcaaggctcgcagcaagagcacagccctcaactacttgtgccagagtttctcttggaccactccaactcccactgagcccttttgctgctgggctggcaggaaactttccccactccctaaggggcatgtctgggttaggtgctaagtgctgaagagaacttggtcagttctctcaactttgctttgggcaagaatctggtcacctgatgggatccatggtacaggctactgctaaacttggcacagtatcaagtatagtacctccaaggaccagggctgggcagtctttagtgctaacatcccctttagagttcacacatcttgcccttccatgaatgacccctcagtctggcctccccagcctcaaggtccactcaggcacaagagccacagtaccctagatagtgtcacatgacaccgttgtcatccaaggataatacagaccaactaggctacatctgtgatgagcagctagcaaagccgctggtcttctcctaggactaagtccaggtgccttccacaatctcatggtctttcaggtccctggttacttttctcaaaggccatttccaaaagaatacatgccttcacatcacaacctgtactgtgagtccattctagaggtcactgaaaggccctgtaaagagaggacatggatacgggacctggccctgaggttattactggccgtaaggcagagttaatccatacagaaaccagtgtgtccatgtgctctgcacaaaaacagacctgttgtccatccagtccactgacaagagggtttccccgagagccgaagtggactgaagctacagtttttagctggtgcgggccacaggcagggtcagattgagaagaagcaaagctggggaagcagaagttgggagtcttgtgttgctccctcttcctgtgtggtgctctgggtttctgtggatcgtgaaggcgatctcaagagtgtttccctccaaacctgatagctgcctattcctgtctggttggggctgtggaggatgtagttgtatttattgcattgtaatatttttaacatcctgtgacttcatgctagaaattttctattgtttatagaaactttttgtagaaacattaactctaaagcacatctgcatgtcagtaaaaatctcagtttcgtacaga

SEQ ID NO: 447904 - DNA, 3241 bp, Homo sapiens
gcgcagcgccggcttcttcccagcgcgagttgctgctaacgctcctcctccagcttcccacccccgccgcccgccgcggcccggtaccaacgggtggtctcgccgagggagctgtcgtgcctcgtggtcccgggactgcagtggtgtgcgctctcggcgcgtggcgctaggcatggcgatggatcaagtaaacgcgctgtgcgagcagctggtgaaagcggtgacggtcatgatggaccccaactccacccagcgctaccggctggaagccctcaagttttgtgaggagtttaaagaaaagtgtcctatctgtgtcccctgtggcttgaggttggctgagaaaacacaagttgccatcgtcagacattttggccttcagatcctggaacacgttgtcaagtttcggtggaacggcatgtctcgattggagaaggtgtatctgaagaacagtgtcatggagctgattgcaaatggaacattgaacattttggaagaggagaaccatattaaagatgctctgtctcgaattgtagtggaaatgatcaagcgagagtggccacagcattggcctgacatgctaatagaattggacactctttccaaacaaggggaaacacagacagaattggtgatgtttatccttttgcgactggcagaggatgtagtgacttttcagacacttccccctcaaagaagaagggacatccagcaaacattaacccagaacatggaaaggatcttcagttttctgcttaacacacttcaagaaaatgtaaacaagtatcagcaagtgaagacagatacttctcaggagtcaaaggcgcaagcaaactgtcgagtaggagttgcagcactgaatactctagcaggctatattgactgggtgtctatgagtcacatcactgctgaaaactgtaaactcctggagatactgtgtttgctgttgaatgaacaggaacttcagttgggagccgctgagtgtcttctcattgcagtcagcagaaaaggcaagttggaagaccggaagcccttgatggtcttatttggagatgttgccatgcattatatactctccgccgcacagactgctgatggaggaggtttggtagaaaaacactacgtctttctgaagaggctctgtcaggtgttgtgtgcgctgggcaatcagctgtgtgcattgctgggtgcagattctgatgtagaaacaccatcaaactttggaaaatacctggaatcttttcttgctttcacaacccatccaagtcagtttctacgctcttcaactcagatgacttggggagccctcttcaggcatgaaatcctgtcccgtgatcctttgctattagcaataataccaaaatatcttcgtgcttccatgactaacttggtcaagatgggctttccttctaaaacagacagccctagctgtgaatattctcggtttgattttgatagcgatgaggacttcaatgctttcttcaactcctcccgagcacaacaaggagaggtgatgaggttggcatgtcgtttggatcccaaaactagcttccagatggctggggagtggctaaagtatcaactatcaacttttcttgatgctggttctgtgaattcttgttctgcagttggaactggagaaggaagcctctgttccgtcttctcaccttcattcgtgcagtgggaagccatgactctttttttggaaagtgttatcacccagatgtttcgaacactaaatagagaagaaattcctgttaatgatggaatagagctattgcagatggttctgaactttgataccaaggatcccctcatcctgtcctgcgtccttactaatgtctctgcactctttccatttgtcacctacagaccagagttcctgccccaggtcttctctaagctattttcatctgtcacttttgaaactgttgaagaaagtaaggcccccagaacccgggcagtgaggaatgtgaggaggcatgcttgttcctccatcatcaagatgtgtcgtgactacccccagcttgtgctgcccaattttgacatgctttataaccatgtgaagcaactcctctccaatgagctactcctgacacaaatggagaagtgtgccctcatggaagccctggttctcattagcaaccaatttaagaactacgagcgtcagaaggtgttcctagaggagctgatggcaccagtggccagcatctggctttctcaagacatgcacagagtgctgtcagatgttgatgctttcattgcgtatgtgggtacagatcagaagagctgtgacccaggcctggaggatccgtgtggcttaaaccgtgcacgaatgagcttttgtgtatacagcattctgggtgtggtgaaacgaacttgctggcccactgacctagaagaggccaaagctgggggatttgtggtgggttatacatccagtggaaatccaatcttccgtaacccctgcacagagcagattctgaaacttcttgacaatttgcttgcgcttataagaacccacaatacattatatgcaccagaaatgctagccaaaatggcagagcctttcaccaaggctctggatatgcttgacgcggaaaaatctgctatattaggattacctcaacctctcttggaactcaatgactctcctgtcttcaaaaccgtcttggaaagaatgcagcgtttcttctctaccctctatgaaaactgttttcatatcctagggaaggcaggcccttccatgcagcaagacttctatactgtggaggaccttgctacccagcttctcagctcagcctttgtcaacttgaacaatattcctgactaccgactcagacccatgcttcgggtctttgtaaagcctctggtgctcttctgtcccccagagcactatgaagccctggtatcccccatcctcggacctcttttcacctacctccatatgaggctttctcagaaatggcaagttatcaaccaaaggagcctgctgtgtggagaagatgaggctgcagatgaaaacccagagtctcaagagatgctggaggagcaactggtgaggatgttaacccgagaagtcatggacctaatcacggtttgctgtgtttcaaagaagggtgctgaccacagtagtgctcccccagcagatggagacgaatgatgggggtggcctggccaccatctttgaaccctgaatcaagcttttgggcatccttcctcggcctttcttgtcatctcttct

SEQ ID NO: 447905 - DNA, 2271 bp, Homo sapiens
gcgcagcgccggcttcttcccagcgcgagttgctgctaacgctcctcctccagcttcccacccccgccgcccgccgcggcccggtaccaacgggtggtctcgccgagggagctgtcgtgcctcgtggtcccgggactgcagtggtgtgcgctctcggcgcgtggcgctaggcatggcgatggatcaagtaaacgcgctgtgcgagcagctggtgaaagcggtgacggtcatgatggaccccaactccacccagcgctaccggctggaagccctcaagttttgtgaggagtttaaagaaaagtgtcctatctgtgtcccctgtggcttgaggttggctgagaaaacacaagttgccatcgtcagacattttggccttcagatcctggaacacgttgtcaagtttcggtggaacggcatgtctcgattggagaaggtgtatctgaagaacagtgtcatggagctgattgcaaatggaacattgaacattttggaagaggagaaccatattaaagatgctctgtctcgaattgtagtggaaatgatcaagcgagagtggccacagcattggcctgacatgctaatagaattggacactctttccaaacaaggggaaacacagacagaattggtgatgtttatccttttgcgactggcagaggatgtagtgacttttcagacacttccccctcaaagaagaagggacatccagcaaacattaacccagaacatggaaaggatcttcagttttctgcttaacacacttcaagaaaatgtaaacaagtatcagcaagtgaagacagatacttctcaggagtcaaaggcgcaagcaaactgtcgagtaggagttgcagcactgaatactctagcaggctatattgactgggtgtctatgagtcacatcactgctgaaaactgtaaactcctggagatactgtgtttgctgttgaatgaacaggaacttcagttgggagccgctgagtgtcttctcattgcagtcagcagaaaaggcaagttggaagaccggaagcccttgatggtcttatttggagatgttgccatgcattatatactctccgccgcacagactgctgatggaggaggtttggtagaaaaacactacgtctttctgaagaggctctgtcaggtgttgtgtgcgctgggcaatcagctgtgtgcattgctgggtgcagattctgatgtagaaacaccatcaaactttggaaaatacctggaatcttttcttgctttcacaacccatccaagtcagtttctacgctcttcaactcagatgacttggggagccctcttcaggcatgaaatcctgtcccgtgatcctttgctattagcaataataccaaaatatcttcgtgcttccatgactaacttggtcaagatgggctttccttctaaaacagacagccctagctgtgaatattctcggtttgattttgatagcgatgaggacttcaatgctttcttcaactcctcccgagcacaacaaggagaggtgatgaggttggcatgtcgtttggatcccaaaactagcttccagatggctggggagtggctaaagtatcaactatcaacttttcttgatgctggttctgtgaattcttgttctgcagttggaactggagaaggaagcctctgttccgtcttctcaccttcattcgtgcagtgggaagccatgactctttttttggaaagtgttatcacccagatgtttcgaacactaaatagagaagaaattcctgttaatgatggaatagagctattgcagatggttctgaactttgataccaaggatcccctcatcctgtcctgcgtccttactaatgtctctgcactctttccatttgtcacctacagaccagagttcctgccccaggtcttctctaagctattttcatctgtcacttttgaaactgttgaagaaagtaaggcccccagaacccgggcagtgaggaatgtgaggaggcatgcttgttcctccatcatcaagatgtgtcgtgactacccccagcttgtgctgcccaattttgacatgctttataaccatgtgaagcaactcctctccaatgagctactcctgacacaaatggagaagtgtgccctcatggaagccctggttctcattagcaaccaatttaagaactacgagcgtcagaaggtgttcctagaggagctgatggcaccagtggccagcatctggctttctcaagacatgcacagagtgctgtcagatgttgatgctggacgacgggtaccgag

SEQ ID NO: 447906 - DNA, 517 bp, Homo sapiens
gatgtttttattacagcctttttaattttgttggtgatataaggaattctcatcttacaggactgctgatggaggaggtttggtagaaaaacactacgtctttctgaagaggctctgtcaggtgttgtgtgcgctgggcaatcagctgtgtgcattgctggtgagctagtgtttgctttctggagagcttcaagcccatttgggaagagcatttagaaacttatgtttcaatgaggggttgcaaatgtcattgattttagcctgatggggcagtgccatacaagttattgcatgattctatagattaaattatcttaatagaatagtgtttgagtgatctaaatttcttttaacaataaaatagttataccaacgtcagatatccacgtctattattccataaagtcaacgttggtttcttgtgaattttggtacttacagaacctcaatctgctgagtgctttatgcttttacattctgttagcccacgaaacatggacttgaataaagaactctt

SEQ ID NO: 447907 - DNA, 459 bp, Homo sapiens
aaattcatgggacagggctggcagtaacagatgttggatttgtcattttcaatgctctttttttcccctttacagttttcatatcctagggaaggcaggcccttccatgcagcaagacttctatactgtggaggaccttgctacccagcttctcagctcagcctttgtcaacttgaacaatattcctgactaccgactcagacccatgcttcatatcctttcaaaagtctctacataacccaaaaggtcagaaaattagagagagaaacaaaacaggtcacagcaaccagagggaagaggcagaactggaaggaagagatgagattatgtatctaagtgtatcatgtcattaaaaacactggcagattgcagggaaaacatgaaggcagtccagatggccataaacttttccttaggggtaaatttttaccttcccccttctcggaattattacagata

SEQ ID NO: 447908 - DNA, 355 bp, Homo sapiens
tagaattaagcagggggaccagctgggtggagaacaggtatgtctagagacccaggaattctaaaaatgttgttaattctttccaagcaaagaggtgtttgagataccaccttcatcagggatgtgggataggttacagaaaccatagatgttttttttaaccttgtggtgtggagtctacagaagttgtcattgatgcctagaatcatccttggctaattttaatcatgaagtggacttgactttagatattatgtgttccaatcctttccccaattctagcatttatttcctttgtgttttcccagaggctttctcagaaatggcaagttatcaaccaaaggagcctgctgtg

SEQ ID NO: 447909 - DNA, 5319 bp, Homo sapiens
gcgcagcgccggcttcttcccagcgcgagttgctgctaacgctcctcctccagcttcccacccccgccgcccgccgcggcccggtaccaacgggtggtctcgccgagggagctgtcgtgcctcgtggtcccgggactgcagtggtgtgcgctctcggcgcgtggcgctaggcatggcgatggatcaagtaaacgcgctgtgcgagcagctggtgaaagcggtgacggtcatgatggaccccaactccacccagcgctaccggctggaagccctcaagttttgtgaggagtttaaagaaaagtgtcctatctgtgtcccctgtggcttgaggttggctgagaaaacacaagttgccatcgtcagacattttggccttcagatcctggaacacgttgtcaagtttcggtggaacggcatgtctcgattggagaaggtgtatctgaagaacagtgtcatggagctgattgcaaatggaacattgaacattttggaagaggagaaccatattaaagatgctctgtctcgaattgtagtggaaatgatcaagcgagagtggccacagcattggcctgacatgctaatagaattggacactctttccaaacaaggggaaacacagacagaattggtgatgtttatccttttgcgactggcagaggatgtagtgacttttcagacacttccccctcaaagaagaagggacatccagcaaacattaacccagaacatggaaaggatcttcagttttctgcttaacacacttcaagaaaatgtaaacaagtatcagcaagtgaagacagatacttctcaggagtcaaaggcgcaagcaaactgtcgagtaggagttgcagcactgaatactctagcaggctatattgactgggtgtctatgagtcacatcactgctgaaaactgtaaactcctggagatactgtgtttgctgttgaatgaacaggaacttcagttgggagccgctgagtgtcttctcattgcagtcagcagaaaaggcaagttggaagaccggaagcccttgatggtcttatttggagatgttgccatgcattatatactctccgccgcacagactgctgatggaggaggtttggtagaaaaacactacgtctttctgaagaggctctgtcaggtgttgtgtgcgctgggcaatcagctgtgtgcattgctgggtgcagattctgatgtagaaacaccatcaaactttggaaaatacctggaatcttttcttgctttcacaacccatccaagtcagtttctacgctcttcaactcagatgacttggggagccctcttcaggcatgaaatcctgtcccgtgatcctttgctattagcaataataccaaaatatcttcgtgcttccatgactaacttggtcaagatgggctttccttctaaaacagacagccctagctgtgaatattctcggtttgattttgatagcgatgaggacttcaatgctttcttcaactcctcccgagcacaacaaggagaggtgatgaggttggcatgtcgtttggatcccaaaactagcttccagatggctggggagtggctaaagtatcaactatcaacttttcttgatgctggttctgtgaattcttgttctgcagttggaactggagaaggaagcctctgttccgtcttctcaccttcattcgtgcagtgggaagccatgactctttttttggaaagtgttatcacccagatgtttcgaacactaaatagagaagaaattcctgttaatgatggaatagagctattgcagatggttctgaactttgataccaaggatcccctcatcctgtcctgcgtccttactaatgtctctgcactctttccatttgtcacctacagaccagagttcctgccccaggtcttctctaagctattttcatctgtcacttttgaaactgttgaagaaagtaaggcccccagaacccgggcagtgaggaatgtgaggaggcatgcttgttcctccatcatcaagatgtgtcgtgactacccccagcttgtgctgcccaattttgacatgctttataaccatgtgaagcaactcctctccaatgagctactcctgacacaaatggagaagtgtgccctcatggaagccctggttctcattagcaaccaatttaagaactacgagcgtcagaaggtgttcctagaggagctgatggcaccagtggccagcatctggctttctcaagacatgcacagagtgctgtcagatgttgatgctttcattgcgtatgtgggtacagatcagaagagctgtgacccaggcctggaggatccgtgtggcttaaaccgtgcacgaatgagcttttgtgtatacagcattctgggtgtggtgaaacgaacttgctggcccactgacctagaagaggccaaagctgggggatttgtggtgggttatacatccagtggaaatccaatcttccgtaacccctgcacagagcagattctgaaacttcttgacaatttgcttgcgcttataagaacccacaatacattatatgcaccagaaatgctagccaaaatggcagagcctttcaccaaggctctggatatgcttgacgcggaaaaatctgctatattaggattacctcaacctctcttggaactcaatgactctcctgtcttcaaaaccgtcttggaaagaatgcagcgtttcttctctaccctctatgaaaactgttttcatatcctagggaaggcaggcccttccatgcagcaagacttctatactgtggaggaccttgctacccagcttctcagctcagcctttgtcaacttgaacaatattcctgactaccgactcagacccatgcttcgggtctttgtaaagcctctggtgctcttctgtcccccagagcactatgaagccctggtatcccccatcctcggacctcttttcacctacctccatatgaggctttctcagaaatggcaagttatcaaccaaaggagcctgctgtgtggagaagatgaggctgcagatgaaaacccagagtctcaagagatgctggaggagcaactggtgaggatgttaacccgagaagtcatggacctaatcacggtttgctgtgtttcaaagaagggtgctgaccacagtagtgctcccccagcagatggagacgatgaagaaatgatggccacagaggtcaccccctcagctatggcagagcttacagacctgggcaaatgtctgatgaagcatgaggatgtttgtacagcgctattaattacagccttcaattccctggcctggaaagatactctgtcctgccagaggacaacctcacagctctgctggcctctcctcaaacaagtgctgtcagggacactgctcgcagatgcagttacgtggcttttcaccagtgtgctgaaaggcttacagatgcacgggcagcacgacgggtgcatggcttccctggtccatctggccttccagatatacgaggcactgcgccccaggtacctggagataagagctgtaatggagcaaatccctgaaatacagaaggactcactggaccagtttgactgcaagcttttaaacccctccctgcagaaagtggctgacaagcgccgaaaggaccaattcaaacgcctcattgctggttgcattgggaaacccttgggagagcagttccgaaaagaagttcacattaagaatcttccctcacttttcaaaaaaacaaagccaatgctggagacggaggtgctggacaatgatgggggtggcctggccaccatctttgaaccctgaatcaagcttttgggcatccttcctcggcctttcttgtcatctcttctttccctttgtagccgatctctaggcccttcttgcactgccacctcactttccaccactgtcagcctggaaagagatccaggtctggagctggagagaacaggccctgtgcaggaccagaagtaattatactaaagtatcaagaaagggagttagggcttaaactattctgtctagatgtcccagatagttcccattctacttggagatttggcttttccaagaaaagctagagcagagcagcccttctcccacaagccctcccacccccgtgcagccacatacctgtacagaatggtaactaagggtgctgtgcccaaccctgcgactagcaaggctcgcagcaagagcacagccctcaactacttgtgccagagtttctcttggaccactccaactcccactgagcccttttgctgctgggctggcaggaaactttccccactccctaaggggcatgtctgggttaggtgctaagtgctgaagagaacttggtcagttctctcaactttgctttgggcaagaatctggtcacctgatgggatccatggtacaggctactgctaaacttggcacagtatcaagtatagtacctccaaggaccagggctgggcagtctttagtgctaacatcccctttagagttcacacatcttgcccttccatgaatgacccctcagtctggcctccccagcctcaaggtccactcaggcacaagagccacagtaccctagatagtgtcacatgacaccgttgtcatccaaggataatacagaccaactaggctacatctgtgatgagcagctagcaaagccgctggtcttctcctaggactaagtccaggtgccttccacaatctcatggtctttcaggtccctggttacttttctcaaaggccatttccaaaagaatacatgccttcacatcacaacctgtactgtgagtccattctagaggtcactgaaaggccctgtaaagagaggacatggatacgggacctggccctgaggttattactggccgtaaggcagagttaatccatacagaaaccagtgtgtccatgtgctctgcacaaaaacagacctgttgtccatccagtccactgacaagagggtttccccgagagccgaagtggactgaagctacagtttttagctggtgcgggccacaggcagggtcagattgagaagaagcaaagctggggaagcagaagttgggagtcttgtgttgctccctcttcctgtgtggtgctctgggtttctgtggatcgtgaaggcgatctcaagagtgtttccctccaaacctgatagctgcctattcctgtctggttggggctgtggaggatgtagttgtatttattgcattgtaatatttttaacatcctgtgacttcatgctagaaattttctattgtttatagaaactttttgtagaaacattaactctaaagcacatctgcatgtcagtaaaaatctcagtttcgtacaga

SEQ ID NO: 447910 - DNA, 296 bp, Homo sapiens
gttcagaggatcccgctgtcagttatagatgtgtcgtgactacccccagctgtgctgcccaattttgacatgctttataaccatgtgaagcaactcctctccaatgagctactcctgacacaaatggagaagtgtgccctcatggaagccctggttctcattagcaaccaatttaagaactacgagcgtcagaaggtgttcctagaggagctgatggcaccagtggccagcatctggctttctcaagacatgcacagagtgctgtcagatgttgatgctggacgacgggtaccgag

SEQ ID NO: 447911 - DNA, 5282 bp, Homo sapiens
gcgcagcgccggcttcttcccagcgcgagttgctgctaacgctcctcctccagcttcccacccccgccgcccgccgcggcccggtaccaacgggtggtctcgccgagggagctgtcgtgcctcgtggtcccgggactgcagtggtgtgcgctctcggcgcgtggcgctaggcatggcgatggatcaagtaaacgcgctgtgcgagcagctggtgaaagcggtgacggtcatgatggaccccaactccacccagcgctaccggctggaagccctcaagttttgtgaggagtttaaagaaaagtgtcctatctgtgtcccctgtggcttgaggttggctgagaaaacacaagttgccatcgtcagacattttggccttcagatcctggaacacgttgtcaagtttcggtggaacggcatgtctcgattggagaaggtgtatctgaagaacagtgtcatggagctgattgcaaatggaacattgaacattttggaagaggagaaccatattaaagatgctctgtctcgaattgtagtggaaatgatcaagcgagagtggccacagcattggcctgacatgctaatagaattggacactctttccaaacaaggggaaacacagacagaattggtgatgtttatccttttgcgactggcagaggatgtagtgacttttcagacacttccccctcaaagaagaagggacatccagcaaacattaacccagaacatggaaaggatcttcagttttctgcttaacacacttcaagaaaatgtaaacaagtatcagcaagtgaagacagatacttctcaggagtcaaaggcgcaagcaaactgtcgagtaggagttgcagcactgaatactctagcaggctatattgactgggtgtctatgagtcacatcactgctgaaaactgtaaactcctggagatactgtgtttgctgttgaatgaacaggaacttcagttgggagccgctgagtgtcttctcattgcagtcagcagaaaaggcaagttggaagaccggaagcccttgatggtcttatttggagatgttgccatgcattatatactctccgccgcacagactgctgatggaggaggtttggtagaaaaacactacgtctttctgaagaggctctgtcaggtgttgtgtgcgctgggcaatcagctgtgtgcattgctgggtgcagattctgatgtagaaacaccatcaaactttggaaaatacctggaatcttttcttgctttcacaacccatccaagtcagtttctacgctcttcaactcagatgacttggggagccctcttcaggcatgaaatcctgtcccgtgatcctttgctattagcaataataccaaaatatcttcgtgcttccatgactaacttggtcaagatgggctttccttctaaaacagacagccctagctgtgaatattctcggtttgattttgatagcgatgaggacttcaatgctttcttcaactcctcccgagcacaacaaggagaggtgatgaggttggcatgtcgtttggatcccaaaactagcttccagatggctggggagtggctaaagtatcaactatcaacttttcttgatgctggttctgtgaattcttgttctgcagttggaactggagaaggaagcctctgttccgtcttctcaccttcattcgtgcagtgggaagccatgactctttttttggaaagtgttatcacccagatgtttcgaacactaaatagagaagaaattcctgttaatgatggaatagagctattgcagatggttctgaactttgataccaaggatcccctcatcctgtcctgcgtccttactaatgtctctgcactctttccatttgtcacctacagaccagagttcctgccccaggtcttctctaagctattttcatctgtcacttttgaaactgttgaagaaagtaaggcccccagaacccgggcagtgaggaatgtgaggaggcatgcttgttcctccatcatcaagatgtgtcgtgactacccccagcttgtgctgcccaattttgacatgctttataaccatgtgaagcaactcctctccaatgagctactcctgacacaaatggagaagtgtgccctcatggaagccctggttctcattagcaaccaatttaagaactacgagcgtcagaaggtgttcctagaggagctgatggcaccagtggccagcatctggctttctcaagacatgcacagagtgctgtcagatgttgatgctttcattgcgtatgtgggtacagatcagaagagctgtgacccaggcctggaggatccgtgtggcttaaaccgtgcacgaatgagcttttgtgtatacagcattctgggtgtggtgaaacgaacttgctggcccactgacctagaagaggccaaagctgggggatttgtggtgggttatacatccagtggaaatccaatcttccgtaacccctgcacagagcagattctgaaacttcttgacaatttgcttgcgcttataagaacccacaatacattatatgcaccagaaatgctagccaaaatggcagagcctttcaccaaggctctggatatgcttgacgcggaaaaatctgctatattaggattacctcaacctctcttggaactcaatgactctcctgtcttcaaaaccgtcttggaaagaatgcagcgtttcttctctaccctctatgaaaactgttttcatatcctagggaaggcaggcccttccatgcagcaagacttctatactgtggaggaccttgctacccagcttctcagctcagcctttgtcaacttgaacaatattcctgactaccgactcagacccatgcttcgggtctttgtaaagcctctggtgctcttctgtcccccagagcactatgaagccctggtatcccccatcctcggacctcttttcacctacctccatatgaggctttctcagaaatggcaagttatcaaccaaaggagcctgctgtgtggagaagatgaggctgcagatgaaaacccagagtctcaagagatgctggaggagcaactgcggtttgctgtgtttcaaagaagggtgctgaccacagtagtgctcccccagcagatggagacgatgaagaaatgatggccacagaggtcaccccctcagctatggcagagcttacagacctgggcaaatgtctgatgaagcatgaggatgtttgtacagcgctattaattacagccttcaattccctggcctggaaagatactctgtcctgccagaggacaacctcacagctctgctggcctctcctcaaacaagtgctgtcagggacactgctcgcagatgcagttacgtggcttttcaccagtgtgctgaaaggcttacagatgcacgggcagcacgacgggtgcatggcttccctggtccatctggccttccagatatacgaggcactgcgccccaggtacctggagataagagctgtaatggagcaaatccctgaaatacagaaggactcactggaccagtttgactgcaagcttttaaacccctccctgcagaaagtggctgacaagcgccgaaaggaccaattcaaacgcctcattgctggttgcattgggaaacccttgggagagcagttccgaaaagaagttcacattaagaatcttccctcacttttcaaaaaaacaaagccaatgctggagacggaggtgctggacaatgatgggggtggcctggccaccatctttgaaccctgaatcaagcttttgggcatccttcctcggcctttcttgtcatctcttctttccctttgtagccgatctctaggcccttcttgcactgccacctcactttccaccactgtcagcctggaaagagatccaggtctggagctggagagaacaggccctgtgcaggaccagaagtaattatactaaagtatcaagaaagggagttagggcttaaactattctgtctagatgtcccagatagttcccattctacttggagatttggcttttccaagaaaagctagagcagagcagcccttctcccacaagccctcccacccccgtgcagccacatacctgtacagaatggtaactaagggtgctgtgcccaaccctgcgactagcaaggctcgcagcaagagcacagccctcaactacttgtgccagagtttctcttggaccactccaactcccactgagcccttttgctgctgggctggcaggaaactttccccactccctaaggggcatgtctgggttaggtgctaagtgctgaagagaacttggtcagttctctcaactttgctttgggcaagaatctggtcacctgatgggatccatggtacaggctactgctaaacttggcacagtatcaagtatagtacctccaaggaccagggctgggcagtctttagtgctaacatcccctttagagttcacacatcttgcccttccatgaatgacccctcagtctggcctccccagcctcaaggtccactcaggcacaagagccacagtaccctagatagtgtcacatgacaccgttgtcatccaaggataatacagaccaactaggctacatctgtgatgagcagctagcaaagccgctggtcttctcctaggactaagtccaggtgccttccacaatctcatggtctttcaggtccctggttacttttctcaaaggccatttccaaaagaatacatgccttcacatcacaacctgtactgtgagtccattctagaggtcactgaaaggccctgtaaagagaggacatggatacgggacctggccctgaggttattactggccgtaaggcagagttaatccatacagaaaccagtgtgtccatgtgctctgcacaaaaacagacctgttgtccatccagtccactgacaagagggtttccccgagagccgaagtggactgaagctacagtttttagctggtgcgggccacaggcagggtcagattgagaagaagcaaagctggggaagcagaagttgggagtcttgtgttgctccctcttcctgtgtggtgctctgggtttctgtggatcgtgaaggcgatctcaagagtgtttccctccaaacctgatagctgcctattcctgtctggttggggctgtggaggatgtagttgtatttattgcattgtaatatttttaacatcctgtgacttcatgctagaaattttctattgtttatagaaactttttgtagaaacattaactctaaagcacatctgcatgtcagtaaaaatctcagtttcgtacaga

SEQ ID NO: 447912 - DNA, 4758 bp, Homo sapiens
gcgcagcgccggcttcttcccagcgcgagttgctgctaacgctcctcctccagcttcccacccccgccgcccgccgcggcccggtaccaacgggtggtctcgccgagggagctgtcgtgcctcgtggtcccgggactgcagtggtgtgcgctctcggcgcgtggcgctaggcatggcgatggatcaagtaaacgcgctgtgcgagcagctggtgaaagcggtgacggtcatgatggaccccaactccacccagcgctaccggctggaagccctcaagttttgtgaggagtttaaagaaaagtgtcctatctgtgtcccctgtggcttgaggttggctgagaaaacacaagttgccatcgtcagacattttggccttcagatcctggaacacgttgtcaagtttcggtggaacggcatgtctcgattggagaaggtgtatctgaagaacagtgtcatggagctgattgcaaatggaacattgaacattttggaagaggagaaccatattaaagatgctctgtctcgaattgtagtggaaatgatcaagcgagagtggccacagcattggcctgacatgctaatagaattggacactctttccaaacaaggggaaacacagacagaattggtgatgtttatccttttgcgactggcagaggatgtagtgacttttcagacacttccccctcaaagaagaagggacatccagcaaacattaacccagaacatggaaaggatcttcagttttctgcttaacacacttcaagaaaatgtaaacaagtatcagcaagtgaagacagatacttctcaggagtcaaaggcgcaagcaaactgtcgagtaggagttgcagcactgaatactctagcaggctatattgactgggtgtctatgagtcacatcactgctgaaaactgtaaactcctggagatactgtgtttgctgttgaatgaacaggaacttcagttgggagccgctgagtgtcttctcattgcagtcagcagaaaaggcaagttggaagaccggaagcccttgatggtcttatttggagatgttgccatgcattatatactctccgccgcacagactgctgatggaggaggtttggtagaaaaacactacgtctttctgaagaggctctgtcaggtgttgtgtgcgctgggcaatcagctgtgtgcattgctgggtgcagattctgatgtagaaacaccatcaaactttggaaaatacctggaatcttttcttgctttcacaacccatccaagtcagtttctacgctcttcaactcagatgacttggggagccctcttcaggcatgaaatcctgtcccgtgatcctttgctattagcaataataccaaaatatcttcgtgcttccatgactaacttggtcaagatgggctttccttctaaaacagacagccctagctgtgaatattctcggtttgattttgatagcgatgaggacttcaatgctttcttcaactcctcccgagcacaacaaggagaggtgatgaggttggcatgtcgtttggatcccaaaactagcttccagatggctggggagtggctaaagtatcaactatcaacttttcttgatgctggttctgtgaattcttgttctgcagttggaactggagaaggaagcctctgttccgtcttctcaccttcattcgtgcagtgggaagccatgactctttttttggaaagtgttatcacccagatgtttcgaacactaaatagagaagaaattcctgttaatgatggaatagagctattgcagatggttctgaactttgataccaaggatcccctcatcctgtcctgcgtccttactaatgtctctgcactctttccatttgtcacctacagaccagagttcctgccccaggtcttctctaagctattttcatctgtcacttttgaaactgttgaagaaagtaaggcccccagaacccgggcagtgaggaatgtgaggaggcatgcttgttcctccatcatcaagatgtgtcgtgactacccccagcttgtgctgcccaattttgacatgctttataaccatgtgaagcaactcctctccaatgagctactcctgacacaaatggagaagtgtgccctcatggaagccctggttctcattagcaaccaatttaagaactacgagcgtcagaaggtgttcctagaggagctgatggcaccagtggccagcatctggctttctcaagacatgcacagagtgctgtcagatgttgatgctttcattgcgtatgtgggtacagatcagaagagctgtgacccaggcctggaggatccgtgtggcttaaaccgtgcacgaatgagcttttgtgtatacagcattctgggtgtggtgaaacgaacttgctggcccactgacctagaagaggccaaagctgggggatttgtggtgggttatacatccagtggaaatccaatcttccgtaacccctgcacagagcagattctgaaacttcttgacaatttgcttgcgcttataagaacccacaatacattatatgcaccagaaatgctagccaaaatggcagagcctttcaccaaggctctggatatgcttgacgcggaaaaatctgctatattaggattacctcaacctctcttggaactcaatgactctcctgtcttcaaaaccgtcttggaaagaatgcagcgtttcttctctaccctctatgaaaactgttttcatatcctagggaaggcaggcccttccatgcagcaagacttctatactgtggaggaccttgctacccagcttctcagctcagcctttgtcaacttgaacaatattcctgactaccgactcagacccatgcttcgggtctttgtaaagcctctggtgctcttctgtcccccagagcactatgaagccctggtatcccccatcctcggacctcttttcacctacctccatatgaggctttctcagaaatggcaagttatcaaccaaaggagcctgctgtgtggagaagatgaggctgcagatgaaaacccagagtctcaagagatgctggaggagcaactggtgaggatgttaacccgagaagtcatggacctaatcacggtttgctgtgtttcaaagaagggtgctgaccacagtagtgctcccccagcagatggagacgatgaagaaatgatggccacagaggtcaccccctcagctatggcagagcttacagacctgggcaaatgtctgatgaagcatgaggatgtttgtacagcgctattaattacagccttcaattccctggcctggaaagatactctgtcctgccagaggacaacctcacagctctgctggcctctcctcaaacaagtgctgtcagggacactgctcgcagatgcagttacgtggcttttcaccagtgtgctgaaaggcttacagatgcacgggcagcacgacgggtgcatggcttccctggtccatctggccttccagatatacgaggcactgcgccccaggtacctggagataagagctgtaatggagcaaatccctgaaatacagaaggactcactggaccagtttgactgcaagcttttaaacccctccctgcagaaagtggctgacaagcgccgaaaggaccaattcaaacgcctcattgctggttgcattgggaaacccttgggagagcagttccgaaaagaagttcacattaagaatcttccctcacttttcaaaaaaacaaagccaatgctggagacggaggtgctggacaatgatgggggtggcctggccaccatctttgaaccctgaatcaagcttttgggcatccttcctcggcctttcttgtcatctcttctttccctttgtagccgatctctaggcccttcttgcactgccacctcactttccaccactgtcagcctggaaagagatccaggtctggagctggagagaacaggccctgtgcaggaccagaagtaattatactaaagtatcaagaaagggagttagggcttaaactattctgtctagatgtcccagatagttcccattctacttggagatttggcttttccaagaaaagctagagcagagcagcccttctcccacaagccctcccacccccgtgcagccacatacctgtacagaatggtaactaagggtgctgtgcccaaccctgcgactagcaaggctcgcagcaagagcacagccctcaactacttgtgccagagtttctcttggaccactccaactcccactgagcccttttgctgctgggctggcaggaaactttccccactccctaaggggcatgtctgggttaggtgctaagtgctgaagagaacttggtcagttctctcaactttgctttgggcaagaatctggtcacctgatgggatccatggtacaggctactgctaaacttggcacagtatcaagtatagtacctccaaggaccagggctgggcagtctttagtgctaacatcccctttagagttcacacatcttgcccttccatgaatgacccctcagtctggcctccccagcctcaaggtccactcaggcacaagagccacagtaccctagatagtgtcacatgacaccgttgtcatccaaggataatacagaccaactaggctacatctgtgatgagcagctagcaaagccgctggtcttctcctaggactaagtccaggtgccttccacaatctcatggtctttcaggtccctggttacttttctcaaaggccatttccaaaagaatacatgccttcacatc

SEQ ID NO: 447913 - DNA, 2629 bp, Homo sapiens
caaccccagctactctgtattcctctgctttattcttcttcatagcagttgtcactacccaacattatgtttttatttatgtattcctttcttacctatctcccatgttagaatgtagactcccatcagggaagggacctattgtcctataccttttatccccagtaactaaatcagtgtctggtgctcaaatatttgtccaacaacaaagtaacttcagtatttgcagcattttgtgtttctgcctagaagctcccatttccctcatgtacagcttgagtgcatctctagaagatcagccatgggcatgggcattatgtggaggtgggagggctcctagtactacttagccaccacttagcctagaacactcagctttgctttgttttttgcgcttctgtcagtacaagatattcttctctgttctgaaaggatggagcttaacattctactctctgataacagatgaagaaatgatggccacagaggtcaccccctcagctatggcagagcttacagacctgggcaaatgtctgatgaagcatgaggatgtttgtacagcgctattaattacagccttcaattccctggcctggaaagatactctgtcctgccagaggacaacctcacagctctgctggcctctcctcaaacaagtgctgtcagggacactgctcgcagatgcagttacgtggcttttcaccagtgtgctgaaaggcttacagatgcacgggcagcacgacgggtgcatggcttccctggtccatctggccttccagatatacgaggcactgcgccccaggtacctggagataagagctgtaatggagcaaatccctgaaatacagaaggactcactggaccagtttgactgcaagcttttaaacccctccctgcagaaagtggctgacaagcgccgaaaggaccaattcaaacgcctcattgctggttgcattgggaaacccttgggagagcagttccgaaaagaagttcacattaagaatcttccctcacttttcaaaaaaacaaagccaatgctggagacggaggtgctggacaatgatgggggtggcctggccaccatctttgaaccctgaatcaagcttttgggcatccttcctcggcctttcttgtcatctcttctttccctttgtagccgatctctaggcccttcttgcactgccacctcactttccaccactgtcagcctggaaagagatccaggtctggagctggagagaacaggccctgtgcaggaccagaagtaattatactaaagtatcaagaaagggagttagggcttaaactattctgtctagatgtcccagatagttcccattctacttggagatttggcttttccaagaaaagctagagcagagcagcccttctcccacaagccctcccacccccgtgcagccacatacctgtacagaatggtaactaagggtgctgtgcccaaccctgcgactagcaaggctcgcagcaagagcacagccctcaactacttgtgccagagtttctcttggaccactccaactcccactgagcccttttgctgctgggctggcaggaaactttccccactccctaaggggcatgtctgggttaggtgctaagtgctgaagagaacttggtcagttctctcaactttgctttgggcaagaatctggtcacctgatgggatccatggtacaggctactgctaaacttggcacagtatcaagtatagtacctccaaggaccagggctgggcagtctttagtgctaacatcccctttagagttcacacatcttgcccttccatgaatgacccctcagtctggcctccccagcctcaaggtccactcaggcacaagagccacagtaccctagatagtgtcacatgacaccgttgtcatccaaggataatacagaccaactaggctacatctgtgatgagcagctagcaaagccgctggtcttctcctaggactaagtccaggtgccttccacaatctcatggtctttcaggtccctggttacttttctcaaaggccatttccaaaagaatacatgccttcacatcacaacctgtactgtgagtccattctagaggtcactgaaaggccctgtaaagagaggacatggatacgggacctggccctgaggttattactggccgtaaggcagagttaatccatacagaaaccagtgtgtccatgtgctctgcacaaaaacagacctgttgtccatccagtccactgacaagagggtttccccgagagccgaagtggactgaagctacagtttttagctggtgcgggccacaggcagggtcagattgagaagaagcaaagctggggaagcagaagttgggagtcttgtgttgctccctcttcctgtgtggtgctctgggtttctgtggatcgtgaaggcgatctcaagagtgtttccctccaaacctgatagctgcctattcctgtctggttggggctgtggaggatgtagttgtatttattgcattgtaatatttttaacatcctgtgacttcatgctagaaattttctattgtttatagaaactttttgtagaaacattaactctaaagcacatctgcatgtcagtaaaaatctcagtttcgtacaga
